United States Patent Application Publication US 2018/0126003 A1 - sequence listing, part 25

SEQ ID NO: 41456 - DNA, 246 bp, Artificial Sequence
  derived and/or modified sequence
atggccctgagcagcgcctggagaagcgtgctgcccctgtggctgctgtggagcgccgcctgcagcagagccgccagcggcgacgacaacgccttccccttcgacatcgagggcagcagcgccgtgggcagacaggacccccccgagaccagcgagcccagagtggccctgggcagactgccccccgccgccgagaagtgcaacgccggcttcttccacaccctgagcggcgagtgcgtgccctag

SEQ ID NO: 41457 - RNA, 5472 nt, Artificial Sequence
  derived and/or modified sequence
auggcucucuccucugcauggagauccguccuuccccuuugguuguuguggucugcagcuuguagccgggcagcuagcggagaugauaaugcuuuuccuuuugauaucgaaggcuccuccgccguugggcggcaagacccgccagaaacgagugagccuaggguagccuugggccgguugccacccgcugccgagaaauguaaugccggcuucuuucauaccuuaucuggagaaugugugccaugcgauugcaacgggaauuccaaugaaugccuugauggcagcggguacuguguccauugucagagaaacaccaccggggagcacugcgagaaaugccuggauggguacauuggagauagcauucgaggggcuccucaauuuugccagccgugcccuugcccacugccccacuuagcaaacuuugccgaauccugcuaccggaaaaacggagccguacgcugcauuugcaaugaaaauuacgcuggcccaaacugugagcggugcgcuccuggguacuacgggaacccuuuacuaauaggcuccacuuguaaaaaaugcgauuguucaggcaacucugauccgaaucuuauuuucgaggacugcgaugaagugacuggucaguguaggaacugucuuaggaauaccaccggcuuuaagugcgaacggugcgccccuggguacuacggcgaugcucgcauugccaaaaauugugcuguuuguaacugcgggggcggacccugcgacagcguuaccggcgaaugucuggaggaggguuucgagccaccuaccggaauggacuguccaacgauuucuugugauaaaugcgucugggacuuaacagaugcacuccgacuggcagcccucaguaucgaggaaggcaaguccggagugcugagugucuccucuggagcugccgcucaccgucacgugaaugagauuaaugcgaccauuuaucugcugaagaccaaacuuucugagcgugagaaccaguacgcacugcgcaagauccagaucaacaacgccgagaacacaaugaaguccuugcucucagauguggaggagcugguggaaaaggagaaucaggccucaagaaaagggcaacucguccagaaggaaucgauggauacuaucaaucacgcaucgcagcuuguugaacaggcccaugacaugagggacaagauucaggagauuaauaacaagauguuguacuacggcgaagagcaugagcugagcccuaaagaaaucagcgaaaaacuugugcuggcccagaagauguuagaggaaauuagaaguagacagcccuucuucacucaaagggaacugguggacgaggaggccgacgaggcuuacgagcugcugucacaagccgaguccuggcaaagguugcauaacgagacccgaacguuauucccgguagugcuggaacaacuugacgacuauaaugccaaacugucugaucugcaagaggcucuggaccaagcccuaaacuaugugcgcgaugccgaggauaugaaucgcgccacugccgcaaggcagcgcgaccaugaaaaacagcaagagcgugugagagagcaaauggaagucgugaauaugucgcugucaacuagugccgacagucuuacuaccccccgacuuacgcugucagaacucgaugacaucauuaaaaaugccucagggaucuacgccgagauugacggagcuaagagcgagcuccaggucaaacuguccaaucugucuaaccucucucacgaucuugugcaggaggccauugaucaugcccaggaucuccagcaggaggcgaacgagcugagcaggaagcuccauucguccgauaugaacggacugguucaaaaggcuuuggacgcaucaaacguguaugaaaauauugugaacuaugucagcgaggccaaugaaaccgccgaauuugcccucaauacuacugauaggauuuaugacgcagugucagggaucgauacccagauaauauaucacaaagaugaaucugagaauuugcugaaucaagcccgagaguuacaagcaaaagccgagagcaguagcgaugaggcaguugccgacacgagucggcgaguggguggcgcucucgcgcgcaaauccgcccugaaaacuagacucucugaugcugugaagcagcuccaggcugcagagcgcggugaugcccaacagagacuggggcagucccgccuaauaaccgaagaagcaaacaggaccacgauggaagugcaacaggccacugccccgauggcuaauaaccugaccaacuggagccaaaacuugcagcauuuugauucuucugcauacaauacugccgugaauuccgcuagagacgccguucgaaaucugaccgagguggugccucaguugcuggaucagcuccggacaguugagcagaagcgcccagcaagcaacgucagcgccuccauccaacgaauccgggagcuaaucgcucagacgcgcucaguagcaagcaagauucagguaucuaugauguucgauggccagagcgcagucgaagugcacuccagaacaucuauggacgacuugaaggccuucacuagccugucacuuuacaugaagccucccgucaaaaggcccgaauuaacagagaccgccgaucaauuuauccuguaccuagggaguaagaacgcuaaaaaggaguauaugggacuggcgauaaagaacgauaaccuaguguacguuuauaaccugggcacgaaagacguggagauuccccucgacuccaagccugugucuaguuggccugcuuacuuuagcaucgugaaaaucgagagagucgggaaacauggcaaagucuuuuuaacagucccuagcuuaagcucuaccgccgaagaaaaguuuaucaaaaagggcgaauucucuggcgaugauucauuacuugaccuugaccccgaagacacagucuuuuacgugggcggagugccuucuaacuuuaaguuacccacgucacugaaucugccuggauuuguggguugucuagaacucgccacucuaaacaaugauguaauuagucuguauaauuucaagcacauuuacaauauggauccauccaccucgguuccaugcgccagagauaaacuugcauuuacgcaauccagagcugcuucauacuucuucgacgggaguggauaugcagucguccgcgauaucacgcguaggggcaaauuuggucaaguaaccagguuugacauagaagucaggacuccagcagauaaugggcugauucuccucauggucaauggcuccauguuuuuucgccuagaaaugcgaaaugguuacuuacauguuuucuacgacuucggcuucucaggggguccugugcaucuggaggacacacugaagaaagcccagaucaacgacgcaaaauaucacgagauuucuauuauauaccauaacgauaaaaagaugauccucgugguugaccggcgccacguuaaaucgauggacaacgagaagaugaaaauacccuucacagacauuuacauaggcggugccccaccggagauucugcaaucccgugcccucagagcucaucugccucucgauaucaauuuccggggauguaugaagggguuccaguuccagaagaaggauuucaaucuucucgagcagaccgagacccugggcguggguuacggcugccccgaggauaguuugaucuccagaagagccuauuucaauggccagagcuucauagccucuauucagaagauaaguuuuuuugacggcuucgaggggggguucaacuuccggacucuccagcccaauggccuguuauucuacuacgccucaggcucugacgucuucucaauuagccuagauaauggaacagugauaauggaugugaaggggaucaaggugcagagcguggacaaacaguacaacgauggacugucacauuucguuaucuccucggugagccccacgcgauacgagcucauuguggacaaaucucgugugggcuccaaaaacccuaccaaaggcaaaaucgagcagacacaggccucugaaaaaaaguucuauuuuggcgggucuccuauauccgcgcaguacgccaacuucacuggaugcauuucuaaugcuuacuuuacaagagucgaccgcgauguggaaguggaggauuuucagcgguacaccgaaaaggugcacacgagccuguaugaauguccuauagagucuucuccucuguuucuguugcacaagaaaggaaagaaucugucuaagccaaaagcgucacagaacaagaagggcggcaagagcaaggacgcgcccucuugggacccugucgccuuaaagcugcccgagcgaaauacccccaggaauagucacugccaucuuagcaauuccccccgcgccauugagcaugcauaccaguauggcggaacagcaaacuccagacaggaauuugagcauuugaagggagauuucggugcaaagagccaguuuucuaucagacucaggacucgaaguagccacggcaugaucuucuaugucucggaucaggaagaaaaugauuucaugaccuuauuccuugcccaugggagacucguguacauguucaacgugggucauaagaaauugaaaauccguucucaagagaaguauaaugacgggcuguggcaugacgucauuuuuauuagggagagaagcagcggacgccuagucauagauggacugagagugcuggaagagucguugccaccuacugaggccacuuggaaaauuaaaggaccaaucuaucucggaggggucgcacccggaaaagcuguuaagaauguacagaucaacuccaucuauuccuucagcggcugccuaucuaaccuccagcugaacggggccucuaucaccuccgccucacagacauucaguguuaccccuugcuucgaaggaccgauggaaacugguacguacuuuucuacagaaggcggauacgugguacuugacgagagcuucaacaucggucugaaauucgagauugccuucgaaguacguccaaggucuagcucgggaacacucgugcacggccauagcgugaacggggaauaccucaacgugcauaugaagaauggucaggucaucgugaaagugaacaaugggaucagggauuucucuacuucugugacacccaagcagucccucugugauggaagauggcaucgaauuacugugauuagagacucuaacgucgugcaguuagauguugauuccgaagugaaucacguggucggaccucucaacccaaaacccauugaucaccgggagccaguuuucguuggaggcguaccugagucccugcucacuccaagauuggccccuagcaagccauucacggguuguauuagacauuuugugaucgauggccaccccgugagcuuuucuaaagccgcccuuguaaguggagcagucuccaucaacagcugcccggccgcuuag

SEQ ID NO: 41458 - RNA, 5472 nt, Artificial Sequence
  derived and/or modified sequence
auggcccuaagcagcgccuggcgcagcgugcugccacucuggcuccugugguccgccgccugcucuagggcagccuccggggaugacaacgccuucccauuugacauugagggcucaagcgcuguggggcgucaagaccccccugaaacuagugaaccucgcguggcauuaggucgccugcccccugcugccgaaaaguguaaugcugguuuuuuucauacucugaguggagagugugucccuugugauuguaauggcaacucaaacgaaugccuugacggauccggauacugcgugcacugccaacgaaacaccacaggugagcauugcgagaagugucuggacgguuauauuggagacucuauccgcggagcaccucaauucugucaacccugucccugcccuuuaccacacuuggcuaacuuugcugaaaguugcuauagaaaaaacggcgcugugaggugcauuuguaacgagaauuacgccggccccaacugugagcgcugcgccccgggauauuacggcaacccccuucugaucggcagcacuugcaagaaaugcgauuguuccgggaauagugauccaaaucugauuuuugaggacugcgacgaggugaccggccagugccgaaauugcuuaaggaauaccaccggauucaagugugaaaggugcgcucccggauauuacggggaugccaggauagccaagaauugugccguuugcaauuguggaggagguccgugcgacuccguuacaggcgaaugccuagaggaaggcuucgaaccaccuacaggaauggacugucccaccauuagcugugacaaaugcgucugggaucuaacugaugcuuugagauuggcugcgcuguccaucgaagaagggaagagcgguguacucagcgugucaagcggcgcugcugcccaucgacacgugaaugaaauuaacgccacgaucuaccugcugaaaaccaaacugagcgagagggagaaucaauacgcucucagaaaaauccaaaucaauaaugcggagaacaccaugaaaucccugcuuuccgacguggaggaacuaguggaaaaagaaaaucaagcuagucgcaaaggucaauuaguccagaaggagagcauggacacaauaaaccaugccagccagcuaguggaacaagcccacgacaugcgcgauaaaauccaagaaauuaauaacaagaugcucuacuauggagaagaacacgaauugucucccaaggaaaucagcgagaaacuagugcuggcccaaaaaaugcuggaggagauacguaguagacaacccuuuuucacucagagagagcucguugacgaagaagcagacgaagcauaugagcugcucagucaggcggagaguuggcagcgccuacauaacgagacccguacguuauuucccgugguacuagaacaguuagaugacuacaacgcaaaacuuagcgaccuucaggaagcccucgaccaggcacucaacuacguccgagacgccgaggacaugaaccgugcaacugccgcucgccaacgcgaucacgagaaacagcaagagaggguacgggagcagauggagguugugaauaugucccuuaguaccucggcagacucucuaacuacaccacggcuuaccuuaucugagcucgaugauauaauuaagaaugcuucuggaauuuaugcugaaaucgacggggcaaaaucagaacugcaggugaaauuaucaaaccuuagcaaccuuucccacgacuuggugcaggaggccaucgaccacgcucaggacuugcaacaggaggcaaacgagcuuagcaggaagcuucacaguagugacaugaacgggcuggugcaaaaagcccucgaugccucaaacguguacgagaacauagugaauuaugugagcgaagccaacgaaacugcggaauuugcccucaauaccacugacagaaucuaugacgccguaucaggaaucgauacacagauaaucuaucacaaagacgagagugaaaaucugcugaaccaggcaagagaacuccaggcaaaggcugaauccucaagcgacgaggcgguagcagacacgucccgaagagucggaggcgcacucgccaggaaauccgcucugaaaacccgacuauccgaugcggucaaacagcuacaggcggccgaacguggagacgcacagcagagacuuggacagagucgacucauuacagaggaagcuaacaggacaacgauggaaguucaacaggccacugcuccuauggcaaauaaucuaaccaacuggucucagaaucuacagcacuuugauagcagcgccuacaacaccgccgugaauucagcccgggacgccgugcgaaauuuaacagaagucgucccacagcuccuugaccagcugaggaccguggagcagaagaggccagcaucuaacgucucugccaguauccaacgaauacgggaacugaucgcucaaaccagaagcgucgcauccaaaauucaggugucuaugauguuugacggucaaagcgcugucgagguacauucaagaacuucuauggacgaucugaaggcguuuacuucccugucucuguacaugaaacccccagucaaaaggccagagcugaccgagacugcagaccaguuuauccuuuaccugggcucaaaaaacgcaaagaaagaguauaugggccuugccaucaagaacgauaaccuaguguacguuuauaaccugggcacgaaagacguggagauuccccucgacuccaagccugugucuaguuggccugcuuacuuuagcaucgugaaaaucgagagagucgggaaacauggcaaagucuuuuuaacagucccuagcuuaagcucuaccgccgaagaaaaguuuaucaaaaagggcgaauucucuggcgaugauucauuacuugaccuugaccccgaagacacagucuuuuacgugggcggagugccuucuaacuuuaaguuacccacgucacugaaucugccuggauuuguggguugucuagaacucgccacucuaaacaaugauguaauuagucuguauaauuucaagcacauuuacaauauggauccauccaccucgguuccaugcgccagagauaaacuugcauuuacgcaauccagagcugcuucauacuucuucgacgggaguggauaugcagucguccgcgauaucacgcguaggggcaaauuuggucaaguaaccagguuugacauagaagucaggacuccagcagauaaugggcugauucuccucauggucaauggcuccauguuuuuucgccuagaaaugagaaauggauaccugcacguguuuuaugacuuuggauuuagcggcggaccaguacaccucgaagacacacugaagaaggcucagauaaaugacgcgaaauaccaugaaauuucgauuauauaucacaaugacaagaaaaugauacuggugguggaucggaggcacguaaaaucuauggacaacgaaaaaaugaaaauuccauuuacagauauauauaucggaggcgcuccaccagaaauccugcagagucgugcccugcgggcucacuugccauuggacauaaacuuuagagguugcaugaaaggcuuccaauuucagaaaaaggacuuuaaccugcucgagcaaacggagacccuugggguuggcuacggaugucccgaggauuccuugauuucccggcgagcuuauuucaauggccagagcuuuauagccaguauucaaaagaucagcuucuucgauggauucgaagguggguucaauuuuaggacgcuccaaccaaacggccugcuauucuauuacgcaucagggagcgauguguucucaaucucccuggacaacggaaccgucauuauggaugugaaaggaauuaaagugcaaagcgucgacaaacaauauaaugauggccucucccauuuugucaucaguuccgucucaccuacuagauaugaauugaucguggauaaaucucgggucggguccaagaacccaacgaaaggcaaaauagaacaaacacaggcuagcgaaaagaaguuuuauuuuggugggagcccaauuucugcucaguaugcuaacuucacagguugcauuucgaacgcuuacuucacacgggucgaucgcgacgucgagguugaagacuuccagcgcuacaccgaaaaaguccauacauccuuguaugaaugcccuauagaaucuaguccucuguuccuccuccacaaaaaagguaaaaauuugucuaagcccaaagccagucagaauaaaaaggggggcaagucgaaggaugcccccuccugggaucccguagcccucaagcuccccgaaagaaauacgccccguaacucucauugucaccugucuaauucuccacgcgccaucgaacacgcauaucaguauggaggcacugcuaacucgcgccaagaguuugaacaucugaaaggagauuuuggcgcuaagucucaauuuuccauaagacuucggacgcggucuucacauggcaugauauuuuacguguccgaucaggaggaaaacgauuuuaugacacuguucuuggcacacgggaggcucguguauauguuuaacgucgggcauaaaaaguuaaagauaaggucucaggaaaaguacaacgacggucuuuggcaugacguuaucuuuauuagggaacggucaagcggcagacugguaauugacgggcugcgcguucuagaggaaagucugccacccacugaagcaacauggaaaauaaaagguccaauauauuugggaggaguggccccaggaaaggcagucaagaacgugcagaucaauuccaucuacuccuucuccgguugucuaaguaacuugcaacuaaauggggcuucgaucaccucagcuagccagacauuuagcgugacccccuguuucgaaggaccaauggagaccggcacauauuucucuacagaaggcggcuaugucguguuggaugaauccuucaauaucggccugaaauuugagaucgccuuugaaguccguccucgcucuucauccgguacacucguccacggccacucagucaauggagaguaccucaaugugcauaugaaaaacggacagguuauagugaaaguuaauaacggaauccgcgacuuuucuacgagugugacaccuaagcagucucugugugacggucgguggcauaggaucacaguuauucgggauuccaauguggugcaacuagauguggauuccgaaguuaaucacgucgucgggccgcugaaccccaaaccuaucgaccauagagagcccguuuuugucggaggagugcccgagagccugcugacaccucgccuugcccccucaaagccauucacgggcugcauacgccacuucguuaucgacggccaucccgucucguucaguaaggcugcacucgugucuggagcaguauccauaaauucuugccccgccgccuag

SEQ ID NO: 41459 - RNA, 267 nt, Artificial Sequence
  derived and/or modified sequence
auggcgcucaguucugcuuggcgcaguguauuaccccuguggcuuuuguggagcgcagcauguaguagagcggcgaguggugacgacaaugcauuucccuucgauauagaggggucuuccgcagucggccggcaggauccacccgaaacaucagagccgagggucgcguugggccggcuacccccggcagcagagaaauguaaugcuggcuucuuucacacucuauccggcgagugcgugccuugugacuguaacggaaacuccuag

SEQ ID NO: 41460 - RNA, 246 nt, Artificial Sequence
  derived and/or modified sequence
auggcucuuuccuccgcuuggcguucuguucugccccucugguugcuguggucagcagcaugcucaagggcugcgucgggagaugacaacgcuuuuccguucgauauugaagggucuucagcaguaggacggcaggauccuccagaaaccucagagccccgcguagcauuaggacgcuuacccccugcagcggaaaaaugcaacgccggguucuuccacacauuguccggugagugcguacccuag

SEQ ID NO: 41461 - protein, 120 aa, Artificial Sequence
  derived and/or modified sequence
MALSSAWRSVLPLWLLWSAACSRAASGDDNAFPFDIEGSSAVGRQDPPETSEPRVALGRLPPAAEVQCPCHCHPAGAPAPPRAVPHSSFSLSPPLSSPQCLESFTWARSVRKLEIKSFPL

SEQ ID NO: 41462 - DNA, 363 bp, Artificial Sequence
  derived and/or modified sequence
atggccctgagcagcgcctggagaagcgtgctgcccctgtggctgctgtggagcgccgcctgcagcagagccgccagcggcgacgacaacgccttccccttcgacatcgagggcagcagcgccgtgggcagacaggacccccccgagaccagcgagcccagagtggccctgggcagactgccccccgccgccgaggtgcagtgcccctgccactgccaccccgccggcgcccccgccccccccagagccgtgccccacagcagcttcagcctgagcccccccctgagcagcccccagtgcctggagagcttcacctgggccagaagcgtgagaaagctggagatcaagagcttccccctgtag

SEQ ID NO: 41463 - DNA, 363 bp, Artificial Sequence
  derived and/or modified sequence
atggctctgagctcagcgtggcggtccgttctgcctttgtggcttctttggtcagcagcatgtagtcgcgctgctagtggcgacgacaacgcctttccgttcgacatcgaaggatcttccgctgtgggaaggcaggacccacccgagacttccgagcccagagtggctctgggaaggctgcctcccgctgcagaagtccaatgtccttgccactgtcacccagcgggagcaccagccccgcctcgagccgtacctcattcttccttttcgttgtccccacctttatcgagcccgcagtgcctggaatctttcacctgggcccgcagtgtgcggaaactggagatcaagagcttccctctttag

SEQ ID NO: 41464 - DNA, 363 bp, Artificial Sequence
  derived and/or modified sequence
atggccctgagcagcgcctggaggtctgtgctgcccctgtggctgctgtggagcgctgcctgcagccgggccgccagcggagatgacaatgccttcccctttgacatcgagggcagcagcgctgtgggccggcaggaccccccagagaccagcgagccccgggtggccctgggccgcctgcccccagctgctgaggtgcagtgcccctgccactgccaccctgctggggccccagccccacccagggctgtgccccacagcagcttcagcctgagcccccccctgagcagcccccagtgcctggagagcttcacctgggcccggtctgtgaggaagctggagatcaagagcttccccctgtag

SEQ ID NO: 41465 - DNA, 645 bp, Artificial Sequence
  derived and/or modified sequence
agaatgaatgtgagaaggaagccaggacagcgcagtccccagtcccgaacggccagggagaggaggtggcctagcgctggcggggctcaccccaatccgtctgccttttgatgccgtactgtaagctccgtccatctctgctggttgcgcagccacctcgggatactgcacacggagaggagggaaaataagcgaggcaccgccgcaccacgcgggagacctacggagacccacagcgcccgagccctggaagagcactactggatgtcagcggagaaatggctttgagctcagcctggcgctcggttctgcctctgtggctcctctggagcgctgcctgctcccgcgccgcgtccggggacgacaacgcttttccttttgacattgaagggagctcagcggttggcaggcaagacccgcctgagacgagcgaaccccgcgtggctctgggacgcctgccgcctgcggccgaggtacagtgtccctgccattgccaccctgctggggcacctgcgcccccgcgggctgtgccacactcgtccttctctctctctccgcctctttcctctccccagtgccttgagagtttcacctgggctaggtcagttcggaaacttgaaataaagagttttcctttgtaagttg

SEQ ID NO: 41466 - DNA, 363 bp, Artificial Sequence
  derived and/or modified sequence
atggccctgagcagcgcctggcggagcgtgctgcccctgtggctgttgtggagtgcagcatgctcccgcgccgccagcggagacgacaacgccttcccctttgatattgagggcagttctgcggtagggcggcaggatcctcccgagacttcagaaccacgcgtggctctgggacggctcccgcctgctgcagaggtgcagtgcccatgccattgtcatcccgccggcgcccccgcgccccccagagctgtgcctcattccagctttagcctgagcccacccctctcaagtccccagtgtctcgagagtttcacatgggcccggtccgttaggaagctcgagattaagtctttcccactgtag

SEQ ID NO: 41467 - DNA, 363 bp, Artificial Sequence
  derived and/or modified sequence
atggcccttagctctgcgtggcggtctgttctgcccctttggctcttgtggagtgccgcatgcagcagagcagcgtccggcgatgacaatgccttcccgttcgatatagaggggagctcggctgtggggcgtcaggaccccccagaaacgtctgagcccagggtagctcttggaaggttgcccccagccgcagaggtccagtgcccatgtcactgccacccagcaggcgctccagcccctccgcgtgctgttccccacagctcattctctttgtccccaccattgtctagcccccaatgcctcgagtcatttacatgggctcgctcagtgcgcaagctggaaattaaaagcttcccattgtag

SEQ ID NO: 41468 - DNA, 363 bp, Artificial Sequence
  derived and/or modified sequence
atggctttgtctagcgcctggagatccgtcctccctctctggctgctctggtccgcggcctgctcaagggctgcgtctggtgatgataatgcgtttcctttcgatatagagggaagctccgccgttgggagacaggatccacccgaaacgagtgaacctcgcgtggccctggggaggctgccccctgcggccgaagtgcagtgtccatgccattgtcatccagcgggcgctccagcccccccacgggccgtacctcactcctccttttctctctctccacccttgtctagtccccagtgcctggaatctttcacctgggcacggtccgtgagaaaactcgaaattaagagcttccctctgtag

SEQ ID NO: 41469 - DNA, 363 bp, Artificial Sequence
  derived and/or modified sequence
atggctctgagctctgcttggcgctccgtcttaccactgtggctgctgtggagtgctgcctgttcacgggctgcaagtggagatgacaatgcattcccattcgatatagagggcagttctgccgttgggcgccaggaccccccagagaccagcgagccaagagtcgccctcggtcggttaccgcctgccgctgaggtgcagtgtccatgtcactgtcatcccgcaggagcacctgccccaccacgagccgtcccccactcctccttttctttaagtccccccttgtcttccccgcaatgtcttgaaagttttacttgggccaggtccgtgagaaaactggagattaagagcttccctttgtag

SEQ ID NO: 41470 - DNA, 363 bp, Artificial Sequence
  derived and/or modified sequence
atggcactgagcagcgcctggaggagcgttttgcctctgtggcttttatggtctgctgcctgttctagggcagcaagcggcgacgataatgctttcccattcgatattgagggtagttccgctgtcgggcggcaagatcctcccgaaacatccgagccccgcgtggccttaggtcgcctgcctcctgccgcggaagtgcaatgcccctgccattgccaccctgctggcgcaccagcacctcccagggctgtccctcattccagtttttcactgagcccgcccctgtcgagcccacagtgtttagagagttttacctgggctcgaagcgtcaggaagttagagataaagtcgttcccactgtag

SEQ ID NO: 41471 - DNA, 1061 bp, Artificial Sequence
  derived and/or modified sequence
gggagtggtgagaatgaatgtgagaaggaagccaggacagcgcagtccccagtcccgaacggccagggagaggaggtggcctagcgctggcggggctcaccccaatccgtctgccttttgatgccgtactctgctggttgcgcagccacctcgggatactgcacacggagaggagggaaaataagcgaggcaccgccgcaccacgcgggagacctacggagacccacagcgcccgagccctggaagagcactactggatgtcagcggagaaatggctttgagctcagcctggcgctcggttctgcctctgtggctcctctggagcgctgcctgctcccgcgccgcgtccggggacgacaacgcttttccttttgacattgaagggagctcagcggttggcaggcaagacccgcctgagacgagcgaaccccgcgtggctctgggacgcctgccgcctgcggccgaggtacagtgtccctgccattgccaccctgctggggcacctgcgcccccgcgggctgtgccacactcgtccttctctctctctccgcctctttcctctccccagtgccttgagagtttcacctgggctaggtcagttcggaaacttgaaataaagagttttcctttgtaagttgcatttggatgttgagagttgaaagttgaggcttcggaatgtgtctgctcaaaggggtgagagtgcatgtgttggtgctctgagttcatccgctagactctcaccggggactgcagcagcacatcggtgacttctgccacttgcgtgtcccagtagtcattttgtcaagccacggcacttaacgtgtgtgccctgtcactggcttcctgctcctctgtgctgttaggacagtgggaacactactgcaggatctttttgtctcatattagacaagaagtcttctgcagcagggaaggtgagggggtgagtgagagtggctggtcatgaaaggagctgttagacaactgctgagagggtatcttaagtagaaacgagccattgtattccagaaacaagatgtttccattaaaatcaagcctcagga

SEQ ID NO: 41472 - DNA, 554 bp, Artificial Sequence
  derived and/or modified sequence
gacctcagtgtctgaaaagccagcttagagtgggagggcctgggagtagaagctgctggttgcgcagccacctcgggatactgcacacggagaggagggaaaataagcgaggcaccgccgcaccacgcgggagacctacggagacccacagcgcccgagccctggaagagcactactggatgtcagcggagaaatggctttgagctcagcctggcgctcggttctgcctctgtggctcctctggagcgctgcctgctcccgcgccgcgtccggggacgacaacgcttttccttttgacattgaagggagctcagcggttggcaggcaagacccgcctgagacgagcgaaccccgcgtggctctgggacgcctgccgcctgcggccgaggtacagtgtccctgccattgccaccctgctggggcacctgcgcccccgcgggctgtgccacactcgtccttctctctctctccgcctctttcctctccccagtgccttgagagtttcacctgggctaggtcagttcggaaacttgaaataaagagttttcctttgt

SEQ ID NO: 41473 - DNA, 363 bp, Artificial Sequence
  derived and/or modified sequence
atggccctgagcagcgcctggcggagcgtgctgcccctgtggctgctctggtccgccgcctgtagtcgtgctgctagtggggatgataacgcttttccttttgacattgaaggatctagcgccgtggggcgccaagatcccccagagactagtgaaccacgtgttgctttaggccgtctgccacctgccgctgaagtacagtgtccatgccattgccaccccgcaggggcccccgcgccgcccagagctgtaccgcacagcagcttttcgctgtcccctccacttagcagcccacaatgtcttgagtcgtttacatgggctcggtctgtgcggaagttagaaataaaatccttcccactctag

SEQ ID NO: 41474 - DNA, 363 bp, Artificial Sequence
  derived and/or modified sequence
atggccctgagcagcgcctggcggagcgtgctgcccctgtggctgctgtggtccgcggcatgctcacgggccgcctctggtgatgataacgcctttccattcgacatcgagggatcttctgccgtagggaggcaggaccccccggagacgtcggagccccgggtagccctggggagattgcccccagccgctgaagtccaatgcccatgccactgtcaccctgctggagctccggcgcccccccgggcagtgcctcacagttcattctccctaagcccgcccctcagtagccctcaatgtctggagtcttttacctgggcccgatccgtgcggaaacttgagataaagtcattccccctgtag

SEQ ID NO: 41475 - DNA, 363 bp, Artificial Sequence
  derived and/or modified sequence
atggccctgagcagcgcctggcggagcgtgctgcccctgtggctgctgtggagcgctgcctgtagccgggcggcgtcgggcgacgataacgccttcccctttgatatcgagggctcaagtgcagtggggcgacaagatcccccagaaacatcagaacctagagttgccttgggccgtttgccacctgccgcagaagttcaatgcccttgtcactgccaccctgcaggtgcccctgctccacccagggcagtgcctcactcgagcttcagcctttcacctccccttagcagcccccaatgccttgaaagttttacttgggcccggtccgtgaggaagctcgaaatcaaatcctttccactgtag

SEQ ID NO: 41476 - DNA, 363 bp, Artificial Sequence
  derived and/or modified sequence
atggcactctctagtgcctggcggagcgtcttacccctgtggttactttggtcggcagcgtgcagcagagctgcctccggagatgacaacgcgtttccattcgacattgaagggtcaagtgccgtaggacgacaggatcctccagagacttctgagccaagggttgcattgggaaggctccctccggcagccgaggtgcagtgcccctgtcactgccatcctgcaggagccccagcacctcctcgggcagtaccgcatagctctttttctctctctcctcccttatcatctccccagtgtctcgagagctttacttgggcccgtagcgttagaaagttagaaattaaatcgttccctctctag

SEQ ID NO: 41477 - DNA, 363 bp, Artificial Sequence
  derived and/or modified sequence
atggcgctgtcgagtgcctggcgctcagttctgcctttgtggctgctgtggtctgcagcgtgcagtcgcgctgcatcgggcgatgataacgcctttcctttcgacatcgaaggtagcagcgctgtcggcaggcaggatcccccagagacttccgagcccagagtggccctgggcaggttacctccagccgcagaggttcagtgtccatgccactgccatcctgccggagcccctgcccctccacgagcggtaccccactcgtcttttagcttgtcccctcccctgtcatcaccccagtgtctggagagctttacttgggctcgttctgtgaggaagctggagatcaagtcattccccctgtag

SEQ ID NO: 41478 - DNA, 363 bp, Artificial Sequence
  derived and/or modified sequence
atggccctgagctccgcttggaggtccgtcctgccgctctggttgttgtggtcagccgcttgttccagggccgcttctggcgacgataacgcatttccattcgatatcgaagggtcatcagcggtcggcaggcaggatcccccagaaacgagtgagcctcgggtcgccctcggaagacttccccctgcagcggaggttcagtgcccatgtcattgccaccctgctggcgctcctgcgcctccccgagccgtacctcacagctcattttctctctctccgccattgtcttcgcctcagtgtctggaatcctttacctgggcccgaagtgtcaggaaactggagataaaaagctttcccctttag

SEQ ID NO: 41479 - DNA, 363 bp, Artificial Sequence
  derived and/or modified sequence
atggctctatcgtcagcttggagatccgtccttcccctatggctcttgtggtccgcagcatgttcacgcgccgcttcaggcgacgacaacgcctttccttttgacattgagggatcgagtgccgttggccggcaggacccccctgagacatctgaaccacgtgtagccctgggtagattaccccccgccgccgaagtccagtgcccctgccactgccaccccgctggggcaccagcaccccctcgggcagtcccccactcttctttctccttatcaccacccctttccagcccgcaatgtctggaaagctttacctgggcccggtcagtacgaaaactggagataaaatcttttccattgtag

SEQ ID NO: 41480 - DNA, 363 bp, Artificial Sequence
  derived and/or modified sequence
atggccttatctagtgcttggcgttcggttctgcccctgtggctactgtggtccgcagcatgttctcgggccgcatcaggtgatgacaatgcctttccatttgacatcgagggttcctccgctgttggcaggcaagatcctcctgaaacttcagaaccacgggtggccttgggcaggctcccaccagccgcagaggtacagtgtccctgccattgccaccccgccggagctcccgctcccccccgtgccgtgccccattctagtttttctctaagtccacccctcagctcaccacagtgtctcgagtctttcacctgggcccgctccgtgcgcaaattggagatcaagtcattcccactttag

SEQ ID NO: 41481 - DNA, 363 bp, Artificial Sequence
  derived and/or modified sequence
atggctttgagctcagcttggcggtcagtactgcccttatggctactttggtccgccgcttgctcacgggccgcctcaggagacgacaatgcctttccttttgatatagagggttcctcagccgtaggcaggcaagatccacctgaaacctccgaaccccgcgtggctctgggaagactgccgcccgctgctgaagttcagtgtccttgccactgccatcctgctggcgcccctgcccccccacgcgctgtgccacattcatctttctccttaagtccaccgctctccagcccccagtgtcttgaatctttcacctgggccagatcagtccggaaactggaaattaaatcgtttcctttatag

SEQ ID NO: 41482 - DNA, 363 bp, Artificial Sequence
  derived and/or modified sequence
atggctctatcgtcagcttggagatccgtccttcccctatggctcttgtggtccgcagcatgttcacgcgccgcttcaggcgacgacaacgcctttccttttgacattgagggatcgagtgccgttggccggcaggacccccctgagacatctgaaccacgtgtagccctgggtagattaccccccgccgccgaagtccagtgcccctgccactgccaccccgctggggcaccagcaccccctcgggcagtcccccactcttctttctccttatcaccacccctttccagcccgcaatgtttagaatctttcacatgggccagatcagttcggaaactggaaataaagagctttccattgtag

SEQ ID NO: 41483 - DNA, 363 bp, Artificial Sequence
  derived and/or modified sequence
atggccttatctagtgcttggcgttcggttctgcccctgtggctactgtggtccgcagcatgttctcgggccgcatcaggtgatgacaatgcctttccatttgacatcgagggttcctccgctgttggcaggcaagatcctcctgaaacttcagaaccacgggtggccttgggcaggctcccaccagccgcagaggtacagtgtccctgccattgccaccccgccggagctcccgctcccccccgtgccgtgccccattctagtttttctctaagtccacccctcagctcaccacagtgtttggaatcattcacctgggctcgctccgtacgaaaacttgaaattaagtccttcccactctag

SEQ ID NO: 41484 - DNA, 363 bp, Artificial Sequence
  derived and/or modified sequence
atggctttgagctcagcttggcggtcagtactgcccttatggctactttggtccgccgcttgctcacgggccgcctcaggagacgacaatgcctttccttttgatatagagggttcctcagccgtaggcaggcaagatccacctgaaacctccgaaccccgcgtggctctgggaagactgccgcccgctgctgaagttcagtgtccttgccactgccatcctgctggcgcccctgcccccccacgcgctgtgccacattcatctttctccttaagtccaccgctctccagcccccagtgtctggaatccttcacgtgggcccgatccgtcagaaaactcgagattaagtcattccccctgtag

SEQ ID NO: 41485 - DNA, 1605 bp, Artificial Sequence
  derived and/or modified sequence
atggacacgcaggccggaagtgtcgatgaggagaacggtaggcagctgggcgaagtggaactgcagtgcgggatttgcacaaaatggttcactgcagatacattcgggatcgacacctcctcatgcctacctttcatgaccaattatagctttcattgcaatgtctgtcaccactctggaaatacctatttcctccggaaacaagcaaatctgaaagagatgtgcttgtccgctttagctaacctaacctggcagtcacgcacccaggacgagcacccaaagaccatgttctcaaaagataaggacataatcccctttatagataagtactgggagtgcatgacaaccagacagcgtccaggaaagatgacctggccgaacaacatagttaagaccatgtccaaggagcgtgatgtgttcctggtgaaagagcacccggatcccgggtcaaaggacccagaagaagactacccaaaatttggactactggaccaggacctgtcaaacatcggccccgcatatgacaatcagaaacagtctagtgcagtaagcaccagcggcaatctcaatggagggatagcggccggcagcagtgggaaaggtcggggcgccaagcgcaagcagcaggatggcggaacaacggggacaactaagaaagctcgtagtgatcctctgttcagtgcacaacgcctgccacctcacgggtatcctcttgagcatccttttaataaagatggatatcgatacatcctcgctgagcccgatccacatgcaccagatccagagaagcttgagctggattgctgggccgggaaacctatcccaggggacctgtatcgggcttgcctgtacgagcgcgttctgctagcactccatgatcgggctcctcaactgaaaatctctgatgacaggctgactgtggtgggcgagaagggctactcaatggtgagggcttctcacggcgtgcgtaaaggagcttggtatttcgagattaccgtggacgaaatgcccccagataccgccgcacggctgggatggtctcagcccctgggcaacctgcaggcgcctctgggatacgacaaattcagttatagttggcgctctaaaaagggtacgaagttccatcagagtattggtaaacactactcaagcggctatggtcagggcgacgtgctaggcttctacatcaatctgcccgaggacaccgagacagccaaatcactacccgatacctacaaagacaaggccctcattaagtttaaaagttatttgtattttgaagaaaaggattttgtggacaaggcagaaaaaagcctgaagcagacacctcactctgagatcatattttacaagaatggagttaatcagggagtggcctacaaagatattttcgagggcgtatactttcccgcaattagtttgtataagtcctgcacggtctccattaattttggcccatgcttcaagtatcctcctaaggacctgacttacagacctatgagcgacatggggtggggtgccgtcgtggagcacacactcgccgacgtgctataccatgtggaaaccgaggtcgacggacgacgcagccccccctgggagccctag

SEQ ID NO: 41486 - DNA, 1605 bp, Artificial Sequence
  derived and/or modified sequence
atggacacccaggccggctctgtggatgaagaaaatggccggcagctgggggaggtggagctgcagtgtggcatctgcaccaagtggttcaccgctgacacctttggaattgacaccagcagctgcctgcccttcatgaccaactacagcttccactgcaatgtgtgccaccacagcggcaacacctacttcctgaggaagcaggccaacctgaaggagatgtgcctgagcgccctggccaacctgacctggcagagcaggacccaggatgagcaccccaagaccatgttcagcaaggacaaggacatcatccccttcatcgacaagtactgggagtgcatgaccacccggcagaggcctgggaagatgacctggcccaacaacatcgtgaagaccatgagcaaggagagagatgtgttcctggtgaaggagcacccagaccccggcagcaaggaccctgaggaggactaccccaagtttggcctgctggaccaggacctgagcaacatcggccctgcctatgacaaccagaagcagagcagcgctgtgtccaccagcggcaacctgaatggaggcattgctgctggcagcagcggcaagggccgcggggccaagaggaagcagcaggacggcggcaccaccggcaccaccaagaaggcccggagtgaccccctcttcagcgcccagaggctgcccccccacggctaccccctggagcaccccttcaacaaggatggctaccgctacatcctggccgagccagacccccacgccccagaccctgagaagctggagctggactgctgggccggcaagcccatccctggggacctgtaccgggcctgcctgtatgaaagagtgctgctggccctgcatgaccgggccccccagctgaagatcagtgatgaccggctgactgtggtgggggagaagggctacagcatggtgcgggccagccacggcgtgaggaagggggcctggtactttgagatcaccgtggatgagatgcccccagacacagctgcccggctgggctggagccagcccctgggcaacctgcaggcccccctgggctatgacaagttctcctacagctggaggagcaagaagggcaccaagttccaccagagcatcggcaagcactacagcagcggctacggccagggagatgtgctgggcttctacatcaacctgcctgaggacacagaaacagccaagagcctgcctgacacctacaaggacaaggccctgatcaagttcaagagctacctgtactttgaggagaaggactttgtggacaaggccgagaagagcctgaagcagaccccccacagcgagatcatcttctacaagaatggagtgaaccagggcgtggcctacaaggacatctttgagggcgtgtacttccctgccatcagcctgtacaagagctgcaccgtgtccatcaactttggcccctgcttcaagtacccacccaaggacctgacctaccggcccatgtctgacatgggctggggcgctgtggtggagcacaccctggctgatgtgctgtaccacgtggagacagaggtggatggaagaagaagccccccctgggagccctag

SEQ ID NO: 41487 - DNA, 1605 bp, Artificial Sequence
  derived and/or modified sequence
atggacacccaggccggcagcgtggacgaggagaacggccggcagctaggagaggtcgagctccagtgtggaatctgtaccaaatggttcaccgccgatacctttgggatagataccagttcctgtcttccatttatgactaattactcctttcattgtaatgtctgccatcattctggcaacacctactttcttcggaagcaggcaaacctaaaggagatgtgcctctccgcattggcgaacctgacatggcagtcacgaactcaagatgaacatcctaaaactatgttctccaaggacaaagatatcatcccatttatcgacaagtactgggagtgtatgacaactcgccaaagacctggtaagatgacttggccaaacaacatcgtgaaaaccatgtcgaaggagcgggacgttttcttggtcaaggagcatccagatcctgggtccaaggatcccgaagaggactatcctaagttcggcctgcttgatcaggacctgtccaacatcggccccgcctacgataaccagaagcagtcaagtgctgtcagtaccagcggtaacctgaacggaggcatcgctgcaggcagctccggtaaaggacgcggggccaaacgaaaacaacaggatggcggcaccacaggaaccaccaagaaagcccgatcggaccccttgtttagcgcacaaagactcccccctcacggttatcccttggagcacccatttaataaggatggctatcggtatatcctggccgagcccgatccgcacgctccagatcctgagaagttggagttggattgttgggctggcaagcccatccccggcgatctctaccgggcatgcctgtacgagagagtgcttctggctctgcatgatcgcgccccgcagttgaaaatatcggatgaccgactgactgttgtaggggaaaaggggtattctatggttcgagcctctcatggagtccgaaagggggcttggtactttgaaatcactgtggacgagatgcctccagatacagccgccaggctgggctggtcgcagccattgggcaatttgcaagcccctcttgggtatgacaaattttcatactcttggcgctctaaaaaaggcaccaaatttcaccagtccatcggaaaacactattcttcaggatacggccagggggatgttctcgggttctacatcaacctgcctgaagatactgagacagccaagtctctgccagatacttataaggacaaggcgttgatcaaatttaagagttacctgtactttgaagagaaggactttgtggataaagcggagaaatctctcaaacagacaccacacagtgaaatcatcttctataaaaatggcgtgaaccagggtgtggcctacaaggacatctttgagggagtgtactttcccgctatctctctgtacaagtcatgcaccgtctcaattaattttgggccatgtttcaaatatccacctaaggatcttacatatagacccatgtccgatatgggatggggggctgtggtggagcatacactcgccgatgtcttgtatcacgttgaaacggaggttgacggtcgccgctccccaccttgggagccatag

SEQ ID NO: 41488 - DNA, 1605 bp, Artificial Sequence
  derived and/or modified sequence
atggacactcaggccggttcagtggatgaagaaaacggaagacaactgggcgaggtcgaactgcaatgtggtatttgtaccaagtggttcaccgccgatacgttcggcatcgacacatcttcatgcctgcctttcatgacaaactacagttttcactgtaacgtgtgtcaccattcaggcaacacctattttcttcggaagcaggccaatctgaaagaaatgtgtcttagtgccctcgctaatctgacatggcagtcaagaacccaagacgaacatccaaagacaatgttctctaaagacaaggatattattccctttatcgataaatattgggaatgcatgaccacccggcagcgccctggcaagatgacatggccaaataacatcgtcaaaactatgagtaaggaaagggatgtcttcttggtcaaggagcaccccgatcctggatcgaaagacccagaagaggactaccctaagttcggcctcctcgatcaggacctatcgaacatcgggcctgcatatgataaccagaaacagagcagcgccgtttcgacatcgggcaacctgaatggaggcattgcagccggatccagcggcaagggcagaggcgctaagcggaagcagcaagacggcggaacaacaggcactacgaagaaagcaagatcagatcccctgttctccgcccagcggttgcctccacacgggtaccccctagaacatcctttcaacaaagatggctacagatacattctggctgagcctgacccgcacgctcccgatccggaaaaactggaacttgattgttgggccggtaagcccatccccggtgatctgtaccgcgcttgcctctatgaacgggttttactggctctgcacgatagggcccctcaactcaagatctccgacgatcgattgaccgtggtgggtgagaaaggttactcgatggtccgagccagtcacggcgtacggaagggagcctggtatttcgagattacagtggatgagatgcccccagacacggccgctaggctcggttggtcgcaacccttgggcaacctgcaggcccctttgggatatgataaattcagttactcatggcggtctaagaaggggactaagttccaccagagtatcgggaagcactatagcagtgggtatggtcaaggagatgtgctgggcttctatataaacctcccagaagatacagaaacagcgaagtctctgcccgatacttacaaggataaggccttgatcaagtttaagagctatctgtattttgaagagaaggactttgtggacaaagccgagaagtcactgaagcagacaccccattcggagataatcttctataagaatggcgtgaaccagggagtagcctacaaggatatctttgagggagtctattttccggcaatcagcctgtataagtcctgcactgtgtcgattaatttcggcccatgtttcaaatacccgcctaaggacctaacatatcgacctatgtctgatatggggtggggagcagtcgttgagcacacactggcagatgtactgtaccatgtggaaacagaagttgatggcagaaggtcacctccttgggagccatag

SEQ ID NO: 41489 - DNA, 2194 bp, Artificial Sequence
  derived and/or modified sequence
gatggcggcggcaggagcaggacctggccaggaagcgggtgccgggcctggcccaggagcggtcgcaaatgcaacaggggcagaagagggggagatgaagccggtggcagcgggagcagccgctcctcctggagaggggatctctgctgctccgacagttgagcccagttccggggaggctgaaggcggggaggcaaacttggtcgatgtaagcggtggcttggagacagaatcatctaatggaaaagatacactaatcctgtctacctttcatgaccaactacagttttcattgcaacgtctgccatcacagtgggaatacctatttcctccggaagcaagcaaacttgaaggaaatgtgccttagtgctttggccaacctgacatggcagtcccgaacacaggatgaacatccgaagacaatgttctccaaagataaggatattataccatttattgataaatactgggagtgcatgacaaccagacagagacctgggaaaatgacttggccaaataacattgttaaaacaatgagtaaagaaagagatgtattcttggtaaaggaacacccagatccaggcagtaaagatccagaagaagattaccccaaatttggacttttggatcaggaccttagtaacattggtcctgcttatgacaaccaaaaacagagcagtgctgtgtctactagtgggaatttaaatgggggaattgcagcaggaagcagcggaaaaggacgaggagccaagcgcaaacagcaggatggagggaccacagggaccaccaagaaggcccggagtgaccctttgttttctgctcagcgccttccccctcatggctacccattggaacacccgtttaacaaagatggctatcggtatattctagctgagcctgatccgcacgcccctgaccccgagaagctggaacttgactgctgggcaggaaaacctattcctggagacctctacagagcctgcttgtatgaacgggttttgttagccctacatgatcgagctccccagttaaagatctcagatgaccggctgactgtggttggagagaagggctactctatggtgagggcctctcatggagtacggaaaggtgcctggtattttgaaatcactgtggatgagatgccaccagataccgctgccagactgggttggtcccagcccctaggaaaccttcaagctcctttaggttatgataaatttagctattcttggcggagcaaaaagggaaccaagttccaccagtccattggcaaacactactcttctggctatggacagggagacgtcctgggattttatattaatcttcctgaagacacagagacagccaagtcattgccagacacatacaaagataaggctttgataaaattcaagagttatttgtattttgaggaaaaagactttgtggataaagcagagaagagcctgaagcagactccccatagtgagataatattttataaaaatggtgtcaatcaaggtgtggcttacaaagatatttttgagggggtttacttcccagccatctcactgtacaagagctgcacggtttccattaactttggaccatgcttcaagtatcctccgaaggatctcacttaccgccctatgagtgacatgggctggggcgccgtggtagagcacaccctggctgacgtcttgtatcacgtggagacagaagtggatgggaggcgcagtcccccatgggaaccctgaccaggtccctcttttctgtcaaggactttctgggaataatactgggggttttgtttttgtttttgaactgtctcaaatgttctcccaaagatgctaaaaacacagcctctccttttagcaagttaaaaggctgggtaggactgcgggagactgcctgcctttcaccattttctccccacttccagtgactgctcttattttgtgtaccataagccaacaaccgctgactccaggattgcataagccccctgtgaaatcggtgctgtactgcataccctgccagctgtgacttgttatcctactatattttctaaggagtgaataatattgtccgagtaactaacttatttaaaagacatttccttctgtgggcattgactgtatcccacctgttttccaaggaaatggtaacctgtttctgagaacacctgaaatcaatggctatacattcc

SEQ ID NO: 41490 - DNA, 1605 bp, Artificial Sequence
  derived and/or modified sequence
atggacacccaggccggcagcgtggacgaggagaacggcagacagctgggcgaggtggagctgcagtgcggcatctgcaccaagtggttcaccgccgacaccttcggcatcgacaccagcagctgcctgcccttcatgaccaactacagcttccactgcaacgtgtgccaccacagcggcaacacctacttcctgagaaagcaggccaacctgaaggagatgtgcctgagcgccctggccaacctgacctggcagagcagaacccaggacgagcaccccaagaccatgttcagcaaggacaaggacatcatccccttcatcgacaagtactgggagtgcatgaccaccagacagagacccggcaagatgacctggcccaacaacatcgtgaagaccatgagcaaggagagagacgtgttcctggtgaaggagcaccccgaccccggcagcaaggaccccgaggaggactaccccaagttcggcctgctggaccaggacctgagcaacatcggccccgcctacgacaaccagaagcagagcagcgccgtgagcaccagcggcaacctgaacggcggcatcgccgccggcagcagcggcaagggcagaggcgccaagagaaagcagcaggacggcggcaccaccggcaccaccaagaaggccagaagcgaccccctgttcagcgcccagagactgcccccccacggctaccccctggagcaccccttcaacaaggacggctacagatacatcctggccgagcccgacccccacgcccccgaccccgagaagctggagctggactgctgggccggcaagcccatccccggcgacctgtacagagcctgcctgtacgagagagtgctgctggccctgcacgacagagccccccagctgaagatcagcgacgacagactgaccgtggtgggcgagaagggctacagcatggtgagagccagccacggcgtgagaaagggcgcctggtacttcgagatcaccgtggacgagatgccccccgacaccgccgccagactgggctggagccagcccctgggcaacctgcaggcccccctgggctacgacaagttcagctacagctggagaagcaagaagggcaccaagttccaccagagcatcggcaagcactacagcagcggctacggccagggcgacgtgctgggcttctacatcaacctgcccgaggacaccgagaccgccaagagcctgcccgacacctacaaggacaaggccctgatcaagttcaagagctacctgtacttcgaggagaaggacttcgtggacaaggccgagaagagcctgaagcagaccccccacagcgagatcatcttctacaagaacggcgtgaaccagggcgtggcctacaaggacatcttcgagggcgtgtacttccccgccatcagcctgtacaagagctgcaccgtgagcatcaacttcggcccctgcttcaagtacccccccaaggacctgacctacagacccatgagcgacatgggctggggcgccgtggtggagcacaccctggccgacgtgctgtaccacgtggagaccgaggtggacggcagaagaagccccccctgggagccctag

SEQ ID NO: 41491 - protein, 527 aa, Artificial Sequence
  derived and/or modified sequence
MYGPGSQLGKSGNNSWAKERGCSIACQGSLTSARLHAPSIGERPLSHMRWKDTMRRVVRQSKFRHVFGQAVKNDQCYDDIRVSRVTWDSSFCAVNPRFVAIIIEASGGGAFLVLPLHKTGRIDKSYPTVCGHTGPVLDIDWCPHNDQVIASGSEDCTVMVWQIPENGLTLSLTEPVVILEGHSKRVGIVAWHPTARNVLLSAGCDNAIIIWNVGTGEALINLDDMHSDMIYNVSWNRNGSLICTASKDKKVRVIDPRKQEIVAEKEKAHEGARPMRAIFLADGNVFTTGFSRMSERQLALWNPKNMQEPIALHEMDTSNGVLLPFYDPDTSIIYLCGKGDSSIRYFEITDESPYVHYLNTFSSKEPQRGMGYMPKRGLDVNKCEIARFFKLHERKCEPIIMTVPRKSDLFQDDLYPDTAGPEAALEAEEWFEGKNADPILISLKHGYIPGKNRDLKVVKKNILDSKPTANKKCDLISIPKKTTDTASVQNEAKLDEILKEIKSIKDTICNQDERISKLEQQMAKIAA

SEQ ID NO: 41492 - protein, 165 aa, Artificial Sequence
  derived and/or modified sequence
SKEPQRGMGYMPKRGLDVNKCEIARFFKLHERKCEPIIMTVPRKSDLFQDDLYPDTAGPEAALEAEEWFEGKNADPILISLKHGYIPGKNRDLKVVKKNILDSKPTANKKCDLISIPKKTTDTASVQNEAKLDEILKEIKSIKDTICNQDERISKLEQQMAKIAA

SEQ ID NO: 41493 - protein, 480 aa, Artificial Sequence
  derived and/or modified sequence
MRWKDTMRRVVRQSKFRHVFGQAVKNDQCYDDIRVSRVTWDSSFCAVNPRFVAIIIEASGGGAFLVLPLHKTGRIDKSYPTVCGHTGPVLDIDWCPHNDQVIASGSEDCTVMVWQIPENGLTLSLTEPVVILEGHSKRVGIVAWHPTARNVLLSAGCDNAIIIWNVGTGEALINLDDMHSDMIYNVSWNRNGSLICTASKDKKVRVIDPRKQEIVAEKEKAHEGARPMRAIFLADGNVFTTGFSRMSERQLALWNPKNMQEPIALHEMDTSNGVLLPFYDPDTSIIYLCGKGDSSIRYFEITDESPYVHYLNTFSSKEPQRGMGYMPKRGLDVNKCEIARFFKLHERKCEPIIMTVPRKSDLFQDDLYPDTAGPEAALEAEEWFEGKNADPILISLKHGYIPGKNRDLKVVKKNILDSKPTANKKCDLISIPKKTTDTASVQNEAKLDEILKEIKSIKDTICNQDERISKLEQQMAKIAA

SEQ ID NO: 41494 - DNA, 1425 bp, Artificial Sequence
  derived and/or modified sequence
atgaggagggtcgtccgccagagcaaatttcggcacgttttcggccaggctgtaaagaatgaccagtgctatgatgatatcagagtctctcgtgtgacctgggactcaagtttctgtgcagtgaacccacggttcgtcgccatcattattgaggcatcgggaggaggcgccttcctggtcctgccactgcacaagaccggaagaattgacaagagttaccctaccgtgtgcgggcacactggtcccgttctggacattgactggtgcccacataacgatcaagttatcgcctctggaagtgaagattgtactgttatggtctggcagatccctgaaaatggactcacactctctctcacagagcctgtagtgattctggaagggcactctaaacgcgtgggcatcgtcgcctggcacccaaccgctcggaacgttctgctcagcgctggatgcgacaatgccattattatttggaatgttggaactggggaggccctgataaacctggatgacatgcatagtgatatgatctacaatgtttcatggaacaggaacggatccctcatttgcacagcaagcaaggacaaaaaggtgagggtgatcgatcctaggaagcaggaaatagtcgccgagaaggagaaggcgcacgagggcgctaggcctatgagggccatattccttgccgacggcaatgtttttacaaccgggttcagccgcatgtctgagagacagctggccctttggaaccccaagaatatgcaggagccaattgcacttcacgagatggatacttccaacggtgttcttttgccgttttatgatcctgatactagcatcatatacctctgtggaaagggagattcgagtatccgttacttcgaaattaccgatgagagcccatacgtgcactacctgaatacgttctccagtaaagagccacagcgtgggatgggctatatgccaaaacggggcctagacgtaaacaaatgcgagatagctcgtttctttaaattacacgaaaggaaatgcgaacccatcatcatgactgtccctcgaaaaagtgacctgttccaggacgacctctaccccgacacagccgggccggaagccgccctagaggccgaagagtggttcgaggggaaaaacgcggatccaatcctgatcagtctgaagcacggctacattcccggcaagaatcgtgatcttaaggtggtaaagaagaatattctcgattctaaacctaccgctaacaagaagtgtgatttgatcagtatccccaagaagaccactgatacagcctcagtgcagaatgaagccaagctggatgaaatcctaaaagagattaaaagtatcaaagataccatatgcaatcaggatgaaaggatctcaaagttagagcagcagatggccaagattgccgcttag

SEQ ID NO: 41495 - DNA, 1584 bp, Artificial Sequence
  derived and/or modified sequence
atgtacggccccgggtcccagctggggaagtccggaaataactcctgggccaaggagcgtggttgctctatcgcctgtcaaggatctctcacctctgcaaggctacatgcgccatcgatcggcgaacggcctctgtcacacatgagatggaaggataccatgcgtcgggtcgttcggcagtccaagttccgacacgtgtttggccaagcagtcaaaaacgaccagtgctacgacgatattcgcgtgagccgcgtgacctgggatagcagtttttgcgccgtgaaccccaggttcgttgccatcattattgaagcatccggaggcggcgccttcttggtgctgcccctgcacaagaccggcaggattgataaatcctatcctactgtatgcggacatactgggcccgtgttggatatcgattggtgcccccataatgaccaagtgattgcatctggttcagaagattgtaccgttatggtttggcaaataccggagaacggcctaactctgagcctgaccgagccagttgtgatcctagaggggcattcaaagcgagtggggatcgtcgcctggcaccctaccgcgaggaatgtgctgctgagcgccggatgtgataatgccatcattatttggaatgttggcacaggcgaggctctgattaacctggacgacatgcactccgatatgatttataatgtatcctggaacagaaatggctctcttatatgtaccgccagcaaagataagaaagtgagagtgatcgaccctagaaagcaggaaatcgtggccgagaaggaaaaggcccacgagggagcgcgccctatgcgcgccatatttctggccgacggcaacgtttttactacggggttctcccggatgtccgaacggcagttagccctctggaaccccaagaatatgcaggagcccatcgcactccatgaaatggacacaagcaatggcgtcttgctcccgttttacgaccctgacacttctatcatttatttgtgcggcaagggcgactccagcatccgctacttcgaaatcacagatgagtctccatacgttcattatctgaacacattcagtagcaaggaaccacagcgagggatggggtacatgccaaagcggggcctcgatgttaataaatgcgaaatcgctagattcttcaagttgcacgaacggaaatgtgagcccatcatcatgacagtgcccagaaaatctgacctatttcaggatgacctgtatccagacaccgccgggcccgaagctgcactggaggctgaagaatggtttgaaggcaaaaacgccgatcccatcctgatttcactgaaacatgggtacattcccggtaaaaatagggacttgaaagttgtgaaaaagaacatactggatagtaaacctaccgccaataagaaatgtgacttgatctctataccgaagaaaaccaccgatacagcatcagtccagaacgaagctaagctcgacgagatcctgaaggagatcaaaagcatcaaggacacaatctgcaaccaggatgagcggatatctaagctcgaacaacagatggccaaaatcgctgcttag

SEQ ID NO: 41496 - DNA, 1425 bp, Artificial Sequence
  derived and/or modified sequence
atgaggagggtggtgcgccaatcgaagttccgtcacgtctttggccaggctgtcaaaaacgaccagtgctacgatgatatccgggtcagtcgtgttacgtgggattcctcattttgcgctgtgaatccaaggttcgtcgctatcataattgaagcttctggcggcggcgctttcctggtgttgccactacacaagaccggccgtatcgacaaatcatacccaactgtgtgtggccatacaggtccagttctggatattgattggtgtccacacaacgaccaggttattgcttccggcagcgaagactgcacggtcatggtgtggcagattccagagaacggcctgacactttccttgaccgagccagtcgtaatcctcgaaggccactcaaaaagggtcggtatagtcgcttggcaccccacagcaaggaatgtcctcctgagcgcagggtgcgacaatgcgatcatcatttggaacgtggggactggggaagcactcatcaacctcgatgatatgcacagtgacatgatatacaacgtgagttggaaccggaatggctctctaatatgcaccgcaagcaaggacaagaaagtgcgggtgatagaccctcggaagcaggaaatcgtggccgagaaggagaaggctcatgagggcgcgagaccaatgcgtgccatctttctcgccgacggaaacgtcttcaccactggattctccagaatgagtgagcgacaacttgcgttgtggaaccctaagaatatgcaggaacccattgcattgcatgaaatggacaccagcaacggcgtccttctgccattctatgatcccgatacatcaatcatatacctgtgcggcaaaggcgacagtagtatacggtactttgagatcacagacgaatctccttacgtccattatttaaatactttctctagtaaagaacctcagcgcggcatgggctacatgcctaagagggggctcgatgtcaacaaatgcgagattgctcgcttcttcaaactgcatgagaggaagtgcgagccaattattatgacagtcccacgcaagtctgatctgttccaggacgatctctaccccgatactgcagggccagaggctgcgttggaagccgaagagtggttcgagggtaagaacgccgaccctatccttatctccctgaagcacggatacattcctgggaagaaccgggacctgaaagtggtcaagaagaacattttggacagcaaacccaccgccaataaaaaatgcgacctaatcagcattccgaagaagaccacagatacggccagcgttcagaatgaggcaaaactggacgaaatactgaaggagattaaaagcatcaaagacaccatatgcaatcaggacgagagaatcagcaaacttgagcagcaaatggcaaagatcgcagcctag

SEQ ID NO: 41497 - DNA, 1443 bp, Artificial Sequence
  derived and/or modified sequence
atgaggtggaaagatactatgcgcagagtcgtgcgacagagtaaattccgccacgtatttggacaggcagttaagaatgaccagtgttacgacgatattagggtgagccgggtgacatgggacagcagcttctgcgcggtcaaccctaggtttgtcgcgatcataatcgaagcctcaggcggcggcgcctttttagtgctaccattgcacaagactggaagaattgacaagtcttatccaactgtgtgtggccacactgggcccgttttggacatcgactggtgcccgcataacgatcaagtcattgcatctggatccgaggattgtaccgttatggtgtggcagatcccggaaaatggtttgacccttagtttgactgaacctgtcgtcatcctggaaggtcacagcaagcgggtgggaattgtggcgtggcaccctacagcaagaaacgtattgcttagcgcaggttgtgataacgcaatcatcatttggaacgtgggaaccggagaagcgctgataaaccttgatgatatgcacagcgatatgatctacaatgtcagctggaacaggaacggcagcctgatttgcacagcctctaaagacaaaaaagttagggtcatcgatccaagaaaacaggagatcgtggctgagaaggagaaagctcacgagggtgccaggccaatgcgcgcaatcttcctggctgacggcaatgtatttacaaccggattcagtagaatgtcagagcgccaactggctttatggaaccccaagaacatgcaggagccgatagccctgcatgaaatggatactagtaatggcgtcttgttgcccttttatgatccagacacatccatcatctacctgtgtggcaagggtgactcttccattaggtatttcgaaatcactgacgagtcaccctacgtgcactacctgaataccttcagctccaaggagccgcagaggggcatgggctacatgccgaagcgcggcctcgatgtaaataaatgcgaaattgccagattcttcaagctgcacgaaagaaagtgcgagcccataattatgacagttcccagaaaatcggacttgtttcaggacgatctgtaccccgatacagcagggcctgaggcagctttggaagcagaggagtggttcgagggcaaaaatgctgacccaatcctcatctctttgaagcatggttacattcccggcaaaaaccgagaccttaaagtggttaagaaaaacatattggatagtaaacccactgctaacaagaaatgtgatctcatcagcatacccaagaagaccacagatacagcaagcgtgcagaatgaagcaaagcttgacgaaatcttaaaagagattaaaagcatcaaggacacgatctgcaatcaagatgaacgcattagtaagctggaacagcagatggccaagattgccgcctag

SEQ ID NO: 41498 - DNA, 1425 bp, Artificial Sequence
  derived and/or modified sequence
atgagaagagtggtgcggcagagcaagttccgccacgtgtttggccaggccgtgaagaatgaccagtgctatgatgacatccgggtgtcccgggtgacctgggacagcagcttctgtgctgtgaaccccaggtttgtggccatcatcatcgaggccagcggcggcggggccttcctggtgctgcccctgcacaagacaggaagaattgacaagagctaccccaccgtgtgtggccacacaggccctgtgctggacatcgactggtgcccccacaatgaccaggtgattgccagcggcagcgaggactgcaccgtgatggtgtggcagatcccagaaaatggcctgaccctgagcctgacagagcctgtggtgatcctggagggccacagcaagagggtgggcatcgtggcctggcaccccacagccagaaatgtgctgctgtctgctggctgtgacaatgccatcatcatctggaatgtgggcaccggggaggccctgatcaacctggatgacatgcacagcgacatgatctacaacgtgtcctggaacagaaatggcagcctcatctgcacagccagcaaggacaagaaggtgcgggtgattgaccccaggaagcaggagatcgtggccgagaaggagaaggcccacgagggcgcccggcccatgagggccatcttcctggctgatggaaatgtgttcaccaccggcttcagcaggatgtctgagcggcagctggccctgtggaaccccaagaacatgcaggagcccatcgccctgcacgagatggacaccagcaatggagtgctgctgcccttctatgaccctgacaccagcatcatctacctgtgtgggaaaggagacagcagcatccgctactttgagatcacagatgagagcccctacgtgcactacctgaacaccttcagcagcaaggagccccagaggggcatgggctacatgcccaagaggggcctggatgtgaacaagtgtgagatcgcccgcttcttcaagctgcacgagaggaaatgtgagcccatcatcatgacagtgcccaggaagagtgacctcttccaggatgacctgtacccagacacagctggccctgaggccgccctggaggccgaggagtggtttgagggcaagaatgctgaccccatcctgatcagcctgaagcacggctacatccctgggaagaacagagacctgaaggtggtgaagaagaacatcctggacagcaagcccacagccaacaagaagtgtgacctgatcagcatccccaagaagaccacagacacagcctctgtgcagaatgaggccaagctggatgagatcctgaaggagatcaagagcatcaaggacaccatctgcaaccaggatgagcgcatcagcaagctggagcagcagatggccaagattgctgcctag

SEQ ID NO: 41499 - DNA, 1584 bp, Artificial Sequence
  derived and/or modified sequence
atgtatggccctggcagccagctgggcaagagcggcaacaacagctgggccaaggagcggggctgcagcatcgcctgccagggcagcctgaccagcgcccggctgcacgcccccagcatcggggagcggcccctgagccacatgcgctggaaggacaccatgagaagagtggtgcggcagagcaagttcagacatgtgtttggccaggccgtgaagaatgaccagtgctatgatgacatccgggtgtcccgggtgacctgggacagcagcttctgtgctgtgaaccccaggtttgtggccatcatcatcgaggccagcggcggcggggccttcctggtgctgcccctgcacaagacaggaagaattgacaagagctaccccaccgtgtgtggccacactggacctgtgctggacatcgactggtgcccccacaatgaccaggtgattgccagcggcagcgaggactgcaccgtgatggtgtggcagatcccagaaaatggcctgaccctgagcctgacagagcctgtggtgatcctggagggccacagcaagagggtgggcatcgtggcctggcaccccacagccagaaatgtgctgctgtctgctggctgtgacaatgccatcatcatctggaatgtgggcactggagaggccctgatcaacctggatgacatgcacagcgacatgatctacaacgtgtcctggaacagaaatggcagcctcatctgcacagccagcaaggacaagaaggtgcgggtcatcgaccccaggaagcaggagatcgtggccgagaaggagaaggcccatgaaggagcccggcccatgagggccatcttcctggctgatggaaatgtgttcaccaccggcttcagcaggatgtctgagcggcagctggccctgtggaaccccaagaacatgcaggagcccatcgccctgcacgagatggacaccagcaatggagtgctgctgcccttctatgaccctgacaccagcatcatctacctgtgtgggaagggggacagcagcatccgctactttgagatcacagatgagagcccctacgtgcactacctgaacaccttcagcagcaaggagccccagaggggcatgggctacatgcccaagaggggcctggatgtgaacaagtgtgaaattgcccgcttcttcaagctgcacgagaggaaatgtgagcccatcatcatgacagtgcccaggaagagtgacctcttccaggatgacctgtacccagacacagctggccctgaggccgccctggaggccgaggagtggtttgagggcaagaatgctgaccccatcctgatcagcctgaagcacggctacatccctgggaagaacagagacctgaaggtggtgaagaagaacatcctggacagcaagcccacagccaacaagaagtgtgacctgatcagcatccccaagaagaccacagacacagcctctgtgcagaatgaggccaagctggatgagatcctgaaggagatcaagagcatcaaggacaccatctgcaaccaggatgagcgcatcagcaagctggagcagcagatggccaagattgctgcctag

SEQ ID NO: 41500 - DNA, 1443 bp, Artificial Sequence
  derived and/or modified sequence
atgcgctggaaggacaccatgagaagagtggtgcggcagagcaagttccgccacgtgtttggccaggccgtgaagaatgaccagtgctatgatgacatccgggtgtcccgggtgacctgggacagcagcttctgtgctgtgaaccccaggtttgtggccatcatcatcgaggccagcggcggcggggccttcctggtgctgcccctgcacaagacaggaagaattgacaagagctaccccaccgtgtgtggccacacaggccctgtgctggacatcgactggtgcccccacaatgaccaggtgattgccagcggcagcgaggactgcaccgtgatggtgtggcagatcccagaaaatggcctgaccctgagcctgacagagcctgtggtgatcctggagggccacagcaagagggtgggcatcgtggcctggcaccccacagccagaaatgtgctgctgtctgctggctgtgacaatgccatcatcatctggaatgtgggcaccggggaggccctgatcaacctggatgacatgcacagcgacatgatctacaacgtgtcctggaacagaaatggcagcctcatctgcacagccagcaaggacaagaaggtgcgggtgattgaccccaggaagcaggagatcgtggccgagaaggagaaggcccacgagggcgcccggcccatgagggccatcttcctggctgatggaaatgtgttcaccaccggcttcagcaggatgtctgagcggcagctggccctgtggaaccccaagaacatgcaggagcccatcgccctgcacgagatggacaccagcaatggagtgctgctgcccttctatgaccctgacaccagcatcatctacctgtgtgggaaaggagacagcagcatccgctactttgagatcacagatgagagcccctacgtgcactacctgaacaccttcagcagcaaggagccccagaggggcatgggctacatgcccaagaggggcctggatgtgaacaagtgtgagatcgcccgcttcttcaagctgcacgagaggaaatgtgagcccatcatcatgacagtgcccaggaagagtgacctcttccaggatgacctgtacccagacacagctggccctgaggccgccctggaggccgaggagtggtttgagggcaagaatgctgaccccatcctgatcagcctgaagcacggctacatccctgggaagaacagagacctgaaggtggtgaagaagaacatcctggacagcaagcccacagccaacaagaagtgtgacctgatcagcatccccaagaagaccacagacacagcctctgtgcagaatgaggccaagctggatgagatcctgaaggagatcaagagcatcaaggacaccatctgcaaccaggatgagcgcatcagcaagctggagcagcagatggccaagattgctgcctag

SEQ ID NO: 41501 - DNA, 1425 bp, Artificial Sequence
  derived and/or modified sequence
atgcggcgggtggtgcggcagagcaagttccggcacgtgttcggccaggcagtcaaaaatgaccagtgttacgacgacattcgagtgtcaagagtgacgtgggactcaagcttttgcgccgtcaatccgcgcttcgtcgctataataatagaggcttcaggggggggagcctttcttgtattacccctgcacaaaacaggtcggattgataagtcttacccaacggtgtgtgggcatacaggtccagttcttgatatagattggtgcccccataatgaccaggtcatcgctagtggtagcgaggactgtaccgtcatggtatggcagatacctgagaatggactcactttaagcctgacggaaccagttgtgatactggaaggccactctaaacgtgtgggaattgttgcctggcatccaactgcccgcaatgtgctgttatccgcgggatgtgacaatgctataatcatttggaacgtggggacaggggaggctctgattaatcttgacgacatgcacagcgatatgatttacaatgtgagttggaatagaaacggctcgctcatctgcaccgccagtaaggataagaaagtcagagtgatcgatcccaggaagcaggagattgtcgccgagaaggaaaaggcgcatgagggcgctaggcccatgcgcgccatcttcctcgctgatggcaacgtgtttaccactggcttttcccgaatgagtgaacgacagttagccctgtggaatcccaagaatatgcaggagcccatcgctctgcatgaaatggacacgtcaaacggcgtgctgttgcctttctacgaccccgacactagtattatttacctctgcggaaagggcgatagctccattcgctactttgaaataacagatgagagcccgtacgtccactacctgaacacttttagctcaaaagagcctcaaagggggatggggtatatgcccaaaagaggattggatgtgaacaaatgtgagatagctagatttttcaagctgcacgaacgcaaatgtgagcctatcattatgacagtaccccgcaagtctgatctgttccaggatgatctgtacccagacactgcaggaccggaggcagccctagaggccgaagaatggttcgaaggtaagaacgctgacccaatccttatttccctaaaacacggatatatcccgggtaaaaatcgagatctaaaggtagttaagaaaaatattctcgactcaaagcctacagcaaataaaaaatgcgacctgatttccatcccgaagaaaactacagataccgcctctgtgcagaacgaagctaaactcgatgaaatcctcaaggagattaaaagtattaaggacaccatttgcaatcaagatgagcgaatatccaagctcgaacagcaaatggccaaaattgcggcatag

SEQ ID NO: 41502 - DNA, 1584 bp, Artificial Sequence
  derived and/or modified sequence
atgtacggccccggcagccagctgggcaagagcggcaacaacagctgggcgaaggaacgcggctgctcgattgcttgtcagggcagcctgacctctgccagacttcacgctcccagcataggagagcgacccctgtcccatatgagatggaaggatactatgaggagggtggttcgacagagcaaattcagacacgtcttcgggcaggcagtgaagaacgaccaatgctatgacgatattagggtgagccgggttacatgggactcttccttctgcgcagtgaaccccagattcgtcgccatcatcatcgaagcctccggaggcggcgcattcctagtcctgcctcttcataaaactggtaggattgataagagttatccaactgtgtgtggccatacaggccctgtcctggatattgactggtgtcctcacaatgatcaggtcatagcctcaggcagcgaagactgtaccgtcatggtctggcagatccccgagaatgggttgaccctgtctctgacagagcctgttgtgattctggagggtcatagcaaaagggtgggaatcgtggcctggcaccctacggctcgcaacgttcttctttctgctgggtgcgacaatgctataatcatttggaatgtcggcacgggcgaagcccttatcaatctggatgatatgcatagcgatatgatatacaatgttagctggaaccggaacgggtcccttatctgcaccgcgtccaaggacaaaaaagttcgagtgattgacccaaggaagcaggagatcgtggcagaaaaagaaaaagctcatgagggggcacgccctatgcgtgccatatttttagctgacggcaatgtgtttaccacaggcttttcgaggatgtccgagcgacagttagcactctggaacccaaagaacatgcaggagccgattgcgctgcacgagatggatacaagtaatggtgtgcttttgccgttctatgaccccgacacaagcattatctacctttgtgggaagggggactctagtatcaggtacttcgaaataaccgatgaatccccttacgttcactacctcaataccttctcctctaaggaaccccaaaggggaatgggctatatgcctaaacgcggacttgacgtgaataagtgcgagattgctagatttttcaagctgcacgagcgcaagtgcgaacccattattatgactgtgcctaggaaaagtgacctcttccaggatgacctctaccccgatactgcgggcccagaggccgctctcgaggcggaagaatggtttgagggcaaaaacgccgaccctatcctcatctcgctgaagcatggttacatccctgggaaaaacagagacctgaaggttgtgaagaagaatatcttggactcaaagccaaccgctaataagaagtgcgacctgattagcatcccgaaaaagaccaccgataccgcttccgtgcagaacgaagccaagctggatgaaattcttaaggaaatcaagagcattaaggacacaatttgcaaccaggacgaacggatttccaaattggaacagcagatggccaagattgcggcttag

SEQ ID NO: 41503 - DNA, 1425 bp, Artificial Sequence
  derived and/or modified sequence
atgcggcgggtggtgcggcagagcaagttccggcacgtgttcggccaggccgtcaaaaatgatcagtgttacgacgatatccgcgtctcacgtgtgacctgggactcctccttttgtgcggtaaatcccaggttcgtggccattattatcgaagcttccgggggaggtgcgttcctggtcctgccactgcacaaaacaggccgtatcgacaaatcctacccgacagtctgtggacataccgggcctgtgttagacatagattggtgcccccataatgaccaggtgatagcatccggtagcgaagactgcacagttatggtctggcagatcccggaaaatgggctcaccctctccctaacagagcccgtggtgatattggaaggtcacagtaagagagtgggcattgttgcttggcatccgactgctcggaatgtgttactgagcgccggctgtgataacgcaatcatcatttggaacgttggcacgggggaggctctgatcaaccttgatgacatgcattcagatatgatttacaacgtgtcctggaaccggaacggctcgctaatttgtacagccagtaaggataagaaagtcagagtgatcgaccctcggaaacaggaaattgtggccgaaaaggagaaggctcacgaaggggctaggcctatgcgggcaatcttcctcgccgacggaaacgtgttcaccactgggttttcccggatgagcgagaggcagctggccctttggaatcctaaaaacatgcaggaacccatcgccttacacgagatggacactagcaatggggtcctgctgcctttctacgatccggacacttctattatttacctgtgcggcaagggggatagtagcattaggtatttcgaaatcacagatgagtccccctatgtccattatctcaatacattttccagtaaagagccacagcgcgggatggggtacatgcctaaaaggggacttgacgttaacaagtgcgaaatcgcgcgcttctttaagctgcacgaaagaaaatgtgaacccattatcatgactgtgccacggaagagtgacctcttccaggatgacctgtacccagacacagctgggcccgaggctgccctggaagcagaggaatggtttgagggcaagaatgcagaccctatcctgatcagcctgaaacatggctatattccaggaaagaaccgcgatttgaaagtagtcaaaaagaacatcttggactctaaaccaacggcaaacaagaagtgtgaccttatttctatacctaagaagactaccgacacagcctcggtccaaaatgaggcaaagctcgacgaaatactgaaggaaatcaagagcatcaaggacaccatttgcaatcaggacgagaggataagcaaacttgagcagcaaatggctaagattgctgcttag

SEQ ID NO: 41504 - DNA, 1443 bp, Artificial Sequence
  derived and/or modified sequence
atgcggtggaaggacaccatgcggcgggtggtgcggcagagcaagtttaggcatgtgtttgggcaggcggttaaaaacgaccagtgttacgacgacattcgggtgtctagggtcacttgggactctagcttctgcgctgtgaatccaagattcgtagctatcatcatagaggcctcaggcgggggagcgtttctggtgctccctctccataaaaccgggagaattgacaaatcatacccaacggtatgcggtcataccgggcccgttctggatatcgactggtgcccccataatgatcaggtcattgcctctggcagcgaagattgtaccgttatggtatggcagatacccgaaaacggactgacgttgtctcttacagaacctgtggtcattttagaggggcatagcaaacgggttggtatagtggcatggcatcccacagccagaaacgttctgttgtcggccgggtgcgacaatgccatcatcatctggaatgtcggaactggcgaggcgcttattaacctggacgatatgcacagcgacatgatttataacgtgagttggaacaggaatggctcactgatatgtacagcttcaaaagacaagaaggtcagggtaattgaccccagaaagcaggagatagttgccgagaaagagaaagcgcacgagggggccagacccatgcgggcgatcttcttagctgatggcaatgtgtttacgacaggtttttcccgcatgagcgagaggcaactggccttgtggaatccaaaaaacatgcaggaaccaatcgctctgcatgagatggatacaagcaatggtgtgctgctgcccttttatgaccccgatacttccatcatctacttgtgtggaaagggtgacagctcaatccgctacttcgagatcaccgatgagagtccctatgttcattatctgaacacgtttagtagcaaggaacctcagcggggaatgggatatatgcctaagaggggtctggatgtcaacaaatgcgagattgcgcgctttttcaaactacatgaacgaaaatgcgagccgatcattatgaccgttcccaggaagtctgatctctttcaggacgacctgtacccagacacagcaggaccagaagccgccttagaagctgaagaatggttcgaggggaaaaacgctgatcctattcttatttcactgaagcacgggtatattccaggtaagaatcgggacctcaaagtcgtgaaaaagaatatcctcgactccaaacctaccgccaataagaaatgtgatctgatttccatacctaagaaaacaaccgacaccgcatccgtgcaaaatgaggccaagctggatgagattctgaaggagatcaagagtataaaagacactatctgtaaccaggatgaacgtatcagcaaactcgaacagcagatggcgaagatcgccgcttag

SEQ ID NO: 41505 - DNA, 1425 bp, Artificial Sequence
  derived and/or modified sequence
atgaggagagtggtcaggcagagtaaatttaggcatgtttttgggcaagctgtgaaaaatgaccaatgctatgacgatatccgggtgagtcgtgttacctgggactccagtttctgtgccgtaaaccccagatttgtcgcaatcataatagaggcgagcgggggaggggcatttctcgttttgcctctgcacaagacgggcaggatcgataaatcataccctacagtttgtggccacactgggcctgttctcgacatagattggtgtccacacaacgaccaagtgatcgcttccggttccgaagactgcacagtgatggtgtggcagattcctgaaaatgggctgaccttgtctctgacagaacctgtggtaattctcgaagggcactccaagagggtcggcatcgtcgcttggcatcccaccgcgagaaatgtcttgctgagcgctggatgcgacaatgccattatcatctggaatgtaggcaccggggaagcgctaataaaccttgacgatatgcactcggatatgatctataatgtgagctggaaccgcaatggaagtctcatttgtacagcttctaaagacaaaaaagtccgcgtgatcgatcctcggaagcaggaaattgtggcagagaaagaaaaagcccatgaaggagccagacccatgcgtgccatcttcctggccgacggtaacgtgttcaccacaggcttttcaagaatgagcgaacgtcagctagcactgtggaatcctaaaaacatgcaggaaccaatcgcattgcacgagatggacacatccaatggtgtcctactgcctttttatgatccagatacttccattatctatttgtgtggcaaaggagatagctcaattcgatatttcgaaatcactgatgagtcaccgtacgtacactaccttaatacattctctagcaaagaaccacagaggggcatgggctacatgccgaagcgcggactagacgttaataaatgcgagatcgcccgtttttttaagctccacgagcggaaatgtgaacccatcattatgaccgtgccccgtaaaagtgatctgttccaggatgatttatatcccgatacggccggtccagaagccgctcttgaagctgaagaatggttcgaaggcaagaatgccgaccccattttaataagtttgaagcatggatacatcccaggaaagaaccgtgatctaaaggtcgtgaagaagaatatcttagattcaaaacctacagctaacaagaagtgtgacctgatttctattcctaaaaaaactacagacaccgcttctgttcagaatgaagccaagctggatgaaattctcaaggagatcaaaagcatcaaagataccatatgcaaccaggacgagaggatatccaagctagagcagcaaatggcaaagatcgctgcttag

SEQ ID NO: 41506 - DNA, 1584 bp, Artificial Sequence
  derived and/or modified sequence
atgtatggtccaggctcgcagttagggaagagtgggaataattcctgggccaaggaaagggggtgctctattgcttgtcagggaagtttgaccagcgccaggttacacgccccaagcatcggcgaaaggccactcagtcacatgcggtggaaggacaccatgagacgcgtggtaaggcagtcaaagttccgccatgtgtttggtcaggcagtgaaaaacgatcagtgctacgatgatattcgagtcagccgggtcacttgggactccagcttctgcgctgtgaaccccagatttgttgcaatcataattgaggcttctggagggggtgcttttttggtgttacccctgcacaaaactggacgcattgacaaatcctacccgaccgtatgcgggcatactgggcctgtcctggacatcgattggtgtccccataatgaccaggttatcgcctctgggtcagaggattgcacggtaatggtgtggcagataccagagaatgggctgacactgtctctgacagagcctgtcgtcattcttgagggacacagcaaaagggtgggtatcgtcgcctggcacccaactgccagaaacgtgctgctcagcgccggatgcgataacgccataatcatctggaatgtcggtacaggagaagcattgattaatttggatgatatgcatagcgatatgatttataacgtaagctggaaccggaatggatctctcatttgtactgcatcaaaggacaagaaggttcgcgtcatcgatccacggaagcaggaaattgtggctgaaaaggagaaggctcacgaaggtgcccgtcccatgagagcaatattcctggccgatgggaacgtgtttactaccggtttctccagaatgtcagagcggcagctggccctgtggaacccaaagaatatgcaggagcctattgccctgcatgaaatggacacgagcaatggagtcctgctgccattctacgaccctgacaccagcattatttacctttgtgggaaaggcgatagtagcatcagatatttcgaaatcaccgatgaaagcccctacgtccactatctaaacactttctcaagcaaggaaccgcagcgcggaatggggtacatgcctaagcgcggacttgatgtgaataaatgcgagattgccagattttttaagttgcatgagagaaagtgtgaacccattataatgaccgtgccccgtaagagcgacttattccaggacgatctgtaccctgataccgccggtccagaagccgcactagaggccgaggagtggttcgaaggtaagaatgccgatccgattctgatctcactaaagcacgggtacatcccgggaaaaaatcgcgacttaaaagtggtgaaaaagaacatcctcgattctaagcctaccgccaacaagaaatgcgaccttatctctatccctaagaagaccaccgacaccgcttcggtccaaaatgaagccaagctggacgaaattctaaaggagatcaaaagcatcaaggacacaatttgtaatcaggatgaacgaatatccaagctagagcagcaaatggctaaaatagctgcttag

SEQ ID NO: 41507 - DNA, 1425 bp, Artificial Sequence
  derived and/or modified sequence
atgcgacgtgttgtgcggcaaagcaagttccgccacgtgttcggccaggcagtaaagaatgatcagtgctacgacgatataagagtgtcacgtgtcacgtgggatagctcattctgtgcagtaaaccccaggttcgtggccataatcatcgaagcctccggaggcggagcttttcttgtactccctctacacaagacaggcagaattgataagtcctatccgactgtgtgtggacacactggaccagtcttagacatcgattggtgtccacacaacgatcaggtgatcgcttcgggaagcgaggactgcaccgttatggtgtggcagatccctgagaacggtctgaccctctctctcacagagcccgtcgtaatcttggaaggtcattcaaagcgcgtgggaatcgtggcatggcatcctacagcgcgaaacgtgctgttgagcgccggatgcgacaacgctataattatttggaacgtgggaacaggcgaggcgctgataaatcttgacgacatgcattcagacatgatttataatgtgagttggaatcgaaacggctcactaatctgcactgcgtctaaagacaaaaaagtccgggtaattgatcccagaaagcaagaaatcgtcgccgaaaaagagaaagcccatgaaggggctaggccaatgcgagcaatatttttggccgacggaaacgtctttaccactgggttcagcagaatgtcagagcggcagctggcgttatggaaccctaaaaatatgcaggagcctatcgctctccacgagatggacacatctaacggagtcctgctgcccttctatgacccagatactagcatcatctacctgtgcggcaaaggcgatagtagcatccggtatttcgaaattactgacgagagcccatatgtgcattatcttaacaccttctcgagcaaggagccgcagcggggtatggggtacatgcctaagaggggactggacgttaacaaatgtgagatcgccaggttcttcaaactgcacgagcggaagtgcgaaccgattattatgactgtacctcggaagagcgacttgtttcaggatgatctttaccctgacacagccggacccgaagctgccctggaggctgaggaatggtttgagggaaaaaatgccgacccaattcttattagcttgaaacacggctatattcccggaaagaaccgagatctgaaagttgtgaagaaaaacatcctggactccaaacccaccgcgaacaaaaagtgcgatctgatatcaatcccaaagaagaccactgacaccgcaagcgttcaaaatgaggctaagctcgacgagattctaaaagaaataaagtctataaaagacacgatctgcaaccaagatgagcgcatttccaaactggaacaacagatggcgaaaattgcagcttag

SEQ ID NO: 41508 - DNA, 1443 bp, Artificial Sequence
  derived and/or modified sequence
atgcgctggaaagataccatgcgtcgagtggtccgccagagtaaattccgacacgtctttggccaggccgttaaaaatgaccagtgttacgacgacatcagggtgtccagggtaacttgggactcgagcttttgtgccgtcaatcctcgctttgtggctataatcatcgaggcgagcggcggtggcgcttttctcgtgctccccctgcacaagaccggcagaatcgacaaaagttatcctaccgtttgcggccatactgggcctgtattggacatcgactggtgtccgcacaatgaccaggtgatagcctctgggagtgaggattgtacagttatggtctggcagattccagagaatgggctcactctttctctgaccgagcccgttgtaattcttgaaggtcacagcaagcgggtggggatagtcgcttggcaccccaccgcacgcaatgtcctgctgtccgccggttgcgacaacgccattatcatttggaatgtcgggaccggggaggccctgattaacctcgacgatatgcatagcgacatgatctataacgtgtcttggaacagaaacggctccctgatctgcaccgcttctaaggataagaaagttagagtcatcgaccctagaaaacaggaaattgtggcagagaaggagaaggcgcacgaaggggcaagacccatgcgagccattttcctcgctgacggtaatgtctttaccaccggattttcccgcatgagcgagaggcagttggcattgtggaaccctaaaaacatgcaggaacccattgcactgcacgagatggatacgtctaacggcgtcctgttgcctttctacgaccctgatacatccatcatctacctgtgcggaaagggggattcctctattagatacttcgagataaccgacgagtctccttacgtgcattatctcaacaccttctcgtcaaaagaaccccagcggggtatgggttacatgccgaagaggggtttagatgtcaacaagtgtgagatcgccaggttctttaagctccacgagagaaaatgcgagcctatcatcatgaccgtgccaaggaaaagcgatttgttccaggatgatctataccctgacacagccggacccgaagccgctctggaggctgaagaatggttcgagggaaagaacgctgaccctattctgatcagcttaaagcatggatatatccctggcaaaaacagagacctaaaagtggttaagaagaatattttggatagtaaacccactgccaacaagaaatgcgacctgatatctattccaaagaaaacaaccgacacggcctccgttcagaacgaagccaaacttgacgaaattttgaaagagattaagtccattaaagataccatatgcaaccaggacgagagaatctccaaactggaacaacagatggcaaaaatcgccgcatag

SEQ ID NO: 41509 - DNA, 3892 bp, Artificial Sequence
  derived and/or modified sequence
gcgcggcgcgggggcggggcctacgcgcggtggcgggggcggtggcggctgcccgcgcccctcccccgcacggcgctcagtgccaggctggaggcggcagcggttggaggcttcgcccggctttgcagcggggacttcggcggcggcgcctcaggcacctcggcccggacacgatgaggcgagtggtacgacagagcaagtttcggcatgtatttgggcaagcggtgaaaaatgaccagtgctatgatgacatccgggtttctcgtgtgacctgggatagttccttttgtgctgtcaatcccagatttgttgccataatcatagaggcaagtgggggaggagcgttccttgtcctccctctgcacaagactggtcgaattgacaaatcttaccctacagtatgtggccacacaggaccagtgctggacatagactggtgcccacataacgatcaggtcattgccagcggttcagaggactgcacggtcatggtatggcagatcccagaaaatggactcaccctttccctgactgaacctgtggtgattttggaaggccactcaaagagagtcggcatcgtggcttggcatccaacggcccgcaatgtgcttcttagtgcaggctgtgataatgccattatcatctggaatgtgggaacaggggaagcccttataaacttggacgatatgcattcagacatgatttacaatgtgagctggaaccggaatggcagtctgatctgcacagcttccaaagacaagaaagtgagagtcattgatcccaggaaacaagagattgttgctgagaaggagaaagcacatgaaggagcaagacccatgagagccatcttcctggccgatggcaatgtcttcaccactgggttcagccgcatgagcgagcggcagctggctctctggaatccgaaaaatatgcaggaaccaattgctcttcatgagatggacactagcaatggggtgttgctgcctttctatgaccctgacaccagcatcatttacttatgtggaaagggtgacagcagtattcgctattttgagatcacggatgaatccccgtacgtccactacctcaacacattcagcagcaaggagcctcagagagggatgggttacatgcccaagaggggacttgatgttaacaaatgtgagattgccagattcttcaaacttcatgagagaaagtgtgaacctattattatgactgttcccaggaagtctgaccttttccaagatgacctgtatcctgacacagcggggccagaggccgcgctggaggcagaagagtggttcgaaggcaagaatgcagacccaatcctcatctccttgaagcacgggtacattccaggcaaaaacagggatctcaaggtggtcaagaagaacattctggatagcaagcccactgcaaacaagaagtgcgacctgatcagcatccccaagaaaaccacagacacggccagtgtgcaaaatgaagccaagttggatgagattttaaaagagatcaaatctataaaagacacaatctgcaatcaagatgagcgtatttccaagttagaacagcagatggcaaagatagcagcctgaaggtcccacccccacccctacagaaaaaatgggagcaagaacttgtgcttgggagctggttattggtgtggtcctagggagggcggaaagggaggcactgccatttggagacattccatttcagatttgtcaaccagcgataggccacattccagtaagaactcaatttgtctcccaaatttgcagaaacaaaacgtgatttaaaagctgagctttttatcagaaagcttttttgatgttttaagtgttatgtgacttgttgaactttttaaaaagtgctacttttaaaatcccagatactctgaattttagaaaacaaactaattctgattgtgtcgtgcccaagtacccttttttttttaatgaatagggaccaatgccacattgctttttatatttctttcttttttaatgttgccaaaaccaaaagtagctttgttttcctttgtattttgctactttgcagtatttgtgtgtgtggttttttttccttaatttgaaagggacagcactgtgtatgtttataaactaaatgaagataagatattattttgtataaacattcatctgagaacaatcaaagcagtagccacatggtgctggctcctttgcagcacaaacctggtcattttgatgactgtacaacaggaagacttgaaaaatcacgtggattcatattaccaccgctctcatttcatggagtcttctgatcaaaaaagctcacgtcgtatttcttcttttcctttctcttttctagaaattgggtgtttgtaccagaatggaattttgcttctcggttatcctgtgcttcagatgattataatctaacccaaactagcatgtgtttctgcagtttgttacacacctaggatcatattgcattcatcactttaaacatcatgtttcaggttttggtcaatacttgacaagggtgcccaggacaggaagacgtgtactgctgagtgttccttcttgcccttttcagcagcttgcccagctcttgagtacagtggtggggactaaaaatgtgggcatgtggagaggggtatttgccctgggtgatcctgtttccctgtgctgtccccatgctgtgttggaggaggaagtggctctccttccaccaacaaagctcctgctctaccctcttcctcacatgtgctgcgacctctctcagggctcccccagccattccttctttccttcctgccttttagctctaaccacattaagctaagacaaggccagagggtgcgattgaatgagtattgagactgaggagaatgatagagagtgaagcagaaacaggagcacagacctctgctgtagctttaatgcatacaaacatgtccctccgcacaactaacctgccctgcctctccatctctcaccaaggctgcgtcaaagcacagaggctccccggactcggagggggccagagactgagctctggtcacctgttcattcctcggttagctggaactttgccccgtttccagtttcttatagtgcatgcttgggaaacaagatttaaggagcctctgttttggaagggctgtctgtgattgaacgtgaaatgtgtagtgccattgggaccacgaagggaattcttgcacatgctcgtgctggtgtgggcatgggactggctggaaacgtctgtatgcagggagccagggtgagggcagagtgtggtgacagccgaacttggagtaatgtccgtgtagaaaaaggaccatgttcttatccagccaatactgggagtgctgtctccacaatttcagggcatctgaatgtttgatgtggttttgtgtgtgtgtatgtatgtgtttaatattgaagtggatcatgagatgtaaagaaaacaataatggcaatgacttatattcaaatctgtatttgtttctttatcaatgtaatctgctgaggaccttttgtctaagattcagtagtgttttaaggttctgatatcgaattaatgaagtaaagttgttgatggtggtgaaacaccgtagggcatgtggttcaaagagaagcaggagggcaagggaaagttaccctgatcttagtttgtagcttatgacttatttaatgaatggatgcccagccaagctcagagtaggcgcccaaagcattgtggattattttcctgttttgtctttttttttttttttttttaagccatgacatcccagaagaggacagtgaattactcctaggtcggctcttatagagtggccatagtgttctgtcaaaacacttgcttccattttcagagataaaaatcattgattacaaaa

SEQ ID NO: 41510 - DNA, 1633 bp, Artificial Sequence
  derived and/or modified sequence
aggaccctggccacgaatcatttgccatctcctctaccaaagactcaaaatgtatggccctggtagtcagctgggaaagtctggcaataacagctgggctaaggaacgtggatgctcaattgcctgccaagggtctcttacttcagcccggctacatgcccccagcattggagagaggccactttcacacatgcgttggaaggacacgatgaggcgagtggtacgacagagcaagtttcggcatgtatttgggcaagcggtgaaaaatgaccagtgctatgatgacatccgggtttctcgtgtgacctgggatagttccttttgtgctgtcaatcccagatttgttgccataatcatagaggcaagtgggggaggagcgttccttgtcctccctctgcacaagactggtcgaattgacaaatcttaccctacagtatgtggccacacaggaccagtgctggacatagactggtgcccacataacgatcaggtcattgccagcggttcagaggactgcacggtcatggtatggcagatcccagaaaatggactcaccctttccctgactgaacctgtggtgattttggaaggccactcaaagagagtcggcatcgtggcttggcatccaacggcccgcaatgtgcttcttagtgcaggctgtgataatgccattatcatctggaatgtgggaacaggggaagcccttataaacttggacgatatgcattcagacatgatttacaatgtgagctggaaccggaatggcagtctgatctgcacagcttccaaagacaagaaagtgagagtcattgatcccaggaaacaagagattgttgctgagaaggagaaagcacatgaaggagcaagacccatgagagccatcttcctggccgatggcaatgtcttcaccactgggttcagccgcatgagcgagcggcagctggctctctggaatccgaaaaatatgcaggaaccaattgctcttcatgagatggacactagcaatggggtgttgctgcctttctatgaccctgacaccagcatcatttacttatgtggaaagggtgacagcagtattcgctattttgagatcacggatgaatccccgtacgtccactacctcaacacattcagcagcaaggagcctcagagagggatgggttacatgcccaagaggggacttgatgttaacaaatgtgagattgccagattcttcaaacttcatgagagaaagtgtgaacctattattatgactgttcccaggaagtctgaccttttccaagatgacctgtatcctgacacagcggggccagaggccgcgctggaggcagaagagtggttcgaaggcaagaatgcagacccaatcctcatctccttgaagcacgggtacattccaggcaaaaacagggatctcaaggtggtcaagaagaacattctggatagcaagcccactgcaaacaagaagtgcgacctgatcagcatccccaagaaaaccacagacacggccagtgtgcaaaatgaagccaagttggatgagattttaaaagagatcaaatctataaaagacacaatctgcaatcaagatgagcgtatttccaagttagaacagcagatggcaaagatagcagcctga

SEQ ID NO: 41511 - DNA, 2487 bp, Artificial Sequence
  derived and/or modified sequence
gcgagaccagctctgggccctgcagatctcggttgggggtcaggcggggcggggcagagctggagctggagtaatgtgggtgggggcggcttgggaagaggctgagcccggccaagggagcagagggctgggactggctgggggttgggaggggaggaacgaagcaggaaggctgtcggatcgggggcccagggtgtccgagtgaactgggtgattcagagacacgatgaggcgagtggtacgacagagcaagtttcggcatgtatttgggcaagcggtgaaaaatgaccagtgctatgatgacatccgggtttctcgtgtgacctgggatagttccttttgtgctgtcaatcccagatttgttgccataatcatagaggcaagtgggggaggagcgttccttgtcctccctctgcacaagactggtcgaattgacaaatcttaccctacagtatgtggccacacaggaccagtgctggacatagactggtgcccacataacgatcaggtcattgccagcggttcagaggactgcacggtcatggtatggcagatcccagaaaatggactcaccctttccctgactgaacctgtggtgattttggaaggccactcaaagagagtcggcatcgtggcttggcatccaacggcccgcaatgtgcttcttagtgcaggctgtgataatgccattatcatctggaatgtgggaacaggggaagcccttataaacttggacgatatgcattcagacatgatttacaatgtgagctggaaccggaatggcagtctgatctgcacagcttccaaagacaagaaagtgagagtcattgatcccaggaaacaagagattgttgctgagaaggagaaagcacatgaaggagcaagacccatgagagccatcttcctggccgatggcaatgtcttcaccactgggttcagccgcatgagcgagcggcagctggctctctggaatccgaaaaatatgcaggaaccaattgctcttcatgagatggacactagcaatggggtgttgctgcctttctatgaccctgacaccagcatcatttacttatgtggaaagggtgacagcagtattcgctattttgagatcacggatgaatccccgtacgtccactacctcaacacattcagcagcaaggagcctcagagagggatgggttacatgcccaagaggggacttgatgttaacaaatgtgagattgccagattcttcaaacttcatgagagaaagtgtgaacctattattatgactgttcccaggaagtctgaccttttccaagatgacctgtatcctgacacagcggggccagaggccgcgctggaggcagaagagtggttcgaaggcaagaatgcagacccaatcctcatctccttgaagcacgggtacattccaggcaaaaacagggatctcaaggtggtcaagaagaacattctggatagcaagcccactgcaaacaagaagtgcgacctgatcagcatccccaagaaaaccacagacacggccagtgtgcaaaatgaagccaagttggatgagattttaaaagagatcaaatctataaaagacacaatctgcaatcaagatgagcgtatttccaagttagaacagcagatggcaaagatagcagcctgaaggtcccacccccacccctacagaaaaaatgggagcaagaacttgtgcttgggagctggttattggtgtggtcctagggagggcggaaagggaggcactgccatttggagacattccatttcagatttgtcaaccagcgataggccacattccagtaagaactcaatttgtctcccaaatttgcagaaacaaaacgtgatttaaaagctgagctttttatcagaaagcttttttgatgttttaagtgttatgtgacttgttgaactttttaaaaagtgctacttttaaaatcccagatactctgaattttagaaaacaaactaattctgattgtgtcgtgcccaagtacccttttttttttaatgaatagggaccaatgccacattgctttttatatttctttcttttttaatgttgccaaaaccaaaagtagctttgttttcctttgtattttgctactttgcagtatttgtgtgtgtggttttttttccttaatttgaaagggacagcactgtgtatgtttataaactaaatgaagataagatattattttgtataaacattcatctgagaacaatcaaagcagtagccacatggtgctggctcctttgcagcacaaacctggtcattttgatgactgtacaacaggaagacttgaaaaatcacgtggattcatattaccaccgctctcatttcatggagtcttctgatcaaaaaagctcacgtcgtatttcttcttttcctttctcttttctagaaattgggtgtttgtaccagaatggaattttgcttctcggttatcctgtgcttcagatgattataatctaacccaaact

SEQ ID NO: 41512 - DNA, 1710 bp, Artificial Sequence
  derived and/or modified sequence
ttttgcttttcaccacctcatggaagctgtcttatctaactcacgcttgagaagtattcatattgattccaaaatgaaggaccctggccacgaatcatttgccatctcctctaccaaagactcaaaatgtatggccctggtagtcagctgggaaagtctggcaataacagctgggctaaggaacgtggatgctcaattgcctgccaagggtctcttacttcagcccggctacatgcccccagcattggagagaggccactttcacacatgcgttggaaggacacgatgaggcgagtggtacgacagagcaagtttcggcatgtatttgggcaagcggtgaaaaatgaccagtgctatgatgacatccgggtttctcgtgtgacctgggatagttccttttgtgctgtcaatcccagatttgttgccataatcatagaggcaagtgggggaggagcgttccttgtcctccctctgcacaagactggtcgaattgacaaatcttaccctacagtatgtggccacacaggaccagtgctggacatagactggtgcccacataacgatcaggtcattgccagcggttcagaggactgcacggtcatggtatggcagatcccagaaaatggactcaccctttccctgactgaacctgtggtgattttggaaggccactcaaagagagtcggcatcgtggcttggcatccaacggcccgcaatgtgcttcttagtgcaggctgtgataatgccattatcatctggaatgtgggaacaggggaagcccttataaacttggacgatatgcattcagacatgatttacaatgtgagctggaaccggaatggcagtctgatctgcacagcttccaaagacaagaaagtgagagtcattgatcccaggaaacaagagattgttgctgagaaggagaaagcacatgaaggagcaagacccatgagagccatcttcctggccgatggcaatgtcttcaccactgggttcagccgcatgagcgagcggcagctggctctctggaatccgaaaaatatgcaggaaccaattgctcttcatgagatggacactagcaatggggtgttgctgcctttctatgaccctgacaccagcatcatttacttatgtggaaagggtgacagcagtattcgctattttgagatcacggatgaatccccgtacgtccactacctcaacacattcagcagcaaggagcctcagagagggatgggttacatgcccaagaggggacttgatgttaacaaatgtgagattgccagattcttcaaacttcatgagagaaagtgtgaacctattattatgactgttcccaggaagtctgaccttttccaagatgacctgtatcctgacacagcggggccagaggccgcgctggaggcagaagagtggttcgaaggcaagaatgcagacccaatcctcatctccttgaagcacgggtacattccaggcaaaaacagggatctcaaggtggtcaagaagaacattctggatagcaagcccactgcaaacaagaagtgcgacctgatcagcatccccaagaaaaccacagacacggccagtgtgcaaaatgaagccaagttggatgagattttaaaagagatcaaatctataaaagacacaatctgcaatcaagatgagcgtatttccaagttagaacagcagatggcaaagatagcagcctga

SEQ ID NO: 41513 - DNA, 547 bp, Artificial Sequence
  derived and/or modified sequence
aattctaacataattctcactcttcctttgcagacacgatgaggcgagtggtacgacagagcaagtttcggcatgtatttgggcaagcggtgaaaaatgaccagtgctatgatgacatccgggtttctcgtgtgacctgggatagttccttttgtgctgtcaatcccagatttgttgccataatcatagaggcaagtgggggaggagcgttccttgtcctccctctgcacaagactggtcgaattgacaaatcttaccctacagtatgtggccacacaggaccagtgctggacatagactggtgcccacataacgatcaggtcattgccagcggttcagaggactgcacggtcatggtatggcagatcccagaaaatggactcaccctttccctgactgaacctgtggtgattttggaaggccactcaaagagagtcggcatcgtggcttggcatccaacggcccgcaatgtgcttcttagtgcaggctgtgataatgccattatcatctggaatgtgggaacaggggaagcccttataaacttgga

SEQ ID NO: 41514 - DNA, 1425 bp, Artificial Sequence
  derived and/or modified sequence
atgagaagagtggtgagacagagcaagttcagacacgtgttcggccaggccgtgaagaacgaccagtgctacgacgacatcagagtgagcagagtgacctgggacagcagcttctgcgccgtgaaccccagattcgtggccatcatcatcgaggccagcggcggcggcgccttcctggtgctgcccctgcacaagaccggcagaatcgacaagagctaccccaccgtgtgcggccacaccggccccgtgctggacatcgactggtgcccccacaacgaccaggtgatcgccagcggcagcgaggactgcaccgtgatggtgtggcagatccccgagaacggcctgaccctgagcctgaccgagcccgtggtgatcctggagggccacagcaagagagtgggcatcgtggcctggcaccccaccgccagaaacgtgctgctgagcgccggctgcgacaacgccatcatcatctggaacgtgggcaccggcgaggccctgatcaacctggacgacatgcacagcgacatgatctacaacgtgagctggaacagaaacggcagcctgatctgcaccgccagcaaggacaagaaggtgagagtgatcgaccccagaaagcaggagatcgtggccgagaaggagaaggcccacgagggcgccagacccatgagagccatcttcctggccgacggcaacgtgttcaccaccggcttcagcagaatgagcgagagacagctggccctgtggaaccccaagaacatgcaggagcccatcgccctgcacgagatggacaccagcaacggcgtgctgctgcccttctacgaccccgacaccagcatcatctacctgtgcggcaagggcgacagcagcatcagatacttcgagatcaccgacgagagcccctacgtgcactacctgaacaccttcagcagcaaggagccccagagaggcatgggctacatgcccaagagaggcctggacgtgaacaagtgcgagatcgccagattcttcaagctgcacgagagaaagtgcgagcccatcatcatgaccgtgcccagaaagagcgacctgttccaggacgacctgtaccccgacaccgccggccccgaggccgccctggaggccgaggagtggttcgagggcaagaacgccgaccccatcctgatcagcctgaagcacggctacatccccggcaagaacagagacctgaaggtggtgaagaagaacatcctggacagcaagcccaccgccaacaagaagtgcgacctgatcagcatccccaagaagaccaccgacaccgccagcgtgcagaacgaggccaagctggacgagatcctgaaggagatcaagagcatcaaggacaccatctgcaaccaggacgagagaatcagcaagctggagcagcagatggccaagatcgccgcctag

SEQ ID NO: 41515 - DNA, 1584 bp, Artificial Sequence
  derived and/or modified sequence
atgtacggccccggcagccagctgggcaagagcggcaacaacagctgggccaaggagagaggctgcagcatcgcctgccagggcagcctgaccagcgccagactgcacgcccccagcatcggcgagagacccctgagccacatgagatggaaggacaccatgagaagagtggtgagacagagcaagttcagacacgtgttcggccaggccgtgaagaacgaccagtgctacgacgacatcagagtgagcagagtgacctgggacagcagcttctgcgccgtgaaccccagattcgtggccatcatcatcgaggccagcggcggcggcgccttcctggtgctgcccctgcacaagaccggcagaatcgacaagagctaccccaccgtgtgcggccacaccggccccgtgctggacatcgactggtgcccccacaacgaccaggtgatcgccagcggcagcgaggactgcaccgtgatggtgtggcagatccccgagaacggcctgaccctgagcctgaccgagcccgtggtgatcctggagggccacagcaagagagtgggcatcgtggcctggcaccccaccgccagaaacgtgctgctgagcgccggctgcgacaacgccatcatcatctggaacgtgggcaccggcgaggccctgatcaacctggacgacatgcacagcgacatgatctacaacgtgagctggaacagaaacggcagcctgatctgcaccgccagcaaggacaagaaggtgagagtgatcgaccccagaaagcaggagatcgtggccgagaaggagaaggcccacgagggcgccagacccatgagagccatcttcctggccgacggcaacgtgttcaccaccggcttcagcagaatgagcgagagacagctggccctgtggaaccccaagaacatgcaggagcccatcgccctgcacgagatggacaccagcaacggcgtgctgctgcccttctacgaccccgacaccagcatcatctacctgtgcggcaagggcgacagcagcatcagatacttcgagatcaccgacgagagcccctacgtgcactacctgaacaccttcagcagcaaggagccccagagaggcatgggctacatgcccaagagaggcctggacgtgaacaagtgcgagatcgccagattcttcaagctgcacgagagaaagtgcgagcccatcatcatgaccgtgcccagaaagagcgacctgttccaggacgacctgtaccccgacaccgccggccccgaggccgccctggaggccgaggagtggttcgagggcaagaacgccgaccccatcctgatcagcctgaagcacggctacatccccggcaagaacagagacctgaaggtggtgaagaagaacatcctggacagcaagcccaccgccaacaagaagtgcgacctgatcagcatccccaagaagaccaccgacaccgccagcgtgcagaacgaggccaagctggacgagatcctgaaggagatcaagagcatcaaggacaccatctgcaaccaggacgagagaatcagcaagctggagcagcagatggccaagatcgccgcctag

SEQ ID NO: 41516 - DNA, 1443 bp, Artificial Sequence
  derived and/or modified sequence
atgagatggaaggacaccatgagaagagtggtgagacagagcaagttcagacacgtgttcggccaggccgtgaagaacgaccagtgctacgacgacatcagagtgagcagagtgacctgggacagcagcttctgcgccgtgaaccccagattcgtggccatcatcatcgaggccagcggcggcggcgccttcctggtgctgcccctgcacaagaccggcagaatcgacaagagctaccccaccgtgtgcggccacaccggccccgtgctggacatcgactggtgcccccacaacgaccaggtgatcgccagcggcagcgaggactgcaccgtgatggtgtggcagatccccgagaacggcctgaccctgagcctgaccgagcccgtggtgatcctggagggccacagcaagagagtgggcatcgtggcctggcaccccaccgccagaaacgtgctgctgagcgccggctgcgacaacgccatcatcatctggaacgtgggcaccggcgaggccctgatcaacctggacgacatgcacagcgacatgatctacaacgtgagctggaacagaaacggcagcctgatctgcaccgccagcaaggacaagaaggtgagagtgatcgaccccagaaagcaggagatcgtggccgagaaggagaaggcccacgagggcgccagacccatgagagccatcttcctggccgacggcaacgtgttcaccaccggcttcagcagaatgagcgagagacagctggccctgtggaaccccaagaacatgcaggagcccatcgccctgcacgagatggacaccagcaacggcgtgctgctgcccttctacgaccccgacaccagcatcatctacctgtgcggcaagggcgacagcagcatcagatacttcgagatcaccgacgagagcccctacgtgcactacctgaacaccttcagcagcaaggagccccagagaggcatgggctacatgcccaagagaggcctggacgtgaacaagtgcgagatcgccagattcttcaagctgcacgagagaaagtgcgagcccatcatcatgaccgtgcccagaaagagcgacctgttccaggacgacctgtaccccgacaccgccggccccgaggccgccctggaggccgaggagtggttcgagggcaagaacgccgaccccatcctgatcagcctgaagcacggctacatccccggcaagaacagagacctgaaggtggtgaagaagaacatcctggacagcaagcccaccgccaacaagaagtgcgacctgatcagcatccccaagaagaccaccgacaccgccagcgtgcagaacgaggccaagctggacgagatcctgaaggagatcaagagcatcaaggacaccatctgcaaccaggacgagagaatcagcaagctggagcagcagatggccaagatcgccgcctag

SEQ ID NO: 41517 - protein, 1101 aa, Artificial Sequence
  derived and/or modified sequence
MESLLLPVLLLLAILWTQAAALINLKYSVEEEQRAGTVIANVAKDAREAGFALDPRQASAFRVVSNSAPHLVDINPSSGLLVTKQKIDRDLLCRQSPKCIISLEVMSSSMEICVIKVEIKDLNDNAPSFPAAQIELEISEAASPGTRIPLDSAYDPDSGSFGVQTYELTPNELFGLEIKTRGDGSRFAELVVEKSLDRETQSHYSFRITALDGGDPPRLGTVGLSIKVTDSNDNNPVFSESTYAVSVPENSPPNTPVIRLNASDPDEGTNGQVVYSFYGYVNDRTRELFQIDPHSGLVTVTGALDYEEGHVYELDVQAKDLGPNSIPAHCKVTVSVLDTNDNPPVINLLSVNSELVEVSESAPPGYVIALVRVSDRDSGLNGRVQCRLLGNVPFRLQEYESFSTILVDGRLDREQHDQYNLTIQARDGGVPMLQSAKSFTVLITDENDNHPHFSKPYYQVIVQENNTPGAYLLSVSARDPDLGLNGSVSYQIVPSQVRDMPVFTYVSINPNSGDIYALRSFNHEQTKAFEFKVLAKDGGLPSLQSNATVRVIILDVNDNTPVITAPPLINGTAEVYIPRNSGIGYLVTVVKAEDYDEGENGRVTYDMTEGDRGFFEIDQVNGEVRTTRTFGESSKSSYELIVVAHDHGKTSLSASALVLIYLSPALDAQESMGSVNLSLIFIIALGSIAGILFVTMIFVAIKCKRDNKEIRTYNCRIAEYSYGHQKKSSKKKKISKNDIRLVPRDVEETDKMNVVSCSSLTSSLNYFDYHQQTLPLGCRRSESTFLNVENQNTRNTSANHIYHHSFNSQGPQQPDLIINGVPLPETENYSFDSNYVNSRAHLIKSSSTFKDLEGNSLKDSGHEESDQTDSEHDVQRSLYCDTAVNDVLNTSVTSMGSQMPDHDQNEGFHCREECRILGHSDRCWMPRNPMPIRSKSPEHVRNIIALSIEATAADVEAYDDCGPTKRTFATFGKDVSDHPAEERPTLKGKRTVDVTICSPKVNSVIREAGNGCEAISPVTSPLHLKSSLPTKPSVSYTIALAPPARDLEQYVNNVNNGPTRPSEAEPRGADSEKVMHEVSPILKEGRNKESPGVKRLKDIVL

SEQ ID NO: 41518 - DNA, 3306 bp, Artificial Sequence
  derived and/or modified sequence
atggagagtctgctgttgccagttttgctcttgctcgcaatactgtggacacaggcagctgctctgattaacttgaagtacagcgttgaggaggaacaacgggctgggacagtgattgcaaacgtcgctaaagacgctcgagaggcaggctttgcgcttgatccaagacaagcttctgcctttagagtcgtgagcaattcagctccccatcttgtggacattaaccctagttctggcctgctggtgacgaaacagaaaatcgacagagatctcctttgtcgccagagtcctaagtgcatcatttctttggaagtaatgtcatccagcatggaaatctgcgttattaaggttgaaatcaaggatctcaatgacaacgcgccaagcttccctgccgcgcagatcgagctcgagattagtgaggccgcttcgcccggaacgcgtattccccttgattcagcctacgaccccgacagtgggtctttcggggttcagacttatgagctgacccccaacgagttattcggcctagagataaagactcgcggagatggtagccgattcgctgagctcgtcgtcgaaaaaagcttggaccgagagacacaatctcactacagcttcaggattacggccctggatggcggcgacccacccagacttggaaccgtcgggttgtccatcaaggtgacagactcaaatgacaacaaccctgtgttctctgaaagcacctacgctgtgtctgtgcctgaaaattcacctcccaatactcctgtgatccgccttaacgcctcggatcccgatgaaggtacaaatggacaagtggtctacagcttttacgggtatgtcaatgatcgcacccgggagctctttcaaatcgacccccactccggcctggttaccgtcacgggtgccctggactacgaggagggccatgtttacgaattggacgtccaggccaaagacttaggtcctaattcaattcctgcacattgtaaggtgacagtaagtgtcctggacaccaatgacaatcccccggtgatcaacttactttccgttaactcagaactcgtagaagtgtctgaaagtgctccaccgggatatgtgattgcgctcgtcagagtgtcagatcgggatagcggcttaaatggcagagttcagtgcaggttgttaggaaacgtccctttcagattgcaagagtacgaatcattttccactattctggtcgacgggcgtctagacagagaacagcacgatcagtataacctcacaatccaggctcgtgatggtggggtgcccatgttgcagtcagctaagtccttcacagtactgatcacggacgaaaatgacaaccaccctcacttttcaaaaccttattatcaggtgattgtccaggagaacaatacacccggcgcttatctgctttcagtgtctgcaagagacccagatctggggctgaacgggagcgtatcctatcaaattgtaccctcccaggtgagagacatgcctgtgtttacttacgtgagcatcaaccctaactccggcgatatatatgctttgcgcagctttaaccacgagcaaactaaggcttttgaatttaaggtgctcgctaaggacggcgggcttccttccctgcagagcaacgccacggtcagagttattatcctggatgttaacgataacacaccagtcattacagcgccaccccttatcaatggtacagctgaagtctacattcctcgtaactccggcatcggctatttggtaaccgtggtcaaggcagaggattatgatgaaggagagaacggaagggtgacgtacgatatgacagaaggagacaggggcttcttcgaaattgaccaggtgaatggtgaagttagaactacgcgtacatttggagaaagttcaaagagttcgtatgagctgattgtggtagcccatgatcacggcaagacttcactctctgcctctgcactagtgttgatctacttgtccccagctctcgacgctcaagagtcaatgggaagcgtgaatctgtccttaattttcattatcgccctcggatctattgccggtatcttatttgttacaatgattttcgttgctataaagtgtaagcgagacaacaaagagatcaggacttataactgccgcatcgccgagtactcctatggccatcaaaaaaaatcatctaagaagaagaaaatcagtaaaaacgatattcgacttgttcccagggatgtcgaagagactgataaaatgaatgtggttagctgctctagcctcacatcttccctaaactatttcgattaccaccagcagaccctcccgcttggctgccggagatccgagagcacttttctaaacgttgagaatcagaatacacggaatacatccgctaaccacatctatcatcactctttcaacagccaaggcccacagcagccagacctcatcatcaatggtgtaccactgcctgaaactgagaactattcattcgattccaattatgtaaactcacgggcacatttaattaagtcgtcctcgacctttaaagacctggaggggaactctctcaaagattccggacatgaggagtctgatcaaaccgacagcgagcacgatgtgcagcgttccctctattgcgacaccgcagtgaatgacgtgctgaatacatctgtgacaagtatgggttcccagatgccggatcacgaccaaaacgaagggttccactgtcgcgaagaatgccgcatcttgggacatagtgaccgatgctggatgccaaggaatccaatgcccattcggtctaaaagtccagaacacgtgcggaatattatcgctcttagcattgaggccaccgcagccgacgttgaagcttacgatgactgtggccctacaaaacggacctttgccacgttcggcaaggacgtgagcgaccaccctgctgaggagcgcccaaccctgaaaggcaagcggaccgtcgacgttaccatatgttccccgaaggtgaacagcgtaatccgggaggctggcaatgggtgcgaggcgatctcacctgtaacatccccactccaccttaagtctagcttacctacaaaaccctccgtgtcttacaccatcgcgctggcccctcctgctcgtgacctggaacagtacgtgaacaatgtgaataatggccccacacggccctcagaggcggaaccaagaggtgccgactcagaaaaagttatgcacgaagtgtcaccaatcttaaaggaaggtagaaataaggagtcccccggcgtgaaaagactgaaggacattgtgttgtag

SEQ ID NO: 41519 - DNA, 3306 bp, Artificial Sequence
  derived and/or modified sequence
atggagagcctgctgctgcctgtgctgctgctgctggccatcctgtggacccaggccgccgccctgatcaacctgaagtacagcgtggaggaggagcagagagctggcaccgtgattgccaacgtggccaaggatgcccgggaggccggctttgccctggacccccggcaggccagcgccttccgggtggtgagcaacagcgccccccacctggtggacatcaaccccagcagcggcctgctggtgaccaagcagaagattgaccgggacctgctgtgccggcagagccccaagtgcatcatcagcctggaggtgatgagcagctccatggagatctgtgtgatcaaggtggagatcaaggacctgaatgacaatgcccccagcttccctgctgcccagatcgagctggagatcagcgaggccgccagccctggcacccgcatccccctggacagcgcctatgaccctgacagcggcagctttggagtgcagacctatgagctgaccccaaatgagctgtttggcctggagatcaagaccagaggagatggcagcagatttgctgagctggtggtggagaagagcctggaccgggagacccagagccactacagcttccgcatcacagccctggatggaggagaccccccccggctgggcaccgtgggcctgagcatcaaggtgacagacagcaatgacaacaaccctgtgttttctgagagcacctatgctgtgtctgtgcctgagaacagcccccccaacacccctgtgatccggctgaatgccagtgaccctgatgagggcaccaacggccaggtggtgtacagcttctacggctacgtgaatgacaggacccgggagctgttccagattgacccccacagcggcctggtgacagtgactggagccctggactatgaggagggccacgtgtatgagctggatgtgcaggccaaggacctgggccccaacagcatcccagcccactgcaaggtgacagtgtctgtgctggacaccaatgacaacccccctgtgatcaacctgctgtctgtgaacagcgagctggtggaggtgtctgagagcgcccctcctggctacgtgattgccctggtgcgggtgtctgaccgggacagcggcctgaatggccgggtgcagtgccgcctgctgggcaatgtgcccttccggctgcaggagtatgagagcttcagcaccatcctggtggatggccgcctggaccgggagcagcacgaccagtacaacctgaccatccaggccagagatggaggagtgcccatgctgcagagcgccaagagcttcaccgtgctgatcacagatgaaaatgacaaccacccccacttcagcaagccctactaccaggtgattgtgcaggagaacaacacccctggggcctacctgctgtctgtgtctgcccgggaccctgacctgggcctgaatggatctgtgtcctaccagatcgtgcccagccaggtgcgggacatgcctgtgttcacctacgtgtccatcaaccccaacagcggggacatctatgccctgcggagcttcaaccacgagcagaccaaggcctttgagttcaaggtgctggccaaggatggcggcctgcccagcctgcagagcaatgccaccgtgcgggtcatcatcctggatgtgaatgacaacacccctgtgatcacagccccacccctcatcaatggaacagctgaggtgtacatccccagaaattctggaattggctacctggtgacagtggtgaaggcagaagattatgatgaaggagaaaatggccgggtgacctatgacatgacagaaggagaccggggcttctttgaaattgaccaggtgaatggagaggtgaggaccaccaggaccttcggggagagcagcaagagcagctatgagctgattgtggtggcccatgaccacggcaagaccagcctgagcgccagcgccctggtgctgatctacctgagccctgccctggatgcccaggagagcatgggctctgtgaacctgagcctcatcttcatcatcgccctgggcagcattgctggcatcctgtttgtgaccatgatctttgtggccatcaagtgcaagagggacaacaaggagatccgcacctacaactgcagaattgctgagtacagctatggccaccagaagaagagcagcaagaagaagaagatcagcaagaatgacatccggctggtgcccagagatgtggaggagacagacaagatgaatgtggtgtcctgcagcagcctgaccagcagcctgaactactttgactaccaccagcagaccctgcccctgggctgcagaagaagtgagagcaccttcctgaatgtggagaaccagaacaccaggaacaccagcgccaaccacatctaccaccacagcttcaacagccagggcccccagcagcctgacctgatcatcaatggagtgcccctgcctgagacagagaactacagctttgacagcaactacgtgaacagccgggcccacctgatcaagagcagcagcaccttcaaggacctggagggcaacagcctgaaggacagcggccacgaggagagtgaccagacagacagcgagcatgatgtgcagaggagcctgtactgtgacacagctgtgaatgatgtgctgaacacctctgtgacctccatgggcagccagatgccagaccatgaccagaatgaaggcttccactgccgggaggagtgccgcatcctgggccacagcgaccgctgctggatgcccaggaaccccatgcccatccgcagcaagagccctgagcacgtgaggaacatcatcgccctgagcattgaggccacagctgctgatgtggaggcctatgatgactgtggccccaccaagaggacctttgccaccttcggcaaggatgtgtctgaccaccctgctgaggagcggcccaccctgaagggcaagaggacagtggatgtgaccatctgcagccccaaggtgaacagcgtcatccgggaggccggaaatggctgtgaggccatcagccctgtgaccagccccctgcacctgaagagcagcctgcccaccaagcccagcgtgtcctacaccatcgccctggcccccccagcccgggacctggagcagtatgtgaacaacgtgaacaacggccccacccggcccagcgaggccgagcccagaggagctgacagcgagaaggtgatgcatgaggtgagccccatcctgaaggagggcaggaacaaggagagccctggggtgaagaggctgaaggacatcgtgctgtag

SEQ ID NO: 41520 - DNA, 3306 bp, Artificial Sequence
  derived and/or modified sequence
atggagagcctgctgctgcccgtgctgctgctgctggccatcctgtggactcaggccgctgctctcatcaacttaaagtacagcgtggaggaagagcaacgtgccggcacagtgattgccaacgtcgcaaaagatgcccgagaagcaggatttgctcttgacccccgacaggccagcgcctttagggtggtcagtaatagcgcccctcatctagttgatatcaatccctctagcggcttattggtcactaaacagaagatagaccgcgaccttctgtgtagacaatccccaaaatgcatcatttccctagaagttatgtcctcttcgatggaaatttgcgtgattaaagttgagatcaaggatttgaacgacaatgctccgtcttttcccgccgcacagatcgagttagaaatcagtgaagcagccagtccggggacacgaatcccattggacagtgcctatgatccagattcgggttcatttggcgtgcagacatatgaactaacaccaaatgagcttttcgggctggagatcaaaacaagaggcgatggcagccggtttgctgagctggttgtcgaaaagtcgctcgaccgggaaacacagtcgcactattcgttccggataactgcactggatggcggtgacccccccaggctcggcactgttgggctgagcataaaggtgactgactcaaacgacaacaatcccgtcttttcggaatccacctacgccgtcagcgtcccggagaactctccacccaacaccccagtgattagattgaatgccagcgacccagacgagggaaccaacggacaggtggtgtactccttttacggctatgtcaatgacagaacacgcgaactcttccagatcgatccacacagtggactggtgactgtaactggagccttggattatgaggagggtcacgtctatgagttagatgtccaggccaaggacttgggccctaatagcatcccggcccactgtaaagtgactgtaagtgtgctagatactaatgacaacccccctgtgatcaacctgctgtctgtaaattcagaattggtcgaagtctccgaaagcgctccacccgggtacgtcattgcccttgtgagggtgtctgaccgggatagcggattgaacggcagggtgcagtgccgcctgctggggaacgtgcctttccgtctgcaggagtacgagtcattctccactatcttagtggacggccggttagacagagagcagcacgaccagtacaatctcacaattcaggcacgggatggcggtgttccaatgctccaaagtgcgaaatcgttcaccgtgctcattacagacgagaatgataaccatccgcactttagcaagccctactatcaggtcatagtccaggagaacaacacgcctggggcctacctcctgtccgtaagcgcccgtgaccccgaccttgggctgaacggcagtgtatcttatcagatcgtcccctcccaggtacgtgatatgccagtttttacttatgtttccattaaccccaattccggcgatatctacgctctccgctccttcaatcacgagcaaaccaaggcattcgagttcaaggtgctagccaaggatgggggactaccttcgctccagtcaaacgcaaccgtccgcgtcataatccttgacgttaatgacaatactcccgtaatcactgcacctccattgatcaatggcactgcagaggtgtacataccgagaaactccggcatcggataccttgtgacggtggtgaaagccgaagattatgatgaaggagaaaacggtcgggtgacgtacgatatgacagagggagacagaggattcttcgaaatcgaccaggtgaacggcgaagtccgaaccacacgcacatttggcgagagttcaaaatcaagctacgagctcattgtcgtggcgcatgatcacggcaagacttcccttagcgcatctgccctcgttctcatatacctgagtccagcactagacgctcaggaatcgatgggcagcgtaaacctgtccctgatcttcataatagccctgggttcaatagccggtatactctttgtcactatgatctttgtcgctatcaaatgtaagcgggacaacaaggagattcggacatacaattgtagaatcgcagagtactcctacggccatcaaaagaaatcctccaagaaaaagaagataagtaagaatgacatccgcctggtgccacgcgacgtggaggagaccgacaaaatgaacgttgtcagttgctcaagccttactagcagtctgaattacttcgactatcaccagcagaccctgccccttggctgtaggaggtctgaatctacttttctgaacgtggagaaccagaacacacgcaataccagcgccaatcatatttaccaccactcgttcaattctcaaggacctcagcagcctgatctcatcattaatggtgtcccattacccgagaccgagaattattcctttgactcaaattacgtgaactcgagggcacatcttattaagtcatcatcgacatttaaggatttggaggggaattccttaaaggactcgggacacgaagagtcagatcagaccgattctgagcacgatgtacagaggtccctgtactgtgataccgctgtgaatgacgttttgaataccagcgtgacttctatgggaagtcagatgccagaccacgatcagaatgagggcttccattgccgcgaagagtgtaggatcctcggtcactccgatagatgttggatgccaaggaacccaatgccaattcgctccaagagcccagaacatgtccggaacatcatcgcactttctattgaagctaccgccgccgatgttgaggcttatgacgactgcggcccaactaagcgtacgtttgccacttttggcaaggacgtgagcgaccaccccgccgaagagcgtcctacgctcaaggggaaaaggaccgtcgacgtaactatttgttccccgaaagtgaacagcgttatacgcgaagccggaaacggctgcgaggccattagcccagtcacttcccccctccatctgaagagctctctgccaaccaagccctccgtgagttatacgatcgccctcgctccccccgccagggatctggagcagtatgtgaataacgtgaacaacggccctacacgcccgtctgaggctgaaccgagaggtgctgattctgagaaagtgatgcacgaagtgagccctatcctgaaggaggggcgtaataaagagagtccgggcgttaagcgtctgaaagacatcgtgctttag

SEQ ID NO: 41521 - DNA, 3306 bp, Artificial Sequence
  derived and/or modified sequence
atggaaagccttctgctgccagtccttcttttgcttgccattctttggacacaggctgctgccctcataaatctgaagtactccgtcgaagaagagcaaagagccggtacagtgatcgctaacgttgcaaaagatgccagagaagccggtttcgctttggatcccagacaagcctctgccttccgcgtcgtgagcaatagcgcaccacatctagttgacattaaccctagcagcggcttgctcgttacaaagcagaaaatcgatagggatctcctgtgtaggcagtcacccaaatgcataatcagccttgaggtgatgtcctcttcgatggaaatctgcgtcattaaagtcgagatcaaggacttgaacgacaatgcaccctcgttcccagccgcacaaatagaactggagatatccgaggctgcctctccaggaacacgtatcccgcttgatagcgcgtacgatcctgactcgggctcatttggagtgcaaacctatgagctgactcctaacgagcttttcggcctcgaaataaaaactcggggagacggatctaggtttgctgagctcgtcgtggagaagagtctagacagagagacccaaagtcactattcgtttagaattacagccctggacggcggagaccctcctaggttgggcactgttggcttatccatcaaagtgactgacagtaatgataacaatcccgttttcagcgagagcacctacgctgtgagtgtgcccgaaaactctccgccaaacactcccgtgattcgactgaacgcttctgatcccgacgagggcaccaacggacaggtggtttactctttctatggctatgttaatgacaggacaagggaattgtttcagatcgatccacatagcggtctggtgactgtgacaggggcattggactatgaggaggggcatgtttatgagctggacgtacaggcaaaggacctgggcccaaattctatacccgctcattgtaaggtgacggtgtctgtgttggatacaaatgacaaccctcctgtgatcaacctgttgagtgtcaacagtgagcttgtcgaggtctccgagagcgcgccacctggctacgtaatcgccctggttagagtgtcggatagagactcaggtctgaacggacgggtccagtgcagactcctcggcaacgtcccattccgcttacaggagtacgagtctttttcaacgattctggttgatgggcgactcgacagggagcagcacgaccaatataatctcacaatccaagcaagggatggcggtgtacctatgctccagtctgccaagagctttacagtgcttattactgacgagaacgacaatcaccctcacttctccaagccatattatcaggtgattgtgcaggagaataatacccccggagcctatctgctgagtgtctcagcgagggaccccgatcttggtctgaacggatcagtatcctaccagattgttccttcacaggtgagagacatgcccgtttttacctacgtttcaattaaccctaactccggagacatttatgcgctgagaagctttaatcatgaacagaccaaggccttcgaattcaaggtgctcgccaaggacggaggcctgcccagcctgcaatctaacgctactgtccgggtcataattttggacgttaatgacaacacacctgtaatcactgctccaccactgattaacggaaccgccgaagtgtacatccctcgcaattctggtatcggctacctggtcactgtcgtcaaggctgaagactacgatgagggcgagaatgggagagtgacctacgatatgacagagggagaccgtggcttttttgaaatcgatcaagtgaatggcgaggttcggaccaccaggaccttcggggaaagctccaagtcctcatacgagctaattgtagtggctcatgaccacggcaagactagcttgagtgctagtgctctggtgctcatctatctgtccccggctctggatgcacaggaatcgatgggatctgtaaatcttagcttgattttcatcattgcgctcggctcgatcgcgggaatccttttcgtcaccatgatcttcgtggcgatcaaatgcaagcgggacaataaggagattagaacatacaactgtcgaatcgccgaatactcatacggccaccagaagaaaagctccaagaagaagaaaatttctaagaatgacatccggctcgtgcccagggatgtcgaggagacagacaaaatgaatgtcgtgtcctgttccagcctcacgtcctcgctgaattacttcgactaccaccagcagactctccctttgggctgcaggcgtagcgagtcaacattcttgaacgtggagaatcagaatacgcggaacacaagtgcaaaccatatctatcatcattcctttaactctcagggaccacagcagccagatctcataataaacggtgtgcctctgccagagacagagaactacagcttcgattccaactatgttaatagccgcgctcaccttatcaaatccagctccaccttcaaggaccttgaaggcaacagtctaaaagactccgggcacgaggagtcagaccaaactgatagtgagcatgacgtccagcggtcactctactgtgacaccgctgtaaacgatgttctgaacacatccgttacctcaatggggagccagatgccggaccacgatcagaatgagggcttccactgccgcgaggagtgcagaattctgggccactccgatcggtgttggatgccacggaaccccatgcccatccgctccaagagcccagagcacgttcgcaacataatcgcattgagtatagaggcaactgctgccgatgttgaggcatacgacgactgcgggcctaccaagagaacgtttgccacgttcggaaaagatgtgtcagatcatccagccgaggagagacctacgctgaaaggaaaaagaacggtggatgttaccatttgtagcccaaaggtgaattcggtgatccgcgaggccggaaacggctgtgaagcgatatctcctgtaacatctccgttgcacctcaagtcttcactgcctacgaagccttctgtctcctatactatagccttggccccaccagccagggatctagagcagtatgtcaataatgttaacaatggcccaactcgtccgtccgaagcggagcctcggggagcggacagcgagaaagttatgcatgaagtttctcccatattgaaagaggggaggaataaggaatcacccggagtgaagcggctcaaggacatcgtgctctag

SEQ ID NO: 41522 - DNA, 9613 bp, Artificial Sequence
  derived and/or modified sequence
agtagtttgcggcatccggaggagcagcagcagcagtagcggcggcggctggcgcagcgcggagacggacgagcgggcacagacggcagcacagctcccgtgcaccatgcctggcttgcccgggaggcactggcacccgcgtccctagcccggcgctggcccttggcgcgttgcgctccgcagcattccggctgagcgatttcatccgaaatcctaaacctcctaccccaaacccattgcctcctgcttgctcatactccacactcacactccccacaccacacactcactcttcctctctctctcacacattcacacacagcccgagacagacagagaaagcgagacagacctcccgagtgcgcgagcgcccgggaggaagggagcccaacgcagcgcggccagcgcctctccgggaagatgaaatcaagacgctcctgcaagtaaacttcggcggcgacaaaatcgtcgactgtggcagctgctgaggcggaccccagcgacgtgcaactgagctaggagggcttcctcccgcggcggcggcggcggcggcggcggcggcggaccttggagcgacaccccagcccaaacggagagaagagaagcacccggtacccacggcggcggccccgcctctcctggccggtactgttgttgcctccccttccctcttccccattccccgccacccccggccattagaaagaccggggctttgattttcttggacaaattgccatctccccgtttccacaaacttgacgtggagggtcggactgcgttgttaactttgatttcctagacgaaaacgcccgcagaccctcaactgctctgtggggggaactccgctcccacctcggatcctggacagacgcgcccccaagcccttcgaagccagccttagcgcgagggagcgcgctcaagctctggcagcctctctcccctcccccttcctctgctggccccgggaccgccatccgactcaaccctataaccgggtgcccgcggcgcttgccagtaactgactcccgtctgcgacaccccctttctcccgaacaggcctcgaagaggccagtgtggcccccccagaccccggagggcgcattccaagcgggtactctctccgcagtgaactgggagcgctggggggaggtctttgcgcatgccaggtgcacagacagcgagttcgccagcctcagtgccggtgcaccgcggcgggccgggcagtgcctgaaaggctgcgcctcctccgccctctttaccttcgcctcaagtactgtccggactcagcggtgcgtcctccaggccgcgcagacgccgcccgacccgcagccctgggcggctgccgacagtcgcgcccggctaactttgaaggggtaaaactgagtagccgggctggagggagggggctcggggccgcgcggcgctcccttggcccctcggagcccccggggcccccgcgagcccccgccgcgtccgccgcaacctcagcattggagccgccgcgggtgtcccccgcgcgccgccgggccgccctgggcgggacttctcccgcggcctccggggccacggggcgcgcgcaacaggcggcccgagccggcgggaagctggagcgccgacggcgtcggtctcggaggggtgtggagaggcgaggccaggcagagccccgtgcagccatggagtcgctcctgctgccggtgctgctgctgctggccatactgtggacgcaggctgccgccctcattaatctcaagtactcggtagaagaggagcagcgcgccgggacggtgattgccaacgtggccaaagacgcgcgagaggcgggcttcgcgctggacccccggcaggcttcagcctttcgcgtggtgtccaactcggctccacacctagtggacatcaatcccagctctggcctgctggtcaccaagcagaagattgaccgtgatctgctgtgccgccagagccccaagtgcatcatctcgctcgaggtcatgtccagctcaatggaaatctgcgtgataaaggtggagatcaaggacctgaacgacaatgcgcccagtttcccggcagcacagatcgagctggagatctcggaggcagccagccctggcacgcgcatcccgctggacagcgcttacgatccagactcaggaagctttggcgtgcagacttacgagctcacgcccaacgagctgttcggcctggagatcaagacgcgcggcgacggctcccgctttgccgaactcgtggtggaaaagagcctggaccgcgagacgcagtcgcactacagcttccgaatcactgcgctagacggtggcgacccgccgcgcctgggcaccgttggccttagtatcaaggtgaccgactccaatgacaacaacccggtgtttagcgagtccacctacgcggtgagcgtgccagaaaactcgcctcccaacacacccgtcatccgcctcaacgccagcgatccagacgagggcaccaacggccaggtggtctactccttctatggctacgtcaacgaccgcacgcgcgagctctttcagatcgacccgcacagtggcctggtcactgtcactggcgctttagactacgaagaggggcacgtgtacgaactggacgtgcaggctaaggacttggggcccaattccatcccggcacactgcaaggtcaccgtcagcgtgctggacaccaatgacaatccgccggtcatcaacctgctgtcagtcaacagtgagcttgtggaggtcagcgagagcgcccccccgggctacgtgatcgccttggtgcgggtgtctgatcgcgactcaggcctcaatggacgtgtgcagtgccgtttgctgggcaatgtgccctttcgactgcaggaatatgagagcttctccactattctggtggacggacggctggaccgcgagcagcacgaccaatacaacctcacaattcaggcacgcgacggcggcgtgcccatgctgcagagtgccaagtcctttaccgtgctcatcactgacgaaaatgacaaccacccgcacttttccaagccctactaccaggtcattgtgcaggagaacaacacgcctggcgcctatctgctctctgtgtctgctcgcgaccccgacctgggtctcaacggcagtgtctcctaccagatcgtgccgtcgcaggtgcgggacatgcctgtcttcacctatgtctccatcaatcccaactcaggcgacatctacgcgctgcgatcctttaaccacgagcagaccaaggcgttcgaattcaaggtgctggccaaggacggcggccttccctcactgcaaagcaacgctacggtgcgggtcatcatcctcgacgtcaacgacaacaccccggtcatcacagccccacctctgattaacggcactgccgaggtctacataccccgcaactctggcataggctacctggtgactgttgtcaaggcagaagactacgatgagggcgaaaatggccgagtcacctacgacatgaccgagggcgaccgcggcttctttgaaatagaccaggtcaatggcgaagtcagaaccacccgcaccttcggggagagctccaagtcctcctatgagcttatcgtggtggctcacgaccacggcaagacatctctctctgcctctgctctcgtcctaatctacttgtcccctgctctcgatgcccaagagtcaatgggctctgtgaacttgtccttgattttcattattgccctgggctccattgcgggcatcctctttgtaactatgatcttcgtggcaatcaagtgcaagcgagacaacaaagagatccggacctacaactgcagaattgctgagtactcctatgggcatcaaaagaaatcaagcaagaagaaaaaaatcagtaagaatgacatccgcctggtaccccgggatgtggaggagacagacaagatgaacgttgtcagttgctcttccctgacctcctccctcaactattttgactaccaccagcagacgctgcccctgggctgccgccgctctgagagcactttcctgaatgtggagaaccagaatacccgcaacaccagtgctaaccacatctaccatcactctttcaacagccaggggccccagcagcctgacctgattatcaacggtgtgcctctgcctgagactgaaaactattcttttgactccaactacgtgaatagccgagcccatttaatcaagagcagctccaccttcaaggacttagagggcaacagcctgaaggatagtggacatgaggagagtgaccaaactgacagtgagcatgatgtccagcggagcctgtattgtgatactgctgtcaacgatgtgctgaacaccagtgtgacctccatgggatctcagatgcctgatcatgatcagaatgaaggatttcattgccgggaagaatgccggattcttggccactctgacaggtgctggatgccccggaaccccatgcccatccgttccaagtcccctgagcatgtgaggaacatcatcgcgctgtctattgaagctactgctgctgatgtcgaggcttatgacgactgcggccccaccaaacggactttcgcaacctttgggaaagatgtcagcgaccacccggctgaggagaggcctaccctgaaaggcaagaggactgtcgatgtgaccatctgcagccccaaggtcaacagcgttatccgggaggcaggcaatggctgtgaggcgattagccctgtcacctcccccctccacctcaagagctctctgcccaccaagccttccgtgtcttacaccattgccctggctcccccagcccgtgatctggagcagtatgtcaacaatgtcaacaatggccctactcgtccctctgaagctgagccccgtggagctgatagcgagaaagtcatgcatgaggtcagccccattctgaaggaaggtcgcaacaaagagtcccctggtgtgaagcgtctgaaggatatcgttctctaaaccagtctccaggaagaagagaaagaaaccacactggctagtgaagaagcaggagcttcttgttttaattgctcaccaatggttggttcttgagtggctatatttcagagcttttcctaaatgtattgtttataggtgattatcattctgtgacagtcccttgtttcaacaggcagcaggggtgttcagttggagcaaattagctttggcttgagttgttcatggggccttgatgttggggaaacagagacaaattcagttgtgaaaagtattatgtattaagtgtttgaatttatatatttttctatgtcaaaattataatataaattaccattgtttgtggaggattacatttaaaaaagcaaaaagtgaaaaaaaaaagctctggacacctttaataagctcgccactgttttttgtagtgtagacaagttaatggtcatttattgtgtactattcattgattcagtgatgtgaaattgagcccccaaaaggttgtttctgaagctcgagtacttcccaatgccgctactttgctgtggacacccctgctttaaaaacccttttgctagctgtgctattgttgtatttgatattgcaaattgctatgtgtgtggtgatggcaaaaggcttttaaaagttggtgttttctttttcttaaaaaaataataaaactacagacaaaaacaaagtgcaaacaactgagacagcaaatgaatgagcaacaccatgcatatagattgagtacttggagaatactcacgttttttaactcatgtagtgattgctcaccactttgcaaagtatttttcctgcctttcagtggtctgcccaggtccatgatagatcattgcagaaagtcatttttggataggctgctatctaatttgcagttgtcagaaatactgtgctgaaagttttatgacatccatcttttaaattttcaggccctgaacaggaaagttgctcctgaagttatgtttccaggcttagaaattccctctctccaatcatctaaaattgaagatgactgaatctattttaagatctaaattagcatctcttcagacacacacttcctgattcagtgtttcccaatcatgattagaattagactgcaaagcacgtcatgggctgggattgagaactccatgttgctctgtatcttaggcttatatacgtagggatagagtaagcagtacaaagtgtatattttggaaaagacaggtaacaggtaacagcatcgctaatccaattactgtgccttctaaacggagacactcagacacttgaactcatctttttatgactaatagttttttgattaaaaatgtgaacaagaaaatactaaaataaaaatcctttcgatttagccaactctttttgctgtaggctaggaatacaccctttttaaattaacacactgtagatcctttttttctgttttaacattcctctaactcccccatttatcttttgtctattaatattcactagccaacatagtatttttgcagcctaagagttcattatttaaaaataaactaaagaaatatgtcacctttgttctgccttggtcttaagagagttgtttctagagaaacaagttttatggttctgttttcatttgtttcattttttgaaattcaggaatacacagagagaaggcctagaggttagagcactagaatgcaaaagaggatttattttcttaagtttaggtagataagtcagctcttttgaatgttttacttatttttgcctgagttcctagctttacgcattactaggaatattttcttttacaggagggagaagggttttgagggagggggtgggtaaggcagtagggatggggttaggtaggggagaacatttctgaaaaagaacttataatgaagctacaaatccatccttatttcttattcagtgctgaatactacctcatgcaaaatattggtgtggctgcaaatttccctctgaagctgacacaattaaggatgaattaccataacatcttcatttttcctcatttcattgcctctcatacagttttctccctctgatttatttcattttggtagtggattttgaattaagtatttatttctctttgcaagtgactatttgattaacacattaaaaattttttaaaaatttcccctttaagttatgatggctgcctatagaatttagactgtttctcaccctgatccatcctgatattatgttattagctacgatttcaaggtcactttgaagtcagacttcacagttttctacaggtgtatttcttgctatgctcagtgggaaccagggagcagaaaagattgtggaaagtgggaacattaattgtcacgtggctgttgagccagagaggccactggctgccatgcctcttaccagccaagttttaaatggttagagtggcattggcattgattttgcttttctcttgggttttcttcatttcttttcataattcatcttcaagctatagatccatccttcttccctatccaaatactttgttctcagtgggcagtcagatttttttggcttccaaacctcactgagcatgttcagagaattcctctcattaaggaaatatttttccccacaattgtctgatgtatgagtcctctcagaagcacaagtgcatactaggaaggctttgtaaactggttttgtaggcaggctgtacctgcaaataggcattctgagcaaggatcctaaatttccctttggctcatgtcccccccgccccaccccaccttctcctttttggcatgtctggtgaaaagctacaaggttcacagggccaaatattctcccttttgttctctaaacatgttgcacacataaactcaagggagtgatttcggttcctaagtcctagggagttctattccatttattctgatgtcccttttaaggaggagttggtgttgaagtgtgacatgctttaatgataactgctttggcaattccccagacaggtatacttcttcatccaaaattgcacctaaggtgttcatttagacaaaattgttcgcttagtgatccactgatctctaatcagaaatatttttaaaaaatacaatttagatctctgaaaattggaaccactcaagagtatcatcttgatagtgttacttcagcatatgactgactgattttatgaagggagtttagctgacttttccctgtagccctatcatattaaaaacaaaaagtggtccacttgaagcagcaaggacaaagggcagtttagggagaggcagggtgaaggggatagctcgattgggcatccagagtggaaaaggattattattgtacataatagcagttctggctggaattccaatccactttctggggatcattttgatgttgaatgttcccccaaagcattctgacaagtttggtccacttggctctttaccccgggtaataagacccttattgactttgaaaaactggcataaatgagcttaagaaatccattgtatacagtcctagtgtttgccttcttggtaaaattacatttaaggatgtcatttcatgagtcaaattgtatctgctgacactgaagtgtattgagatgttgttctttagtttaagtatgtaacaaagtaatattcaaaggggatgtttgggggtggggctgggaccgggtggctttatattgataatgaaatattccagagcaaaacacattgtcctaatgaagttgttgcagctctcttcgttttcttgtgccgctggaattggcttgtgggtcacttgttgtgcaaaagtgaattaatttcaaataggaatcatattgcttttgtgaaacaaagaaaatttaccaccttgtctgatacatagattggaaggcgctcttggtaaagaataacccacaaacacctgatcttgattggaaagcattgtaggtcattagggaaaactgatgatgctgactgttgctccagctgtgttggcaattcaagatgaccttgttactaactgaaagttgctgtcaaccttagcaaacaaaccagctaacaccattacagcactggttaagtagatttttactggcactggctggcgttcagctgaggaaggctaggatacagactttaatgaccaagagccagactagctcgagctagaaatcagcaacaaatacctccttgtgctatttgaatgctaaggtattagttgcaataggcttacgccttcgctcctctagtgaggggaatgagcctgatgacactattactgtttacctgtcaaaccagggtggaaatttagagggatgcaagtacagtatgtctcattaagcagtctctgttgctgattatatgaagataaaattgttgtatatgctgatctgtatgttatgtacattttcacagtgattgaatcattgtaaaaagaaaaaagacaaaaaagaatcaccactgtctattttatgaagatgataaagcagctttattaaattattacagttatgtttcaaatggtgttatctgccacattgtttccttttatctggtggttctctgtttccccctttaaatgtgttttctctgcttcaaaaatttaatgcattttagtattaaaggctattatggaaaaag

SEQ ID NO: 41523 - DNA, 3306 bp, Artificial Sequence
  derived and/or modified sequence
atggagagcctgctgctgcccgtgctgctgctgctggccatcctgtggacccaggccgccgccctgatcaacctgaagtacagcgtggaggaggagcagagagccggcaccgtgatcgccaacgtggccaaggacgccagagaggccggcttcgccctggaccccagacaggccagcgccttcagagtggtgagcaacagcgccccccacctggtggacatcaaccccagcagcggcctgctggtgaccaagcagaagatcgacagagacctgctgtgcagacagagccccaagtgcatcatcagcctggaggtgatgagcagcagcatggagatctgcgtgatcaaggtggagatcaaggacctgaacgacaacgcccccagcttccccgccgcccagatcgagctggagatcagcgaggccgccagccccggcaccagaatccccctggacagcgcctacgaccccgacagcggcagcttcggcgtgcagacctacgagctgacccccaacgagctgttcggcctggagatcaagaccagaggcgacggcagcagattcgccgagctggtggtggagaagagcctggacagagagacccagagccactacagcttcagaatcaccgccctggacggcggcgacccccccagactgggcaccgtgggcctgagcatcaaggtgaccgacagcaacgacaacaaccccgtgttcagcgagagcacctacgccgtgagcgtgcccgagaacagcccccccaacacccccgtgatcagactgaacgccagcgaccccgacgagggcaccaacggccaggtggtgtacagcttctacggctacgtgaacgacagaaccagagagctgttccagatcgacccccacagcggcctggtgaccgtgaccggcgccctggactacgaggagggccacgtgtacgagctggacgtgcaggccaaggacctgggccccaacagcatccccgcccactgcaaggtgaccgtgagcgtgctggacaccaacgacaacccccccgtgatcaacctgctgagcgtgaacagcgagctggtggaggtgagcgagagcgccccccccggctacgtgatcgccctggtgagagtgagcgacagagacagcggcctgaacggcagagtgcagtgcagactgctgggcaacgtgcccttcagactgcaggagtacgagagcttcagcaccatcctggtggacggcagactggacagagagcagcacgaccagtacaacctgaccatccaggccagagacggcggcgtgcccatgctgcagagcgccaagagcttcaccgtgctgatcaccgacgagaacgacaaccacccccacttcagcaagccctactaccaggtgatcgtgcaggagaacaacacccccggcgcctacctgctgagcgtgagcgccagagaccccgacctgggcctgaacggcagcgtgagctaccagatcgtgcccagccaggtgagagacatgcccgtgttcacctacgtgagcatcaaccccaacagcggcgacatctacgccctgagaagcttcaaccacgagcagaccaaggccttcgagttcaaggtgctggccaaggacggcggcctgcccagcctgcagagcaacgccaccgtgagagtgatcatcctggacgtgaacgacaacacccccgtgatcaccgccccccccctgatcaacggcaccgccgaggtgtacatccccagaaacagcggcatcggctacctggtgaccgtggtgaaggccgaggactacgacgagggcgagaacggcagagtgacctacgacatgaccgagggcgacagaggcttcttcgagatcgaccaggtgaacggcgaggtgagaaccaccagaaccttcggcgagagcagcaagagcagctacgagctgatcgtggtggcccacgaccacggcaagaccagcctgagcgccagcgccctggtgctgatctacctgagccccgccctggacgcccaggagagcatgggcagcgtgaacctgagcctgatcttcatcatcgccctgggcagcatcgccggcatcctgttcgtgaccatgatcttcgtggccatcaagtgcaagagagacaacaaggagatcagaacctacaactgcagaatcgccgagtacagctacggccaccagaagaagagcagcaagaagaagaagatcagcaagaacgacatcagactggtgcccagagacgtggaggagaccgacaagatgaacgtggtgagctgcagcagcctgaccagcagcctgaactacttcgactaccaccagcagaccctgcccctgggctgcagaagaagcgagagcaccttcctgaacgtggagaaccagaacaccagaaacaccagcgccaaccacatctaccaccacagcttcaacagccagggcccccagcagcccgacctgatcatcaacggcgtgcccctgcccgagaccgagaactacagcttcgacagcaactacgtgaacagcagagcccacctgatcaagagcagcagcaccttcaaggacctggagggcaacagcctgaaggacagcggccacgaggagagcgaccagaccgacagcgagcacgacgtgcagagaagcctgtactgcgacaccgccgtgaacgacgtgctgaacaccagcgtgaccagcatgggcagccagatgcccgaccacgaccagaacgagggcttccactgcagagaggagtgcagaatcctgggccacagcgacagatgctggatgcccagaaaccccatgcccatcagaagcaagagccccgagcacgtgagaaacatcatcgccctgagcatcgaggccaccgccgccgacgtggaggcctacgacgactgcggccccaccaagagaaccttcgccaccttcggcaaggacgtgagcgaccaccccgccgaggagagacccaccctgaagggcaagagaaccgtggacgtgaccatctgcagccccaaggtgaacagcgtgatcagagaggccggcaacggctgcgaggccatcagccccgtgaccagccccctgcacctgaagagcagcctgcccaccaagcccagcgtgagctacaccatcgccctggccccccccgccagagacctggagcagtacgtgaacaacgtgaacaacggccccaccagacccagcgaggccgagcccagaggcgccgacagcgagaaggtgatgcacgaggtgagccccatcctgaaggagggcagaaacaaggagagccccggcgtgaagagactgaaggacatcgtgctgtag

SEQ ID NO: 41524 - protein, 1465 aa, Artificial Sequence
  derived and/or modified sequence
MRGLGTCLATLAGLLLTAAGETFSGGCLFDEPYSTCGYSQSEGDDFNWEQVNTLTKPTSDPWMPSGSFMLVNASGRPEGQRAHLLLPQLKENDTHCIDFHYFVSSKSNSPPGLLNVYVKVNNGPLGNPIWNISGDPTRTWNRAELAISTFWPNFYQVIFEVITSGHQGYLAIDEVKVLGHPCTRTPHFLRIQNVEVNAGQFATFQCSAIGRTVAGDRLWLQGIDVRDAPLKEIKVTSSRRFIASFNVVNTTKRDAGKYRCMIRTEGGVGISNYAELVVKEPPVPIAPPQLASVGATYLWIQLNANSINGDGPIVAREVEYCTASGSWNDRQPVDSTSYKIGHLDPDTEYEISVLLTRPGEGGTGSPGPALRTRTKCADPMRGPRKLEVVEVKSRQITIRWEPFGYNVTRCHSYNLTVHYCYQVGGQEQVREEVSWDTENSHPQHTITNLSPYTNVSVKLILMNPEGRKESQELIVQTDEDLPGAVPTESIQGSTFEEKIFLQWREPTQTYGVITLYEITYKAVSSFDPEIDLSNQSGRVSKLGNETHFLFFGLYPGTTYSFTIRASTAKGFGPPATNQFTTKISAPSMPAYELETPLNQTDNTVTVMLKPAHSRGAPVSVYQIVVEEERPRRTKKTTEILKCYPVPIHFQNASLLNSQYYFAAEFPADSLQAAQPFTIGDNKTYNGYWNTPLLPYKSYRIYFQAASRANGETKIDCVQVATKGAATPKPVPEPEKQTDHTVKIAGVIAGILLFVIIFLGVVLVMKKRKLAKKRKETMSSTRQEMTVMVNSMDKSYAEQGTNCDEAFSFMDTHNLNGRSVSSPSSFTMKTNTLSTSVPNSYYPDPFVPTAILVPINDETHTMASDTSSLVQSHTYKKREPADVPYQTGQLHPAIRVADLLQHITQMKCAEGYGFKEEYESFFEGQSAPWDSAKKDENRMKNRYGNIIAYDHSRVRLQTIEGDTNSDYINGNYIDGYHRPNHYIATQGPMQETIYDFWRMVWHENTASIIMVTNLVEVGRVKCCKYWPDDTEIYKDIKVTLIETELLAEYVIRTFAVEKRGVHEIREIRQFHFTGWPDHGVPYHATGLLGFVRQVKSKSPPSAGPLVVHCSAGAGRTGCFIVIDIMLDMAEREGVVDIYNCVRELRSRRVNMVQTEEQYVFIHDAILEACLCGDTSVPASQVRSLYYDMNKLDPQTNSSQIKEEFRTLNMVTPTLRVEDCSIALLPRNHEKNRCMDILPPDRCLPFLITIDGESSNYINAALMDSYKQPSAFIVTQHPLPNTVKDFWRLVLDYHCTSVVMLNDVDPAQLCPQYWPENGVHRHGPIQVEFVSADLEEDIISRIFRIYNAARPQDGYRMVQQFQFLGWPMYRDTPVSKRSFLKLIRQVDKWQEEYNGGEGRTVVHCLNGGGRSGTFCAISIVCEMLRHQRTVDVFHAVKTLRNNKPNMVDLLDQYKFCYEVALEYLNSG

SEQ ID NO: 41525 - protein, 1466 aa, Artificial Sequence
  derived and/or modified sequence
MRGLGTCLATLAGLLLTAAGETFSGGCLFDEPYSTCGYSQSEGDDFNWEQVNTLTKPTSDPWMPSGSFMLVNASGRPEGQRAHLLLPQLKENDTHCIDFHYFVSSKSNSPPGLLNVYVKVNNGPLGNPIWNISGDPTRTWNRAELAISTFWPNFYQVIFEVITSGHQGYLAIDEVKVLGHPCTRTPHFLRIQNVEVNAGQFATFQCSAIGRTVAGDRLWLQGIDVRDAPLKEIKVTSSRRFIASFNVVNTTKRDAGKYRCMIRTEGGVGISNYAELVVKEPPVPIAPPQLASVGATYLWIQLNANSINGDGPIVAREVEYCTASGSWNDRQPVDSTSYKIGHLDPDTEYEISVLLTRPGEGGTGSPGPALRTRTKCADPMRGPRKLEVVEVKSRQITIRWEPFGYNVTRCHSYNLTVHYCYQVGGQEQVREEVSWDTENSHPQHTITNLSPYTNVSVKLILMNPEGRKESQELIVQTDEDLPGAVPTESIQGSTFEEKIFLQWREPTQTYGVITLYEITYKAVSSFDPEIDLSNQSGRVSKLGNETHFLFFGLYPGTTYSFTIRASTAKGFGPPATNQFTTKISAPSMPAYELETPLNQTDNTVTVMLKPAHSRGAPVSVYQIVVEEERPRRTKKTTEILKCYPVPIHFQNASLLNSQYYFAAEFPADSLQAAQPFTIGDNKTYNGYWNTPLLPYKSYRIYFQAASRANGETKIDCVQVATKGAATPKPVPEPEKQTDHTVKIAGVIAGILLFVIIFLGVVLVMKKRKLAKKRKETMSSTRQEMTVMVNSMDKSYAEQGTNCDEAFSFMDTHNLNGRSVSSPSSFTMKTNTLSTSVPNSYYPDPFVPTAILDFSLNNETHTMASDTSSLVQSHTYKKREPADVPYQTGQLHPAIRVADLLQHITQMKCAEGYGFKEEYESFFEGQSAPWDSAKKDENRMKNRYGNIIAYDHSRVRLQTIEGDTNSDYINGNYIDGYHRPNHYIATQGPMQETIYDFWRMVWHENTASIIMVTNLVEVGRVKCCKYWPDDTEIYKDIKVTLIETELLAEYVIRTFAVEKRGVHEIREIRQFHFTGWPDHGVPYHATGLLGFVRQVKSKSPPSAGPLVVHCSAGAGRTGCFIVIDIMLDMAEREGVVDIYNCVRELRSRRVNMVQTEEQYVFIHDAILEACLCGDTSVPASQVRSLYYDMNKLDPQTNSSQIKEEFRTLNMVTPTLRVEDCSIALLPRNHEKNRCMDILPPDRCLPFLITIDGESSNYINAALMDSYKQPSAFIVTQHPLPNTVKDFWRLVLDYHCTSVVMLNDVDPAQLCPQYWPENGVHRHGPIQVEFVSADLEEDIISRIFRIYNAARPQDGYRMVQQFQFLGWPMYRDTPVSKRSFLKLIRQVDKWQEEYNGGEGRTVVHCLNGGGRSGTFCAISIVCEMLRHQRTVDVFHAVKTLRNNKPNMVDLLDQYKFCYEVALEYLNSG

SEQ ID NO: 41526 - DNA, 4398 bp, Artificial Sequence
  derived and/or modified sequence
atgaggggattaggcacatgtttggccacgctggcaggactcctgctgaccgcagcaggagagaccttctcaggtggctgcctgttcgatgaaccttattcaacctgcggatattcccagagtgagggggacgattttaattgggagcaggtgaatactctgaccaagccgacatcagacccctggatgccctcgggatccttcatgctggtgaatgcctctggcagacccgaggggcaacgcgcccaccttctcctccctcagcttaaggaaaatgatacccactgtatcgatttccactacttcgtctcatctaaaagcaatagcccgcctggcctgctgaacgtttatgttaaggttaataacggacctcttggaaaccccatctggaatatctcgggggaccccacaagaacttggaacagagctgagcttgctatcagcacgttctggccaaacttttaccaggtgatttttgaggtgatcacctctggccaccagggctacctggccatagacgaggtgaaggtcttaggtcacccatgcacacgaacgccccatttcctgcgtattcaaaacgtggaagttaatgccgggcaatttgcaacttttcaatgttccgctattggccgcacagttgccggcgatagattgtggctgcagggtatagacgtgcgtgacgccccactaaaggagattaaggtcacctcttcaagaaggtttatcgcttcattcaatgtggtgaataccacaaaacgagatgcgggtaagtataggtgtatgattcgtaccgagggaggagtgggcatttccaattatgcagaactggtcgttaaggagccacccgtccctattgcaccaccccagctcgctagcgtcggcgccacgtatctgtggattcagttaaatgctaattcaatcaacggcgacggtcccattgtcgccagagaggtggaatactgtacagcgtccggctcgtggaatgatcggcagcctgttgactccactagttacaagatcggtcatctggaccctgataccgaatatgagatatcagtactattgactcggccgggcgagggggggacgggaagcccaggccccgccctaagaaccagaactaaatgcgctgaccctatgagagggcctcgcaaactggaggtggtggaagtcaagagcaggcagattaccataagatgggagccgtttggctataacgtcacccggtgtcatagctacaatctcaccgttcactactgctaccaagtaggcggtcaggagcaggtgagggaggaagtgtcttgggacacagagaactcccatcctcagcataccattaccaacttatccccgtacaccaacgtctccgtcaagctgatcctgatgaatcccgaaggtcggaaagaatctcaggaactgattgtgcagaccgacgaggacctcccgggagctgttccaacagaatccatacaggggagtacttttgaagagaagatcttcctgcaatggcgggagccaactcagacatacggtgtcattaccctgtatgaaatcacctacaaagctgtatcgagtttcgacccagagattgatttatccaaccaaagcggccgcgtaagtaagctgggtaacgagacccactttctgttcttcgggttgtaccccggaaccacctacagcttcaccattagagccagtaccgcgaaaggtttcgggccaccggcaacaaatcagtttacaacaaagatttctgcccccagcatgccagcctacgagctggaaacaccgctcaatcagaccgacaacacggttacagtgatgctgaagcctgcacattccaggggtgcacctgtgtctgtgtatcaaatagtcgtcgaggaagagagaccccgtcggactaagaagactacggagattttgaaatgctaccctgtaccaattcacttccagaacgcatctctgttgaattcccagtattatttcgctgcagaattcccagcggactctctccaggcggcgcaacccttcaccatcggcgataataagacatataatggctattggaacacccctctgctcccttataagagctatcggatttacttccaggccgccagcagagctaacggtgagaccaaaatagactgcgtgcaagtggcaaccaagggcgctgctactcccaaacccgttcccgagccagagaagcaaactgatcatactgtaaaaatcgcgggggttatcgccgggattcttctgttcgtcatcatcttcttaggcgtggttctggtcatgaaaaagcggaagcttgctaaaaagagaaaagaaaccatgtcttcaacaagacaggaaatgacagtgatggtcaattctatggataaaagttacgccgaacagggaacaaattgtgatgaagcctttagttttatggacacacacaatctcaacgggcgatccgtgtcatccccctcctcgttcaccatgaagacaaacacgctgtccacctctgtgcccaactcctattaccccgatccatttgtccccactgcaattctggttcctatcaatgacgagacccacacgatggcatcagacactagttccctggtccaatcacatacctacaaaaaaagggaacccgctgatgtgccataccaaacaggccagctgcaccccgccattagagttgccgatctcttacagcacatcactcagatgaaatgcgcagagggttatggctttaaggaagagtatgaatctttttttgaaggacagtcagcgccttgggatagtgccaagaaagacgagaatcgcatgaaaaacaggtatggcaacatcatcgcgtacgaccatagtagagttcggctgcagaccatcgagggcgatacaaacagcgactacatcaatggtaattatattgacggatatcatcggccaaaccactacattgctacacaaggtcccatgcaggagaccatttatgacttttggaggatggtgtggcatgaaaataccgcctccatcatcatggtaaccaacctggtggaggtgggtagggtaaaatgttgcaaatattggcctgacgacactgagatctataaggatatcaaagtgacgcttatcgagactgagctgctggcagagtacgtgatccggaccttcgccgtggagaagcgcggggtacacgaaatccgcgaaatccgccagtttcacttcacagggtggcctgaccatggagtgccctatcatgcaacagggctcttgggcttcgtgcgtcaggttaagtctaagtccccaccgagtgcaggacctcttgtggtgcattgttcagcgggagctggacggactggttgcttcatcgtgattgacatcatgcttgatatggccgagagagaaggtgtagtggacatctataattgcgtaagggagctgcgctccaggcgggtaaatatggtccagactgaagagcagtacgtgttcattcacgacgcaatccttgaggcctgtctctgcggggacacaagcgtcccagcctcccaggtgcggtccctgtactacgacatgaataaactcgatcctcaaaccaactctagtcagatcaaagaggagtttcggacactcaacatggtgactcctactctccgagtggaagactgctcgatagcactgctaccccgcaatcatgagaaaaatcggtgtatggacatcctgcccccagatcggtgcctgcctttccttatcaccatcgatggcgaaagctctaactacatcaatgccgccctcatggactcctataaacagccatcagctttcattgtcactcagcatcctttgcctaacactgtgaaggatttctggcgcttggttctggattaccattgcacctcggtcgtgatgttgaatgatgttgacccggcacagctgtgtccacagtactggcctgagaacggggtccatcggcatggacccattcaagtggagtttgtgagtgccgatttagaggaagatattatatcccggatttttcgtatttataacgctgctcggccgcaagacgggtacaggatggtgcagcagtttcagtttctaggctggccgatgtacagggacacacctgtttctaagaggagctttctcaaactaatcaggcaagtggacaaatggcaagaagaatataatggtggtgaaggcaggaccgttgtgcactgtctcaacgggggcgggagaagtggtacattttgcgcaataagcattgtttgtgagatgctgcgtcaccagcgcaccgtggacgtgtttcacgctgtgaagacactgcgaaataataagcccaacatggtggaccttctcgaccaatacaagttttgctatgaggtagccctcgaatacctcaatagtgggtag

SEQ ID NO: 41527 - DNA, 4401 bp, Artificial Sequence
  derived and/or modified sequence
atgcgtggactcgggacatgcctcgccacgttagccggcctgctgttgaccgccgcaggagagaccttctcaggcggatgtctgttcgacgaaccatatagtacttgtgggtactcacagagtgaaggcgacgactttaattgggagcaggtaaacaccctcacaaagcccacttccgacccctggatgccttctggctcttttatgctcgtcaatgcttcagggaggcctgagggccagagggctcacttgcttttgcctcaactgaaggaaaatgatacccactgcatcgacttccattacttcgtgagcagtaagtccaatagcccaccagggctgttgaacgtttatgtgaaagttaacaatggaccccttggcaatccaatctggaatatcagcggcgaccctacccgtacgtggaatagagcagaactggcaatttcgacattttggcctaacttctatcaggtgattttcgaggtaatcacatcgggccaccaagggtatcttgctatcgatgaggttaaagtgctcgggcacccttgtaccagaacacctcatttcttacgcatacagaatgtcgaggtcaacgccggacagttcgccacctttcagtgttctgccatcgggcggaccgtggccggtgaccgcctgtggttacagggcattgatgtcagagacgcacctttgaaagaaattaaggtgacatccagccggcgcttcatcgcgtctttcaatgtggtgaatacaactaaacgggacgccggcaaatatcggtgcatgattcgtactgaagggggggtggggatctctaattacgcggaactcgttgtcaaggagccccccgtaccaatagcaccgcctcagcttgcttcagtcggagccacttatctttggatccagctgaacgccaatagcatcaatggtgacggacccatagtcgctagagaggtggagtactgtactgctagtggaagctggaatgataggcagcctgtggattctaccagctacaagatcggccatttggaccccgacaccgagtatgagattagtgtgcttctgaccagacctggagaaggaggcaccgggagcccaggaccggcactccggaccagaactaagtgcgctgatcccatgagggggccgagaaagcttgaggttgtggaggttaaatctcgtcagatcaccatccgctgggagcctttcggctacaatgtgactaggtgccacagttataaccttactgttcactattgctatcaagtcggaggccaggaacaggttagggaagaagtaagttgggatactgagaactcccacccacagcatacaatcacaaacctctctccttacacaaacgtatccgttaaactcatcctcatgaaccctgaaggaagaaaagagagccaggaactaatcgtacagacagatgaggacttgccgggcgcagttcctactgagagcattcaaggcagcacgttcgaggaaaagattttcctgcagtggcgcgagccgacacagacctatggagttattactctgtacgagattacgtacaaagccgtgtcctcctttgacccggaaatcgatcttagcaatcagtctggaagagtttcaaaacttgggaacgagacgcacttcctatttttcggtctgtatcccggaacaacatatagcttcacaatcagggcaagtacagccaagggatttgggccccccgctaccaaccagtttacaaccaagatctctgctccctctatgccggcctatgaactggagacccccctgaatcaaacagataacacggtgacagtgatgctgaaaccagcccacagtagaggcgccccagtctcggtttaccagattgtcgttgaggaggagcgccctcgacggactaaaaagactaccgaaattctcaaatgctaccctgtgcctattcacttccaaaatgcctcacttttgaactctcagtactattttgctgctgagtttccggcggattctctgcaggctgcacaacccttcactatcggcgataacaaaacttacaacggttactggaacacacctctgcttccctataaatcctatcgcatttactttcaggctgcctcccgcgcaaacggggagactaaaatcgactgcgtgcaggtagcgacaaaaggagccgcgacacctaagcccgtgccagagcctgaaaagcagacagatcacactgtgaagattgctggtgtcatcgctggaatcttgctgttcgtgatcatcttcttaggcgttgtgctggtcatgaaaaagcggaagttagccaagaagcgcaaagaaacaatgagcagtacccgacaggagatgactgtcatggttaactcaatggataagagttacgcagagcagggaactaattgtgacgaggcattctcatttatggacacacataaccttaacgggagatctgtcagctctccatccagttttacgatgaagaccaatacgttgtccacctccgttcctaatagctattatccggacccattcgtgccaactgcgatactcgacttttctctgaacaatgagacccataccatggcttctgacacttctagcctggtccagtctcacacctacaaaaaacgggaacccgccgatgttccctaccagactgggcagctacaccccgcaatcagagtggccgacttgttgcaacacattactcagatgaaatgcgccgagggctacggcttcaaagaggaatatgagtcattctttgagggtcagagcgccccctgggatagcgctaaaaaggacgaaaacaggatgaaaaatcgctatggcaatattattgcctacgatcactcccgggtgagactgcagacgattgaaggcgataccaatagcgactacatcaacggcaactacattgacggatatcaccggcccaaccattacattgctactcagggacccatgcaagaaacaatatacgacttctggaggatggtttggcatgagaatacagcgtccattattatggtgacaaacctggtcgaggtcggcagggtgaaatgctgcaagtattggcccgatgataccgaaatctataaagatattaaggtgacgctcatcgagacagagctgttagcggaatatgtgattcgcaccttcgccgtggagaaacgcggagtccacgaaatccgagaaatacgacagttccacttcacggggtggcctgatcacggagtgccctaccatgctacaggactgctagggtttgtgagacaggtaaagtccaaatcacctccttccgccggaccgttggtcgtgcactgtagcgcgggcgccgggagaactggctgcttcatagtgatcgacattatgttagacatggcagagcgggagggtgtcgtggacatctataattgtgtgcgcgagttaagaagtcgacgggtgaacatggtgcagacagaagagcaatatgtgttcattcacgatgccatattggaggcttgcctttgtggtgacacatctgtgcctgctagtcaggttaggtcactctattacgacatgaataagctggacccccagactaactcaagccaaattaaggaggagttcaggacgctgaacatggtcaccccaacactgcgggtggaggattgctctattgctcttctcccacggaatcatgagaagaacaggtgcatggatatcctgcccccagacagatgcctccccttcttgatcaccatcgatggggagtcctcaaactacattaacgcagccctcatggactcttacaaacaacctagtgctttcatagtcacacagcatcccctgcccaatacagtgaaagatttctggcggctagtgctggattatcattgtaccagcgtcgtgatgctaaatgacgtcgaccccgcacagctgtgcccccagtactggccggaaaatggagtgcaccgtcatgggcctatccaggtcgagtttgtatccgccgacctggaagaggacattattagtaggattttcagaatttataatgctgctcgccctcaggatgggtaccgcatggtacagcagttccaattcctggggtggccgatgtaccgagacacacccgtgtcgaaacgaagtttcttgaagcttatacggcaggtggacaaatggcaggaagagtataacggcggtgagggacggaccgtcgtgcattgtcttaatggtggaggccggtccggcaccttctgtgccatctccattgtgtgtgagatgctgcgtcatcagagaaccgtcgacgtcttccatgccgtgaagacactgagaaataataaacctaatatggtggacttattggatcaatacaagttttgctatgaggttgcgctggagtatctgaattccgggtag

SEQ ID NO: 41528 - DNA, 4398 bp, Artificial Sequence
  derived and/or modified sequence
atgaggggcctgggcacctgcctggccaccctggccggcctgctgctgacagctgctggggagaccttcagcggcggctgcctgtttgatgagccctacagcacctgtggctacagccagagtgaaggagatgacttcaactgggagcaggtgaacaccctgaccaagcccaccagtgacccctggatgcccagcggcagcttcatgctggtgaatgccagcggccggcctgagggccagagggcccacctgctgctgccccagctgaaggaaaatgacacccactgcatcgacttccactactttgtgagcagcaagagcaacagccccccaggcctgctgaatgtgtatgtgaaggtgaacaacggccccctgggcaaccccatctggaacatcagcggggaccccaccaggacctggaacagagctgagctggccatcagcaccttctggcccaacttctaccaggtgatctttgaagtcatcaccagcggccaccagggctacctggccattgatgaggtgaaggtgctgggccacccctgcaccaggaccccccacttcctgcgcatccagaatgtggaggtgaatgccggccagtttgccaccttccagtgcagcgccatcggccgcacagtggccggggaccggctgtggctgcagggcattgatgtgagagatgcccccctgaaggagatcaaggtgaccagcagccgccgcttcatcgccagcttcaacgtggtgaacaccaccaagagagatgctgggaagtaccgctgcatgatcagaacagagggcggcgtgggcatcagcaactatgcagagctggtggtgaaggagccccctgtgcccatcgccccaccccagctggcctctgtgggcgccacctacctgtggatccagctgaatgccaacagcatcaatggagatggccccatcgtggcccgggaggtggagtactgcacagccagcggctcctggaatgaccggcagcctgtggacagcaccagctacaagattggccacctggaccctgacacagaatatgagatctctgtgctgctgaccaggcctggagagggcggcaccggcagccctggccctgccctgcggaccaggaccaagtgtgccgaccccatgaggggccccaggaagctggaggtggtggaggtgaagagccggcagatcaccatccgctgggagcccttcggctacaacgtgacccgctgccacagctacaacctgactgtgcactactgctaccaggtgggcggccaggagcaggtgcgggaggaggtgtcctgggacacagagaacagccacccccagcacaccatcaccaacctgagcccctacaccaacgtgtctgtgaagctgatcctgatgaaccctgagggcaggaaggagagccaggagctgattgtgcagacagatgaggacctgcccggggctgtgcccacagagagcatccagggcagcacctttgaggagaagatcttcctgcagtggagggagcccacccagacctacggcgtcatcaccctgtatgagatcacctacaaggctgtgtcctcctttgatcctgagattgacctgagcaaccagagcggccgggtgtccaagctgggcaatgagacccacttcctgttcttcggcctgtacccaggcaccacctacagcttcaccatccgggccagcacagccaagggctttggacctccagccaccaaccagttcaccaccaagatcagcgcccccagcatgcctgcctatgagctggagacccccctgaaccagacagacaacacagtgacagtgatgctgaagccagcccacagcagaggagcccctgtgtctgtgtaccagatcgtggtggaggaggagcggcccaggaggaccaagaagaccacagagatcctgaagtgctaccctgtgcccatccacttccagaatgccagcctgctgaacagccagtactactttgctgctgagttccctgctgacagcctgcaggccgcccagcccttcaccatcggggacaacaagacctacaacggctactggaacacccccctgctgccctacaagagctaccgcatctacttccaggccgccagccgggccaatggagagaccaagattgactgtgtgcaggtggccaccaagggggccgccacccccaagcctgtgcctgagcctgagaagcagacagaccacacagtgaagattgctggggtgattgctggcatcctgctgtttgtgatcatcttcctgggcgtggtgctggtgatgaagaagaggaagctggccaagaagaggaaggagaccatgagcagcacccggcaggagatgacagtgatggtgaacagcatggacaagagctatgcagagcagggcaccaactgtgatgaggccttctccttcatggacacccacaacctgaatggccgctctgtgagcagccccagcagcttcaccatgaagaccaacaccctgagcacctctgtgcccaacagctactacccagacccctttgtgcccacagccatcctggtgcccatcaatgatgagacccacaccatggccagtgacaccagcagcctggtgcagagccacacctacaagaagcgggagccagcagatgtgccctaccagacaggccagctgcacccagccatccgggtggccgacctgctgcagcacatcacccagatgaagtgtgccgagggctacggcttcaaggaggagtatgagagcttctttgagggccagagcgccccctgggacagcgccaagaaggatgaaaataggatgaagaacagatatggcaacatcatcgcctatgaccacagccgggtgcggctgcagaccatcgagggggacaccaacagcgactacatcaatggaaactacattgatggctaccaccggcccaaccactacatcgccacccagggccccatgcaggagaccatctatgacttctggaggatggtgtggcatgagaacacagccagcatcatcatggtgaccaacctggtggaggtgggccgggtgaagtgctgcaagtactggccagatgacacagagatctacaaggacatcaaggtgaccctcatcgagacagagctgctggccgagtatgtgatccgcacctttgctgtggagaagaggggcgtgcatgagatccgggagatccggcagttccacttcaccggctggccagaccatggagtgccctaccacgccaccggcctgctgggctttgtgcggcaggtgaagagcaagagcccccccagcgctggccccctggtggtgcactgcagcgctggggccggccgcacaggctgcttcatcgtgattgacatcatgctggacatggccgagcgggagggcgtggtggacatctacaactgtgtgcgggagctgcggagccggcgggtgaacatggtgcagacagaggagcagtatgtgttcatccatgatgccatcctggaggcctgcctgtgtggggacacctctgtgcctgccagccaggtgcgcagcctgtactatgacatgaacaagctggacccccagaccaacagcagccagatcaaggaggagttccgcaccctgaacatggtgacccccaccctgcgggtggaggactgcagcatcgccctgctgcccagaaatcatgagaagaaccgctgcatggacatcctgcccccagaccgctgcctgcccttcctgatcaccattgatggagagagcagcaactacatcaatgctgccctgatggacagctacaagcagcccagcgccttcatcgtgacccagcaccccctgcccaacacagtgaaggacttctggaggctggtgctggactaccactgcacctctgtggtgatgctgaatgatgtggaccctgcccagctgtgcccccagtactggccagaaaatggagtgcaccgccacggccccatccaggtggagtttgtgtctgctgacctggaggaggacatcatcagccgcatcttccgcatctacaatgctgcccggccccaggacggctacaggatggtgcagcagttccagttcctgggctggcccatgtacagagacacccctgtgtccaagaggagcttcctgaagctgatccggcaggtggacaagtggcaggaggagtacaacggcggggagggccgcacagtggtgcactgcctgaatggaggcggccgcagcggcaccttctgtgccatcagcatcgtgtgtgagatgctgcggcaccagaggacagtggatgtgttccacgctgtgaagaccctgaggaacaacaagcccaacatggtggacctgctggaccagtacaagttctgctatgaggtggccctggagtacctgaacagcggctag

SEQ ID NO: 41529 - DNA, 4401 bp, Artificial Sequence
  derived and/or modified sequence
atgaggggcctgggcacctgcctggccaccctggccggcctgctgctgacagctgctggggagaccttcagcggcggctgcctgtttgatgagccctacagcacctgtggctacagccagagtgaaggagatgacttcaactgggagcaggtgaacaccctgaccaagcccaccagtgacccctggatgcccagcggcagcttcatgctggtgaatgccagcggccggcctgagggccagagggcccacctgctgctgccccagctgaaggaaaatgacacccactgcatcgacttccactactttgtgagcagcaagagcaacagccccccaggcctgctgaatgtgtatgtgaaggtgaacaacggccccctgggcaaccccatctggaacatcagcggggaccccaccaggacctggaacagagctgagctggccatcagcaccttctggcccaacttctaccaggtgatctttgaagtcatcaccagcggccaccagggctacctggccattgatgaggtgaaggtgctgggccacccctgcaccaggaccccccacttcctgcgcatccagaatgtggaggtgaatgccggccagtttgccaccttccagtgcagcgccatcggccgcacagtggccggggaccggctgtggctgcagggcattgatgtgagagatgcccccctgaaggagatcaaggtgaccagcagccgccgcttcatcgccagcttcaacgtggtgaacaccaccaagagagatgctgggaagtaccgctgcatgatcagaacagagggcggcgtgggcatcagcaactatgcagagctggtggtgaaggagccccctgtgcccatcgccccaccccagctggcctctgtgggcgccacctacctgtggatccagctgaatgccaacagcatcaatggagatggccccatcgtggcccgggaggtggagtactgcacagccagcggctcctggaatgaccggcagcctgtggacagcaccagctacaagattggccacctggaccctgacacagaatatgagatctctgtgctgctgaccaggcctggagagggcggcaccggcagccctggccctgccctgcggaccaggaccaagtgtgccgaccccatgaggggccccaggaagctggaggtggtggaggtgaagagccggcagatcaccatccgctgggagcccttcggctacaacgtgacccgctgccacagctacaacctgactgtgcactactgctaccaggtgggcggccaggagcaggtgcgggaggaggtgtcctgggacacagagaacagccacccccagcacaccatcaccaacctgagcccctacaccaacgtgtctgtgaagctgatcctgatgaaccctgagggcaggaaggagagccaggagctgattgtgcagacagatgaggacctgcccggggctgtgcccacagagagcatccagggcagcacctttgaggagaagatcttcctgcagtggagggagcccacccagacctacggcgtcatcaccctgtatgagatcacctacaaggctgtgtcctcctttgatcctgagattgacctgagcaaccagagcggccgggtgtccaagctgggcaatgagacccacttcctgttcttcggcctgtacccaggcaccacctacagcttcaccatccgggccagcacagccaagggctttggacctccagccaccaaccagttcaccaccaagatcagcgcccccagcatgcctgcctatgagctggagacccccctgaaccagacagacaacacagtgacagtgatgctgaagccagcccacagcagaggagcccctgtgtctgtgtaccagatcgtggtggaggaggagcggcccaggaggaccaagaagaccacagagatcctgaagtgctaccctgtgcccatccacttccagaatgccagcctgctgaacagccagtactactttgctgctgagttccctgctgacagcctgcaggccgcccagcccttcaccatcggggacaacaagacctacaacggctactggaacacccccctgctgccctacaagagctaccgcatctacttccaggccgccagccgggccaatggagagaccaagattgactgtgtgcaggtggccaccaagggggccgccacccccaagcctgtgcctgagcctgagaagcagacagaccacacagtgaagattgctggggtgattgctggcatcctgctgtttgtgatcatcttcctgggcgtggtgctggtgatgaagaagaggaagctggccaagaagaggaaggagaccatgagcagcacccggcaggagatgacagtgatggtgaacagcatggacaagagctatgcagagcagggcaccaactgtgatgaggccttctccttcatggacacccacaacctgaatggccgctctgtgagcagccccagcagcttcaccatgaagaccaacaccctgagcacctctgtgcccaacagctactacccagacccctttgtgcccacagccatcctggacttcagcctgaacaatgagacccacaccatggccagtgacaccagcagcctggtgcagagccacacctacaagaagcgggagccagcagatgtgccctaccagacaggccagctgcacccagccatccgggtggccgacctgctgcagcacatcacccagatgaagtgtgccgagggctacggcttcaaggaggagtatgagagcttctttgagggccagagcgccccctgggacagcgccaagaaggatgagaacaggatgaagaacagatatggcaacatcatcgcctatgaccacagccgggtgcggctgcagaccattgaaggagacaccaacagcgactacatcaatggaaactacattgatggctaccaccggcccaaccactacatcgccacccagggccccatgcaggagaccatctatgacttctggaggatggtgtggcatgaaaatacagccagcatcatcatggtgaccaacctggtggaggtgggccgggtgaagtgctgcaagtactggccagatgacacagagatctacaaggacatcaaggtgaccctgattgaaacagagctgctggccgagtatgtgatccgcacctttgctgtggagaagaggggcgtgcatgagatccgggagatccggcagttccacttcaccggctggccagaccacggcgtgccctaccacgccaccggcctgctgggctttgtgcggcaggtgaagagcaagagccccccatctgctggccccctggtggtgcactgcagcgctggagctggccgcacaggctgcttcatcgtcatcgacatcatgctggacatggccgagcgggagggcgtggtggacatctacaactgtgtgcgggagctgcggagcagaagagtgaacatggtgcagacagaggagcagtatgtgttcatccatgatgccatcctggaggcctgcctgtgtggggacacctctgtgcctgccagccaggtgcgcagcctgtactatgacatgaacaagctggacccccagaccaacagcagccagatcaaggaggagttccgcaccctgaacatggtgacccccaccctgcgggtggaggactgcagcatcgccctgctgcccaggaaccacgagaagaaccgctgcatggacatcctgcccccagaccgctgcctgcccttcctgatcaccattgatggagagagcagcaactacatcaatgctgccctgatggacagctacaagcagcccagcgccttcatcgtgacccagcaccccctgcccaacacagtgaaggacttctggaggctggtgctggactaccactgcacctctgtggtgatgctgaatgatgtggaccctgcccagctgtgcccccagtactggccagaaaatggagtgcacagacatggccccatccaggtggagtttgtgtctgctgacctggaggaggacatcatcagccgcatcttccgcatctacaatgctgcccggccccaggacggctacaggatggtgcagcagttccagttcctgggctggcccatgtacagagacacccctgtgtccaagaggagcttcctgaagctgatccggcaggtggacaagtggcaggaggagtacaatggaggagagggccgcacagtggtgcactgcctgaatggaggcggccgcagcggcaccttctgtgccatcagcatcgtgtgtgagatgctgcggcaccagaggacagtggatgtgttccacgctgtgaagaccctgaggaacaacaagcccaacatggtggacctgctggaccagtacaagttctgctatgaggtggccctggagtacctgaacagcggctag

SEQ ID NO: 41530 - DNA, 4398 bp, Artificial Sequence
  derived and/or modified sequence
atgcggggcctgggcacctgcctggccaccctggccggcctgctgctgacagctgctggcgagacattctccggcgggtgtctctttgatgaaccgtatagtacatgcggctattcacagtccgagggggacgactttaactgggagcaggtcaacaccctgacaaaaccaacatccgatccttggatgccttccggaagttttatgctcgtaaatgctagcggcagaccagagggtcagcgagctcacctgctcctcccacagctgaaagaaaacgacactcattgtatcgattttcattactttgtatcaagtaaatcgaactcacctccaggcctcttgaatgtctatgtgaaagtcaataatgggcctctgggcaacccaatctggaatatcagcggggatcccactcggacttggaatagggccgagctggctatttctaccttctggcctaacttctaccaggtgattttcgaagtcattacttccggacatcagggatatcttgccattgatgaagtcaaggtcctgggacatccatgtactcgcacaccccactttctccgcatccagaacgttgaggtcaacgctggtcaattcgctacattccagtgttcagccataggaagaacagtggccggagatcgcctgtggctacaaggaatcgacgtccgcgacgcccctttaaaagagataaaggttacaagcagcagaagatttattgccagttttaacgtggtgaatactactaagcgggacgctggaaagtaccgctgtatgattcggaccgaaggaggggtgggcatctcgaactatgctgagctagtggtcaaggagccacctgtgcccattgcccctccccagttggcgtctgtgggagccacatatctgtggatccagcttaatgccaatagcattaacggcgacgggccaattgtcgcaagggaggtggaatactgtaccgcctcagggtcttggaacgacagacaacctgtggattccacatcatacaagataggtcatcttgatccggacacagaatacgagattagcgtgttgttaacaaggccaggggaaggcgggaccgggtctcctggacctgctcttagaacgagaaccaaatgtgccgacccgatgcgcgggccgagaaagctcgaggtggtcgaggtcaagtctcgacaaatcacaattaggtgggagcccttcggctacaatgtgaccaggtgccactcttataatctaacagttcactattgctatcaagtgggtggacaggaacaggttagggaagaggtctcctgggataccgagaactcacaccctcagcataccatcactaacctatctccatacacaaatgtgagtgttaagttgatcctaatgaacccagagggccgcaaggagtcgcaggagctaattgtacagactgatgaagacttgcccggcgccgtcccaaccgagtccattcaggggtctactttcgaagaaaagatattccttcaatggcgagagcccacacagacatacggcgtgatcaccctgtacgaaattacatataaagctgtctctagctttgaccccgaaattgatctgtcaaaccagagtgggcgagtaagcaaactggggaatgaaacgcattttttgttctttggactctacccaggcaccacgtacagcttcacaatacgcgccagcacggccaaaggctttggacctcctgcgacgaatcagtttaccaccaagatcagcgcaccgtcaatgcccgcatacgagctggagacgccactcaaccagacagacaatactgtcacggtaatgctcaagccagctcattccaggggcgccccagtgtccgtctatcagattgttgtcgaagaagaacggcctcgtcggactaaaaaaactacagagattctcaagtgctaccctgtgcctatccactttcagaacgcctccctcctgaacagtcaatattattttgccgccgagtttcctgcagactccctccaggcggctcagccattcacgatcggggacaataagacgtataacggatattggaatacacctttgcttccatacaagtcataccgcatctactttcaggccgccagcagagccaatggagagacgaagattgattgcgtgcaggtcgccacgaagggggcagcgaccccaaagcctgtcccagagcctgaaaaacagacagaccataccgtcaaaattgcgggcgtaattgctgggatcttgctcttcgtgattatcttcctcggggtagtgcttgtaatgaaaaagagaaagctcgccaaaaagcgcaaggagacaatgtcatccacaagacaggaaatgacagtgatggtaaatagtatggacaaatcatatgcagagcaggggaccaactgcgatgaggcctttagtttcatggacactcacaatctgaatggtaggtccgtctcgtctccctcctcatttacaatgaagacaaatactctgtccacgagtgtccctaactcgtactaccccgacccctttgtgcccaccgctatcctggtcccaattaacgatgaaacacacacgatggcctcggacacatcatctctggtgcagtctcacacatataaaaagcgcgaacctgctgacgtgccctatcaaaccgggcagctacatcccgccatacgtgtggctgatctgctgcagcatatcactcagatgaagtgtgccgaaggttacggcttcaaggaagaatatgagtcatttttcgagggacaatccgctccctgggactcggccaaaaaggatgagaacagaatgaaaaatagatatggtaacatcatcgcctacgatcactcaagggtgcgactgcagacgatcgaaggagacactaattccgactacattaacggaaattatatcgatggataccatcgtcccaaccactatattgctacgcagggcccgatgcaggaaacgatttacgatttctggcggatggtgtggcacgaaaacacagcctccattatcatggtgactaatctggtcgaggtcggtcgtgtgaagtgttgtaagtactggcccgatgataccgaaatatataaggatatcaaagtgactctgattgaaaccgaactcttggcagagtacgtaatccggacgttcgcggtggagaaaaggggcgtgcatgaaatcagagagataagacagtttcatttcactgggtggcctgaccacggtgtgccctaccacgcaaccggcctactgggcttcgtaagacaggtcaagtctaaatctccccctagtgccggccctttggttgtccactgttcggctggcgcaggcagaacgggctgtttcatcgtgattgatataatgctcgatatggccgagagggagggagtggtcgatatttacaattgtgtgagggagcttcgaagccggagggtgaacatggtgcagaccgaggaacagtacgtgtttattcatgatgcaatcctagaggcttgtctctgtggcgacacctccgtccccgcaagtcaagttaggagcctgtactacgatatgaataagctcgaccctcaaaccaactcttctcaaatcaaagaggagttcagaactctcaacatggtgactcctacgcttcgcgtggaagattgcagcatcgcacttctgccaaggaaccacgagaagaaccgatgcatggatattctgccgcccgaccgctgtctaccttttctgattaccattgacggggagtcttcaaattatatcaatgccgctttgatggactcctataagcaaccttctgcctttatagtcacacagcaccctctgcccaacaccgtcaaggatttctggcgtcttgtgttggactaccactgcacatctgtcgtaatgctcaacgacgtggatcctgctcagctctgcccccagtattggcctgagaatggagtacaccgacacggtccaattcaagtggagtttgtgagtgctgaccttgaagaggacatcataagccggatctttcggatttataatgccgctagaccccaagatgggtacaggatggtgcagcagttccaatttctgggttggcctatgtacagagatacacctgtgtctaaaagaagcttcctgaaattgattaggcaggtcgacaagtggcaggaagaatacaatggtggcgagggcagaactgttgtacattgtcttaacggcggcggccgctcgggtacattctgtgcgattagcatcgtatgtgagatgcttagacatcagcgaacagtggacgttttccacgcagtgaaaacactgaggaacaataagccgaatatggtggacctccttgaccagtataagttttgttatgaggtcgccctggagtacctgaattctggttag

SEQ ID NO: 41531 - DNA, 4401 bp, Artificial Sequence
  derived and/or modified sequence
atgcggggcctgggcacctgcctggccaccctggccggcctgctgcttaccgcagccggcgaaactttttccggaggatgcttgtttgacgagccttacagcacttgcgggtatagtcagtccgagggcgacgacttcaattgggagcaagtaaacacattaacgaagccaacaagtgatccttggatgccatcaggttcattcatgcttgttaatgcgtccgggagacccgaaggacagagagctcatcttcttttgccccagctgaaagagaatgacacccactgcatcgacttccattactttgtgtcaagcaagtctaatagcccacccggtctactgaacgtgtatgtgaaggttaacaatgggcccctgggaaatccaatttggaacatctccggggatccaactagaacgtggaaccgagccgagctggcaatcagtacattctggccgaacttttaccaggtgattttcgaggtcattacttctggtcaccaagggtatctggctatcgacgaggtgaaggtcttagggcacccttgtacccgaacaccccactttctcaggattcagaacgtggaagtgaacgccgggcagttcgccaccttccagtgctccgcaattgggagaacagtcgctggggatcgcctttggcttcaggggatcgatgtccgagatgccccgctgaaagaaattaaagtgacttcaagccggcgctttatagccagtttcaatgtcgttaacactacaaagagagacgcaggaaagtatcggtgtatgataaggactgagggtggggtagggatatcgaattacgcagagctggtggtgaaggagccaccagtacccatcgccccccctcaactggcatccgtgggagctacctacctgtggattcagctgaatgcaaattcaattaatggcgacggtcctatcgtcgcccgagaagtggagtactgcaccgcatcaggaagctggaatgatcgtcagcctgtggattctacaagctataagatcggccacctggaccctgatacagagtacgaaatttccgtgctgctcacccgccccggagagggaggtacaggatcgcctgggcccgcactccgaaccagaacaaaatgtgccgatcccatgcggggcccaaggaaacttgaggttgttgaggtgaaaagtaggcaaatcactattaggtgggaaccattcggctacaatgtcactagatgccattcatataatctgactgtccactattgttatcaggtgggaggccaagaacaggtgagagaagaggtgagctgggataccgagaactcacacccacaacacacgattaccaacctatccccctacaccaacgtctccgtgaagctgatcctgatgaatccagagggccgtaaagagagtcaagagctgatcgtccagacggatgaagatctcccaggtgctgtcccaacagagtcaattcagggttctacgtttgaagagaagatcttcttgcagtggagagaaccaacacagacctatggggtcataactctctatgagatcacctataaggccgtaagcagctttgacccagagatcgacctttctaatcagtcgggccgagtcagcaaactgggcaatgaaacgcactttttattcttcggcctgtaccccggcactacctattctttcactatccgagcctccaccgcaaaaggcttcggtccacccgctaccaaccagttcactaccaaaatatctgcaccgtctatgccggcgtacgaactggaaaccccattaaatcagactgacaatacagttaccgtgatgcttaaacctgcccatagcagaggggcaccagtttctgtttaccaaattgtggtggaggaggagagacccaggcgaactaaaaaaactaccgagattttgaaatgttatcccgtccctatccattttcagaatgcgtctctgttaaactcacagtattatttcgcggctgagttcccggccgacagcctgcaggcagctcagcccttcactattggcgacaataaaacctacaacgggtactggaacacgcctctgctgccttacaaaagttatcgcatatacttccaggcagcatccagggccaacggggaaacgaagatcgattgcgtccaggtggccaccaagggggcagctactccaaagccagtgcccgagcccgaaaagcagacagaccacactgtcaaaattgcgggggttatcgcaggcatcttactcttcgtcatcatttttctaggagtggtcttggtgatgaaaaagcgaaaactcgccaagaagagaaaggaaacgatgtcctcaactcggcaggagatgaccgtcatggtgaattctatggacaaatcatacgcagaacaggggaccaattgtgacgaggctttttcctttatggacacccataacttgaacggacgttcagtctcttccccttcctcctttacaatgaagacgaacactttgagtacatcggtgccgaattcctactatcctgatccatttgtaccgacggctattctcgatttcagtctcaataatgagacacataccatggcttccgatacaagttccctggtccagtctcacacctacaagaagagagagccagctgatgtcccctatcagaccgggcagctccacccagctattcgggtggccgatttgcttcaacatataacgcagatgaaatgcgccgaggggtacgggttcaaggaagagtatgagtcgttttttgaaggacagtcagcaccatgggactccgcaaagaaggatgaaaaccgtatgaaaaacagatacgggaatatcatcgcttatgaccactcccgagtccggcttcagacgatcgagggtgacacgaacagcgattacattaatgggaactatattgacgggtaccatagaccgaatcactacattgccacacagggtcctatgcaggagactatctatgacttctggaggatggtctggcatgaaaacactgcttctatcatcatggtgaccaatctggtcgaggtgggccgtgttaagtgctgtaagtattggccagacgatacggaaatctacaaggatatcaaagttacgctcatcgagaccgaattgctggcagagtacgtcatccgaacttttgcggtggaaaagaggggcgtgcacgagatccgcgaaatccggcagtttcactttacagggtggcccgaccacggggtaccctatcatgcgactggactcctgggctttgtccggcaggtgaagagcaaatctccccctagtgctggccccctcgtggttcactgtagcgccggagctggaaggaccggctgtttcattgtgattgatattatgctagatatggccgaaagggagggggtggtggacatctataactgtgtgcgggaattgagatcccggcgtgtgaatatggttcagactgaggagcagtacgttttcatacacgatgccattttggaagcctgtctttgcggtgatacgtctgtacccgcgtcacaggtgcgctccttgtactatgatatgaataagctcgacccccagaccaacagctcccaaatcaaggaagagttcaggaccctgaacatggttacacctaccctcagagtagaggactgctctatcgcactgctgccccgcaatcacgagaagaaccgatgcatggacattctgccccccgaccgctgccttccttttctcattaccatcgatggcgaatcatccaactatatcaacgccgcactgatggattcttataaacagccctctgctttcattgtgacacagcaccctcttccgaataccgtgaaagatttttggcgcctggtcctcgattatcattgtacctcggttgtcatgttgaatgacgtggatcccgcacagctgtgcccccagtattggccagagaacggcgtccaccgacatggaccgattcaggtcgagttcgtatccgccgatcttgaggaggatattatcagtaggatctttagaatctacaacgctgctcgcccccaagacggttataggatggtgcagcaatttcaatttcttggctggccaatgtatcgtgacacccccgtgtctaagaggtctttcctcaagctgataagacaggtggataaatggcaagaagagtataatgggggagagggaagaaccgtcgtgcactgtctgaatggcgggggaagaagcggcaccttctgcgcgattagcattgtatgcgagatgctacgccatcaacggaccgtggacgtgttccacgccgtgaagacccttagaaacaataagcccaacatggtggacctactggaccagtacaagttttgttacgaggtcgccctagagtatctgaatagtgggtag

SEQ ID NO: 41532 - DNA, 4398 bp, Artificial Sequence
  derived and/or modified sequence
atgaggggactcggaacgtgtctggcgactctggctggcctgctcctaacggctgcgggagagactttctcagggggttgccttttcgacgaaccctactccacctgtgggtactcccagagcgagggagatgactttaattgggagcaggtgaatacgctaacgaaaccaacttcagacccctggatgccctccggctctttcatgctggtgaatgcctcaggccgtcccgagggccaacgcgctcaccttctgttacctcagctcaaggaaaacgatacccattgtatcgatttccattacttcgtttctagcaaaagtaatagtcctcccggattgctcaatgtgtacgtcaaggtaaacaacggccctttagggaaccccatttggaatatctcaggcgatcccacccggacttggaatcgggctgagctggccatttcgaccttctggccaaatttttatcaggtcatattcgaggttatcacaagcggccatcagggttatctcgcaattgatgaagtgaaagtgctgggccatccatgcacccgcacaccccattttctacgcatacagaatgtcgaagtgaacgccggacaatttgccacttttcagtgctccgccataggcaggacagtggccggtgatagattgtggctccagggaatcgacgtgagggatgcacccttaaaggagatcaaggtcaccagttccagacgttttatcgcgtctttcaacgtggtaaatacgaccaagcgggacgccggtaagtaccggtgcatgattagaacagagggcggtgttgggatttcgaactatgctgaactcgtggtgaaggaacctcccgtcccaatcgcgcctccacaactcgcaagcgtgggggcaacctacctgtggattcagctgaacgctaacagcattaacggtgatgggccaatcgtcgctagagaagtggagtactgtaccgcgagtgggagctggaacgaccggcagcccgttgactccacttcttacaaaatcgggcacttagacccagacactgagtacgagattagcgtgctgttgacacggcctggcgagggagggacagggagccccggtcccgcactcagaacccgaaccaagtgcgccgatcctatgcgaggcccacgcaaactggaggtggtggaggtgaagtcaaggcaaattactatccgttgggaaccttttggatataacgtcaccaggtgccattcttacaatctgactgtgcactattgttatcaggtgggcggacaggagcaggtcagagaggaagtgtcatgggacaccgaaaatagccacccacaacatactatcacaaatctgtctccttacacaaacgtcagtgttaaattgatcctgatgaacccagaaggaaggaaggaaagccaggagctcattgtccagaccgatgaggaccttcctggcgcagtccccaccgagtcaattcagggctccaccttcgaggaaaaaatcttcttgcagtggagggaacctacccaaacctacggagtgattacactctacgagataacctataaggccgtcagctcctttgatcctgagattgatctttcgaaccagtccggaagagttagtaaacttggcaatgagacacacttcctttttttcggcctgtaccccggaacgacatatagttttacgataagagcgtccactgccaaagggttcggtccacccgctacgaaccaattcacaacaaaaatctctgctcctagtatgccagcatatgaacttgaaacacctctcaatcagaccgataacacagtaactgtgatgttgaaacccgcacactcaaggggtgccccagtgtcagtctaccagatcgtggtcgaggaggaacgcccaagacgcacaaaaaaaaccaccgaaattttgaaatgttacccggtgcccattcacttccagaatgcaagcctcttaaactcccaatattacttcgccgcagaattccccgctgattccctgcaagccgctcagccatttactatcggtgacaacaagacttacaacgggtattggaacactcctttgctaccctacaagtcctataggatttacttccaggcagcttctagggctaatggggagaccaaaattgattgtgtgcaggtcgcaaccaaaggtgccgctacacccaagcccgtgcctgaacccgagaagcagactgaccacactgttaagattgcgggagtgatcgccggaattctcctcttcgtgatcatattcttaggagtggtgctcgtgatgaaaaaaagaaagctcgcaaagaaacgcaaggaaaccatgagctctacgcgccaggagatgactgtgatggtgaactccatggacaagagctacgccgagcagggtactaactgcgacgaagccttctcatttatggacacacacaatctgaatggcagaagtgtgtcctctccatcctcttttactatgaagaccaacactttgtccacttctgttccaaatagttattaccccgacccgtttgtgcccactgcaatcctagtgcctatcaacgacgaaacgcacacaatggcatccgacacctcatccctggttcagtctcacacctacaaaaaacgtgaacctgccgacgtaccctaccagaccggccagttacaccccgcaatacgtgtcgccgatctgctgcaacacatcactcaaatgaaatgcgctgagggctacggtttcaaagaggagtatgaatctttcttcgaaggacagagcgccccatgggactctgccaagaaggatgagaacagaatgaaaaaccgttatggcaatatcatagcttacgatcacagtcgcgtcagattgcaaacgattgaaggcgatactaattccgactatatcaacgggaactacattgacggctaccatcgacccaatcactacattgctacccagggccctatgcaagagaccatctacgacttctggcgcatggtgtggcacgaaaacactgccagtattattatggtcaccaatctcgttgaggtcggcagggtgaagtgttgcaaatattggccagatgatacagagatctacaaggatatcaaggtcaccttaatcgaaaccgagttactggctgagtatgtaattaggacttttgctgtcgagaaacgcggagtgcacgagatccgtgagatccgacaattccactttacaggatggcctgaccacggggtcccctaccacgcaaccgggctgctgggattcgtcagacaagtcaagtctaaatctccacctagcgcaggccctttggtggtacattgcagcgccggtgcgggtagaaccggatgctttattgtcattgatattatgctagatatggcagagagggagggggttgtcgatatttataactgtgtacgcgagttgagaagcagacgagtcaacatggtacagactgaggaacagtacgtgtttatccatgatgctatcctggaagcatgtctatgtggtgacacatcggtgcccgctagccaggttagatcactgtattacgacatgaacaaactggacccccagaccaatagctcacagatcaaggaggaatttagaaccttgaatatggtcacacccacactgcgagtcgaggattgtagcatagcgctcctccccagaaatcatgaaaagaaccgctgtatggatattctgcctccagatcggtgtctgcctttcctgatcacaatagatggcgaatctagcaattatattaatgccgctctgatggattcatacaaacagccctcagcctttatcgttacccaacaccctctgccaaatactgtgaaagacttttggcggttagtgctcgactaccactgtacttccgtcgtaatgcttaacgacgtcgatccggctcagctgtgcccccagtactggcccgagaacggcgtacatcgtcacgggcctatccaggtggaattcgtctctgccgatttagaggaggacatcataagtcggatctttcgaatttataatgctgcccgtccccaagacggctataggatggtccagcagttccaattcctaggatggcctatgtatcgggacacccccgttagtaagaggtcattcttgaagctcatcagacaggtagacaagtggcaagaggagtacaacgggggtgagggacgcaccgtggtccattgcctcaatggtgggggtcggtcagggaccttttgcgccatctcaattgtgtgtgaaatgctgcgccatcagaggacagtggacgtgtttcacgctgtgaagactttacgcaataataagcccaacatggttgacctcttggatcagtataagttttgttacgaggtggctcttgaatacctaaattctgggtag

SEQ ID NO: 41533 - DNA, 4401 bp, Artificial Sequence
  derived and/or modified sequence
atgcgcggactcgggacgtgtttagcgactctggccggtcttctcctgactgcagctggcgaaactttcagcggcggttgtttattcgatgagccgtactccacgtgcggctattcccagagcgagggcgatgatttcaattgggaacaggtcaatacactgacaaagcctacttctgatccctggatgcctagcggaagctttatgcttgtgaacgcctctgggcgtcccgaggggcaaagggcccacttgctcctgcctcaacttaaggaaaacgacacccactgtattgatttccattatttcgtaagctcgaagtcaaactccccaccagggctgcttaatgtatatgtgaaagtcaacaacggccctctggggaaccccatatggaatatctccggcgatccaacacgaacctggaatcgcgctgagctagcaattagtactttctggcctaacttctatcaggttatctttgaggtgattaccagcggccatcaaggatacttggcgattgacgaagttaaagtgcttgggcacccatgcacaaggaccccccacttcctgagaatccaaaatgtagaagttaatgcgggacagtttgccacctttcagtgttccgctataggtaggacagttgccggagacaggctgtggctgcagggcatcgatgtgcgggacgcccctttaaaggagatcaaagtgacctccagtagacgcttcattgcgtcttttaacgtcgtcaacacgactaagagagacgcaggtaagtacaggtgtatgataaggacggaaggcggagtgggcatctctaattacgctgaattggtcgtaaaggagcctccagtgcctatcgcaccacctcaattggcatccgtgggtgctacttatctctggattcaactgaatgccaacagcataaacggagacggccctattgtcgctagagaagtggagtattgcacagcctcaggatcctggaatgatagacagcccgtcgactcaacatcttacaagatcggccacctggaccccgacactgaatatgaaatctcagtcctgttgacaaggcccggtgagggcggaacagggagtccgggacctgcactgagaactaggactaagtgtgctgaccccatgaggggccctcggaaactcgaagtcgtagaggtgaaatccaggcaaatcaccatcagatgggagccattcggttataacgtcacgcgctgccacagctataatctgaccgtgcactactgctaccaggtgggtggtcaggaacaggttagagaggaagtttcatgggacacagaaaatagtcacccccagcacacaataaccaacctgagcccctatacgaatgtgtctgtgaaattaatcctgatgaaccccgaagggaggaaagaaagtcaagaactgatcgtgcagacagacgaagatctgccgggagccgttccaaccgagtctattcagggaagtaccttcgaggagaagatcttccttcagtggagagaacccacccagacgtacggggtgattaccctctatgaaataacctataaagccgtttccagttttgaccctgagattgacctgtcaaaccaatctggcagagttagcaaactaggcaacgagacacatttcttgttctttggtttatatccgggaactacctacagtttcaccattcgcgcatctaccgcgaagggcttcgggcctcccgctacaaatcagttcacgaccaagatttcagcaccgagcatgcccgcttatgaactggaaaccccactcaatcagacggataacaccgtgactgttatgctgaagccagcacatagtagaggcgcacccgtatccgtctatcaaatcgtcgtggaggaggaacgaccgagaagaactaaaaaaactaccgaaattctgaagtgctatccggtacctattcactttcaaaatgcatcacttttgaactctcagtactattttgcagcagagttcccagcagactcgttgcaggcggctcagcctttcacaatcggtgataacaaaacctacaatgggtactggaacaccccactactgccctataaaagttatagaatctacttccaagctgccagtcgggcaaatggagagaccaaaatcgactgcgtgcaggtggctacgaaaggcgcagcaacccctaaacctgtgcccgagccagagaagcagacagaccataccgtaaaaatagccggtgtgatcgctggcatacttttatttgtgattatctttctcggtgtcgtactagtaatgaagaaaagaaaactggcaaagaagcggaaagaaacgatgtccagcacaagacaggagatgactgtaatggtgaatagcatggacaaatcctacgccgaacagggaacgaactgcgacgaagccttttctttcatggatacccacaatctgaacggccgatcagtgagctcaccctcctctttcactatgaaaaccaataccctgagtacctcagtgcctaacagctactatcccgatcccttcgttcctacagccatcctagattttagtctgaacaacgagacccatactatggcctccgacaccagttccctggttcaatctcacacgtacaaaaaaagagaaccagcagacgttccatatcagactggccagctacatcccgctatccgggtggccgatcttttacagcatattacccagatgaagtgcgcagaagggtacgggttcaaggaggagtatgagagtttctttgaaggacagagcgccccttgggactcggcaaagaaggacgaaaacagaatgaaaaatcgatacggaaatattatcgcgtacgaccatagccgcgtgcgcctgcagacaatcgagggcgacactaactccgattacattaacgggaactacattgacggctaccaccgccctaaccattatattgctacgcaaggacccatgcaagagacaatctacgatttttggcgcatggtttggcatgagaatacagcatcaatcataatggttactaatcttgtggaggtgggtagagtgaaatgttgtaagtattggcctgatgacactgagatatataaagatattaaggtgacattgatagagacagagctgctggccgaatacgtcattagaacatttgcagtggaaaagcgaggtgtgcacgagatccgggaaatccggcagttccattttacaggctggccggaccatggcgtgccctaccacgccacgggactgctgggctttgtgagacaggttaaatccaaatctcctcctagtgctgggcctctcgtcgtccactgcagcgcaggggcaggcagaaccgggtgtttcattgtcattgacattatgttagacatggcagaaagggaaggcgtcgttgatatatacaattgtgtgcgggaactcaggagccggagagttaacatggtacagacggaggagcagtatgtcttcattcacgatgccatcctggaggcttgcctgtgtggagacacatcagtcccggcaagccaggtgcggagcctgtactacgacatgaataagctggacccccagacaaattcctcccagatcaaggaggaatttagaaccctgaatatggttacacctacccttagagtggaagactgttcaattgcgctactcccgaggaaccacgaaaagaaccggtgtatggatatccttccgccagacagatgcttgccctttctcatcaccattgacggagagtcgtccaattatattaatgccgctttgatggactcttacaagcaaccctccgccttcatcgtgactcagcacccactgcctaacaccgtgaaggacttctggagattggtgcttgattaccattgtacttccgtcgtcatgctcaacgatgtggaccctgctcagctgtgtcctcagtactggccagaaaatggtgtccacaggcatgggccaatccaagtagaatttgtctccgccgatctcgaagaggatattataagcagaattttcagaatttacaacgccgcaagaccgcaggacggctacagaatggttcaacaatttcagttcctggggtggcccatgtatagggacacccccgtgtcaaaacgatcattcctgaagctgatcagacaggtggacaaatggcaagaggaatacaacggcggtgaaggaaggacagtcgtccactgtctcaatggagggggacgctccggcaccttctgcgctatcagcattgtatgtgagatgcttcgacaccagcggaccgtggacgtctttcacgctgtgaaaaccctgcgcaataacaaaccgaatatggtcgatctcttggaccagtataaattctgttatgaggttgcactggaatatctcaactccgggtag

SEQ ID NO: 41534 - DNA, 5941 bp, Artificial Sequence
  derived and/or modified sequence
gcggcgtagagaagctcgcagccctccggagcctcagcgatctcctggctcgcttttcccgcagccgccgagcagcgcaggcccggcgactccgggtgcagctggccctgtgcggtgacatcgccgtccggcgccaggctcgaagccgcctggccgcgcccgcggggtcgcaggccgctggtcccgcccggccgcgctcacaaactactcgcggctcgtgacccgggacaaacttctggcggcggcgcagcctcttccacagtcaccctccccagagccagctaccaaaatagaagacgcggccggggcgaggaggtgggcggggggagcccggtggccgctcctccccgcgcggctgacgcccgcttcggcggcggtagtggctgtggccgcggggccgcccccagccgagctcccggaggcgctcgggcgcgggccggcggggcacgggcgctcacgccctctagcgggccgcggcggcgccgggcggccgtgacgtgagcgctcccttcagccggcctgcggggcaccgccagtcagtcggggagcaagagccccgcgcgcagccggcgcgggctcggtcatcggcgcgccgccgcccggggctgggcttggggctgcctgtggagaggcggcgggcggaacgcgcgcggccacggccacggccaccgccacggccacggccggcagctcgggtcccgggtcccgggcaggggaaggggagaggcggcgagctcagcaaccggaaccgagggaagattttggctccgcgggctcgccctccgctccctctgccagcggcgccagacgccgagtggggccagggacaggggaggaggacccaggaccctgtgcccgcgcccctggagccgctggagttcggacttctgcaactgttggcactttgggggcttggcttagcgctctgctgtttacccgtctctcctcgctgcctcggaaccaaagctcccggccccctccgccctcgcgcgcccacccaccgccgccggggagcggcccggcccgcactcagcaccatgaggggacttgggacttgcctggcgactttggccggacttttgctaactgcggcgggcgagacgttctcaggtggctgcctctttgatgagccgtatagcacatgtggatatagtcaatctgaaggtgatgacttcaattgggagcaagtgaacaccttgactaaaccgacttctgatccatggatgccatcaggttctttcatgctggtgaatgcctctgggagacctgaggggcagagagcccacctgctcttaccccaacttaaagaaaatgacacccactgcatcgattttcactattttgtgtccagcaagagtaattctcctccggggttactcaatgtctacgtgaaggtcaataacgggccactggggaatcctatctggaatatatctggagacccaacacgtacatggaacagggcagaactggccattagtactttctggcctaacttttatcaggtgatttttgaagtgataacttctggacatcaaggctatctcgctatcgatgaggtgaaggtgttaggacatccatgtaccaggactcctcacttcctgcggattcagaatgtggaagttaatgctggccagtttgctaccttccagtgcagtgccatcggcaggaccgtggcaggagacaggctctggttacagggcattgatgtgcgagatgctcctctgaaggaaatcaaggtgaccagctcccgacgcttcattgcttcatttaatgttgtgaataccaccaaacgagatgctggaaagtaccgctgcatgattcgcactgaaggaggtgttggaatatcaaactatgcagagttggtagttaaagaaccacccgttcctattgccccacctcagctcgcctctgtaggagccacctacctgtggatacagctcaacgccaactccatcaatggggatgggcccattgtggcccgagaggtggagtactgcacggccagtgggagctggaatgaccggcagccagtcgattccacgagctataaaattggacaccttgacccagatacagaatatgagattagtgtgctcctgaccaggccaggggagggtggcactggctctcctggtccagctctcaggacaagaacaaagtgtgctgatcccatgcgaggcccaagaaaactagaagtagtggaggtcaaatctcggcaaatcactatccgctgggagccatttggatataatgtaactcgttgccacagttataatctcactgtccactactgttaccaagttggaggacaagaacaagtgcgagaagaagtaagctgggatacagaaaactcacaccctcaacacacgatcactaacctgtcaccatacaccaatgtcagtgtgaaactgatcctcatgaacccagagggccggaaggaaagccaagaactcatagtgcagacagatgaagacctcccaggtgctgttcccactgaatccatacaaggaagtacctttgaagagaagatatttcttcagtggagagaaccaactcaaacatatggtgtaatcactttatatgagatcacctacaaagcagtcagttcctttgacccagaaatagatttatccaatcagagtggaagagtttcaaagctgggaaatgaaacccattttctgttttttggactgtatccggggaccacatactcctttaccatccgagctagcacagctaagggttttgggcctccagcaacaaaccagttcaccaccaaaatatcagcaccctctatgccagcttatgaacttgagacacctttgaatcaaactgacaataccgtgacagtcatgctgaaacctgcccacagcagaggagcacctgtcagtgtctatcaaatagttgttgaggaagaacgtcctcgaagaactaaaaagacgacagaaatcttaaagtgctacccagtgccaattcacttccagaatgcttctctgctgaactcacagtactactttgctgcagaatttcctgcagacagcctccaagctgcgcagccttttacaattggtgataataagacatataatggatactggaacactccccttctcccctataaaagctacagaatttatttccaagctgctagtagagccaatggggaaaccaaaatagactgtgtccaagtggccacaaaaggagctgccactccgaaaccagtcccagaacccgagaaacagacagaccatacagttaaaattgctggagtcatcgcgggcatcttgctgttcgtgattatatttcttggagttgtgttggtaatgaagaaaaggaaactggccaagaagcggaaagagaccatgagcagcacccgacaggagatgactgtgatggtgaactcaatggacaagagctatgctgagcagggcacaaactgcgacgaggctttctcattcatggacacgcacaatctgaatgggagatctgtgtcttcaccatcgtccttcacaatgaaaacaaatacactgagcacatcggtgcctaattcctattacccagacccatttgtgccaactgcaattttagtgccaataaatgatgaaacccacacaatggccagcgataccagcagcctggtgcagtcccatacttacaagaagcgagagccggccgacgtgccctatcagactgggcagctccaccccgccatccgggtggcagacctccttcagcacatcacacagatgaagtgtgcggagggctacggcttcaaggaggaatacgagagcttctttgaagggcagtctgcaccatgggactcggctaagaaagatgagaacagaatgaagaacagatacgggaatatcattgcatacgatcattcccgagtgaggctgcagacaatagaaggagacacaaactcagactatatcaatggcaattatatcgatggttatcatcgacccaatcattacattgctacccaagggccaatgcaggaaaccatctatgacttctggaggatggtgtggcacgaaaacactgcaagtatcatcatggtgaccaatcttgtggaagtgggaagggtcaaatgctgcaaatactggccagatgacacagagatatataaagacattaaagttaccctaatagaaacagaactactggcagaatatgtgataagaacatttgctgttgaaaagagaggtgtgcatgaaatccgagagatcagacagtttcacttcactggctggccggatcatggggtcccctaccatgccaccggcctgctgggattcgtgcggcaagtcaagtccaagagcccgcccagtgcaggcccactggtggtgcactgcagtgctggtgcagggaggactggctgtttcatcgtcattgatatcatgttggacatggccgaaagggaaggggtcgtagacatctacaactgcgtcagggagctgcggtcacggagggtgaacatggtgcaaacagaggagcagtatgtgtttatccacgatgcgatcctggaagcctgtctttgtggggacacctctgtgcctgcttcccaagttaggtctctgtattatgacatgaacaaactggatccacagacaaactcaagccagattaaagaggaattccggacgctaaacatggtgacaccaacgctgcgagtagaggactgcagcatcgcactgttgccccggaaccatgagaaaaaccggtgcatggacatcctgcccccagaccgctgcctgcccttcctcatcaccatcgatggggagagcagcaactacatcaatgctgccctcatggacagctataaacagccttcagcttttatagtcacccagcatcctttgccaaacacagtgaaagacttttggagactggtcctggattatcactgcacatccgtagttatgctaaatgatgtggatcctgcccagttgtgtccacagtactggccagaaaacggagtacacagacacggccccatccaggtggaatttgtctctgctgacctggaagaggacatcatcagcaggatattccgcatttacaatgccgccagaccccaagatggatatcggatggtgcagcaattccagttcctgggctggccgatgtacagggacacaccagtgtctaagcgctccttcttgaagctcattcgccaggtggacaagtggcaagaggagtacaatggcggggaaggccgcacggttgtgcactgcttgaacgggggaggccgcagtgggacgttctgcgccatcagcatcgtatgtgagatgctccggcaccagagaaccgtggatgtctttcacgctgtgaagacactgaggaacaacaagcccaacatggtcgacctcctggatcagtacaagttctgctacgaggtggccctggaatacttgaattctggctgatggtgtaaacagctctgcaaacaatccctttcataccacaaagccaagacgttccatggtatttgtgcaaaagagatgaagacttctcaatatgcttattttgctttgcataattggctctttttaagagcccaagaaagtgtttctaaaattgcttgcactgcccaatcccagtaatgctgctgcctgacagaaacacacacacagccacagttgccaaatcccgtactccttgccaccggcttcctagagcagcgtagacagctggtaaactgaagagcacaactatattcttatgaaggaatttgtacctttggggtattattttgtggcccgtgaccctcgttattgttacagctgagtgtatgtttttgttctgtggagaatgctatctggcattatggtaatatattattttaggtaatatttgtactttaacatgttgcataatatatgcttatgtagctttccaggactaacagataaatgtgtaatgaacaaagata

SEQ ID NO: 41535 - DNA, 4401 bp, Artificial Sequence
  derived and/or modified sequence
atgaggggacttgggacttgcctggcgactttggccggacttttgctaactgcggcgggcgagacgttctcaggtggctgcctctttgatgagccgtatagcacatgtggatatagtcaatctgaaggtgatgacttcaattgggagcaagtgaacaccttgactaaaccgacttctgatccatggatgccatcaggttctttcatgctggtgaatgcctctgggagacctgaggggcagagagcccacctgctcttaccccaacttaaagaaaatgacacccactgcatcgattttcactattttgtgtccagcaagagtaattctcctccggggttactcaatgtctacgtgaaggtcaataacgggccactggggaatcctatctggaatatatctggagacccaacacgtacatggaacagggcagaactggccattagtactttctggcctaacttttatcaggtgatttttgaagtgataacttctggacatcaaggctatctcgctatcgatgaggtgaaggtgttaggacatccatgtaccaggactcctcacttcctgcggattcagaatgtggaagttaatgctggccagtttgctaccttccagtgcagtgccatcggcaggaccgtggcaggagacaggctctggttacagggcattgatgtgcgagatgctcctctgaaggaaatcaaggtgaccagctcccgacgcttcattgcttcatttaatgttgtgaataccaccaaacgagatgctggaaagtaccgctgcatgattcgcactgaaggaggtgttggaatatcaaactatgcagagttggtagttaaagaaccacccgttcctattgccccacctcagctcgcctctgtaggagccacctacctgtggatacagctcaacgccaactccatcaatggggatgggcccattgtggcccgagaggtggagtactgcacggccagtgggagctggaatgaccggcagccagtcgattccacgagctataaaattggacaccttgacccagatacagaatatgagattagtgtgctcctgaccaggccaggggagggtggcactggctctcctggtccagctctcaggacaagaacaaagtgtgctgatcccatgcgaggcccaagaaaactagaagtagtggaggtcaaatctcggcaaatcactatccgctgggagccatttggatataatgtaactcgttgccacagttataatctcactgtccactactgttaccaagttggaggacaagaacaagtgcgagaagaagtaagctgggatacagaaaactcacaccctcaacacacgatcactaacctgtcaccatacaccaatgtcagtgtgaaactgatcctcatgaacccagagggccggaaggaaagccaagaactcatagtgcagacagatgaagacctcccaggtgctgttcccactgaatccatacaaggaagtacctttgaagagaagatatttcttcagtggagagaaccaactcaaacatatggtgtaatcactttatatgagatcacctacaaagcagtcagttcctttgacccagaaatagatttatccaatcagagtggaagagtttcaaagctgggaaatgaaacccattttctgttttttggactgtatccggggaccacatactcctttaccatccgagctagcacagctaagggttttgggcctccagcaacaaaccagttcaccaccaaaatatcagcaccctctatgccagcttatgaacttgagacacctttgaatcaaactgacaataccgtgacagtcatgctgaaacctgcccacagcagaggagcacctgtcagtgtctatcaaatagttgttgaggaagaacgtcctcgaagaactaaaaagacgacagaaatcttaaagtgctacccagtgccaattcacttccagaatgcttctctgctgaactcacagtactactttgctgcagaatttcctgcagacagcctccaagctgcgcagccttttacaattggtgataataagacatataatggatactggaacactccccttctcccctataaaagctacagaatttatttccaagctgctagtagagccaatggggaaaccaaaatagactgtgtccaagtggccacaaaaggagctgccactccgaaaccagtcccagaacccgagaaacagacagaccatacagttaaaattgctggagtcatcgcgggcatcttgctgttcgtgattatatttcttggagttgtgttggtaatgaagaaaaggaaactggccaagaagcggaaagagaccatgagcagcacccgacaggagatgactgtgatggtgaactcaatggacaagagctatgctgagcagggcacaaactgcgacgaggctttctcattcatggacacgcacaatctgaatgggagatctgtgtcttcaccatcgtccttcacaatgaaaacaaatacactgagcacatcggtgcctaattcctattacccagacccatttgtgccaactgcaattttagacttttctctaaacaatgaaacccacacaatggccagcgataccagcagcctggtgcagtcccatacttacaagaagcgagagccggccgacgtgccctatcagactgggcagctccaccccgccatccgggtggcagacctccttcagcacatcacacagatgaagtgtgcggagggctacggcttcaaggaggaatacgagagcttctttgaagggcagtctgcaccatgggactcggctaagaaagatgagaacagaatgaagaacagatacgggaatatcattgcatacgatcattcccgagtgaggctgcagacaatagaaggagacacaaactcagactatatcaatggcaattatatcgatggttatcatcgacccaatcattacattgctacccaagggccaatgcaggaaaccatctatgacttctggaggatggtgtggcacgaaaacactgcaagtatcatcatggtgaccaatcttgtggaagtgggaagggtcaaatgctgcaaatactggccagatgacacagagatatataaagacattaaagttaccctaatagaaacagaactactggcagaatatgtgataagaacatttgctgttgaaaagagaggtgtgcatgaaatccgagagatcagacagtttcacttcactggctggccggatcatggggtcccctaccatgccaccggcctgctgggattcgtgcggcaagtcaagtccaagagcccgcccagtgcaggcccactggtggtgcactgcagtgctggtgcagggaggactggctgtttcatcgtcattgatatcatgttggacatggccgaaagggaaggggtcgtagacatctacaactgcgtcagggagctgcggtcacggagggtgaacatggtgcaaacagaggagcagtatgtgtttatccacgatgcgatcctggaagcctgtctttgtggggacacctctgtgcctgcttcccaagttaggtctctgtattatgacatgaacaaactggatccacagacaaactcaagccagattaaagaggaattccggacgctaaacatggtgacaccaacgctgcgagtagaggactgcagcatcgcactgttgccccggaaccatgagaaaaaccggtgcatggacatcctgcccccagaccgctgcctgcccttcctcatcaccatcgatggggagagcagcaactacatcaatgctgccctcatggacagctataaacagccttcagcttttatagtcacccagcatcctttgccaaacacagtgaaagacttttggagactggtcctggattatcactgcacatccgtagttatgctaaatgatgtggatcctgcccagttgtgtccacagtactggccagaaaacggagtacacagacacggccccatccaggtggaatttgtctctgctgacctggaagaggacatcatcagcaggatattccgcatttacaatgccgccagaccccaagatggatatcggatggtgcagcaattccagttcctgggctggccgatgtacagggacacaccagtgtctaagcgctccttcttgaagctcattcgccaggtggacaagtggcaagaggagtacaatggcggggaaggccgcacggttgtgcactgcttgaacgggggaggccgcagtgggacgttctgcgccatcagcatcgtatgtgagatgctccggcaccagagaaccgtggatgtctttcacgctgtgaagacactgaggaacaacaagcccaacatggtcgacctcctggatcagtacaagttctgctacgaggtggccctggaatacttgaattctggctga

SEQ ID NO: 41536 - DNA, 4398 bp, Artificial Sequence
  derived and/or modified sequence
atgagaggcctgggcacctgcctggccaccctggccggcctgctgctgaccgccgccggcgagaccttcagcggcggctgcctgttcgacgagccctacagcacctgcggctacagccagagcgagggcgacgacttcaactgggagcaggtgaacaccctgaccaagcccaccagcgacccctggatgcccagcggcagcttcatgctggtgaacgccagcggcagacccgagggccagagagcccacctgctgctgccccagctgaaggagaacgacacccactgcatcgacttccactacttcgtgagcagcaagagcaacagcccccccggcctgctgaacgtgtacgtgaaggtgaacaacggccccctgggcaaccccatctggaacatcagcggcgaccccaccagaacctggaacagagccgagctggccatcagcaccttctggcccaacttctaccaggtgatcttcgaggtgatcaccagcggccaccagggctacctggccatcgacgaggtgaaggtgctgggccacccctgcaccagaaccccccacttcctgagaatccagaacgtggaggtgaacgccggccagttcgccaccttccagtgcagcgccatcggcagaaccgtggccggcgacagactgtggctgcagggcatcgacgtgagagacgcccccctgaaggagatcaaggtgaccagcagcagaagattcatcgccagcttcaacgtggtgaacaccaccaagagagacgccggcaagtacagatgcatgatcagaaccgagggcggcgtgggcatcagcaactacgccgagctggtggtgaaggagccccccgtgcccatcgcccccccccagctggccagcgtgggcgccacctacctgtggatccagctgaacgccaacagcatcaacggcgacggccccatcgtggccagagaggtggagtactgcaccgccagcggcagctggaacgacagacagcccgtggacagcaccagctacaagatcggccacctggaccccgacaccgagtacgagatcagcgtgctgctgaccagacccggcgagggcggcaccggcagccccggccccgccctgagaaccagaaccaagtgcgccgaccccatgagaggccccagaaagctggaggtggtggaggtgaagagcagacagatcaccatcagatgggagcccttcggctacaacgtgaccagatgccacagctacaacctgaccgtgcactactgctaccaggtgggcggccaggagcaggtgagagaggaggtgagctgggacaccgagaacagccacccccagcacaccatcaccaacctgagcccctacaccaacgtgagcgtgaagctgatcctgatgaaccccgagggcagaaaggagagccaggagctgatcgtgcagaccgacgaggacctgcccggcgccgtgcccaccgagagcatccagggcagcaccttcgaggagaagatcttcctgcagtggagagagcccacccagacctacggcgtgatcaccctgtacgagatcacctacaaggccgtgagcagcttcgaccccgagatcgacctgagcaaccagagcggcagagtgagcaagctgggcaacgagacccacttcctgttcttcggcctgtaccccggcaccacctacagcttcaccatcagagccagcaccgccaagggcttcggcccccccgccaccaaccagttcaccaccaagatcagcgcccccagcatgcccgcctacgagctggagacccccctgaaccagaccgacaacaccgtgaccgtgatgctgaagcccgcccacagcagaggcgcccccgtgagcgtgtaccagatcgtggtggaggaggagagacccagaagaaccaagaagaccaccgagatcctgaagtgctaccccgtgcccatccacttccagaacgccagcctgctgaacagccagtactacttcgccgccgagttccccgccgacagcctgcaggccgcccagcccttcaccatcggcgacaacaagacctacaacggctactggaacacccccctgctgccctacaagagctacagaatctacttccaggccgccagcagagccaacggcgagaccaagatcgactgcgtgcaggtggccaccaagggcgccgccacccccaagcccgtgcccgagcccgagaagcagaccgaccacaccgtgaagatcgccggcgtgatcgccggcatcctgctgttcgtgatcatcttcctgggcgtggtgctggtgatgaagaagagaaagctggccaagaagagaaaggagaccatgagcagcaccagacaggagatgaccgtgatggtgaacagcatggacaagagctacgccgagcagggcaccaactgcgacgaggccttcagcttcatggacacccacaacctgaacggcagaagcgtgagcagccccagcagcttcaccatgaagaccaacaccctgagcaccagcgtgcccaacagctactaccccgaccccttcgtgcccaccgccatcctggtgcccatcaacgacgagacccacaccatggccagcgacaccagcagcctggtgcagagccacacctacaagaagagagagcccgccgacgtgccctaccagaccggccagctgcaccccgccatcagagtggccgacctgctgcagcacatcacccagatgaagtgcgccgagggctacggcttcaaggaggagtacgagagcttcttcgagggccagagcgccccctgggacagcgccaagaaggacgagaacagaatgaagaacagatacggcaacatcatcgcctacgaccacagcagagtgagactgcagaccatcgagggcgacaccaacagcgactacatcaacggcaactacatcgacggctaccacagacccaaccactacatcgccacccagggccccatgcaggagaccatctacgacttctggagaatggtgtggcacgagaacaccgccagcatcatcatggtgaccaacctggtggaggtgggcagagtgaagtgctgcaagtactggcccgacgacaccgagatctacaaggacatcaaggtgaccctgatcgagaccgagctgctggccgagtacgtgatcagaaccttcgccgtggagaagagaggcgtgcacgagatcagagagatcagacagttccacttcaccggctggcccgaccacggcgtgccctaccacgccaccggcctgctgggcttcgtgagacaggtgaagagcaagagcccccccagcgccggccccctggtggtgcactgcagcgccggcgccggcagaaccggctgcttcatcgtgatcgacatcatgctggacatggccgagagagagggcgtggtggacatctacaactgcgtgagagagctgagaagcagaagagtgaacatggtgcagaccgaggagcagtacgtgttcatccacgacgccatcctggaggcctgcctgtgcggcgacaccagcgtgcccgccagccaggtgagaagcctgtactacgacatgaacaagctggacccccagaccaacagcagccagatcaaggaggagttcagaaccctgaacatggtgacccccaccctgagagtggaggactgcagcatcgccctgctgcccagaaaccacgagaagaacagatgcatggacatcctgccccccgacagatgcctgcccttcctgatcaccatcgacggcgagagcagcaactacatcaacgccgccctgatggacagctacaagcagcccagcgccttcatcgtgacccagcaccccctgcccaacaccgtgaaggacttctggagactggtgctggactaccactgcaccagcgtggtgatgctgaacgacgtggaccccgcccagctgtgcccccagtactggcccgagaacggcgtgcacagacacggccccatccaggtggagttcgtgagcgccgacctggaggaggacatcatcagcagaatcttcagaatctacaacgccgccagaccccaggacggctacagaatggtgcagcagttccagttcctgggctggcccatgtacagagacacccccgtgagcaagagaagcttcctgaagctgatcagacaggtggacaagtggcaggaggagtacaacggcggcgagggcagaaccgtggtgcactgcctgaacggcggcggcagaagcggcaccttctgcgccatcagcatcgtgtgcgagatgctgagacaccagagaaccgtggacgtgttccacgccgtgaagaccctgagaaacaacaagcccaacatggtggacctgctggaccagtacaagttctgctacgaggtggccctggagtacctgaacagcggctag

SEQ ID NO: 41537 - DNA, 4401 bp, Artificial Sequence
  derived and/or modified sequence
atgagaggcctgggcacctgcctggccaccctggccggcctgctgctgaccgccgccggcgagaccttcagcggcggctgcctgttcgacgagccctacagcacctgcggctacagccagagcgagggcgacgacttcaactgggagcaggtgaacaccctgaccaagcccaccagcgacccctggatgcccagcggcagcttcatgctggtgaacgccagcggcagacccgagggccagagagcccacctgctgctgccccagctgaaggagaacgacacccactgcatcgacttccactacttcgtgagcagcaagagcaacagcccccccggcctgctgaacgtgtacgtgaaggtgaacaacggccccctgggcaaccccatctggaacatcagcggcgaccccaccagaacctggaacagagccgagctggccatcagcaccttctggcccaacttctaccaggtgatcttcgaggtgatcaccagcggccaccagggctacctggccatcgacgaggtgaaggtgctgggccacccctgcaccagaaccccccacttcctgagaatccagaacgtggaggtgaacgccggccagttcgccaccttccagtgcagcgccatcggcagaaccgtggccggcgacagactgtggctgcagggcatcgacgtgagagacgcccccctgaaggagatcaaggtgaccagcagcagaagattcatcgccagcttcaacgtggtgaacaccaccaagagagacgccggcaagtacagatgcatgatcagaaccgagggcggcgtgggcatcagcaactacgccgagctggtggtgaaggagccccccgtgcccatcgcccccccccagctggccagcgtgggcgccacctacctgtggatccagctgaacgccaacagcatcaacggcgacggccccatcgtggccagagaggtggagtactgcaccgccagcggcagctggaacgacagacagcccgtggacagcaccagctacaagatcggccacctggaccccgacaccgagtacgagatcagcgtgctgctgaccagacccggcgagggcggcaccggcagccccggccccgccctgagaaccagaaccaagtgcgccgaccccatgagaggccccagaaagctggaggtggtggaggtgaagagcagacagatcaccatcagatgggagcccttcggctacaacgtgaccagatgccacagctacaacctgaccgtgcactactgctaccaggtgggcggccaggagcaggtgagagaggaggtgagctgggacaccgagaacagccacccccagcacaccatcaccaacctgagcccctacaccaacgtgagcgtgaagctgatcctgatgaaccccgagggcagaaaggagagccaggagctgatcgtgcagaccgacgaggacctgcccggcgccgtgcccaccgagagcatccagggcagcaccttcgaggagaagatcttcctgcagtggagagagcccacccagacctacggcgtgatcaccctgtacgagatcacctacaaggccgtgagcagcttcgaccccgagatcgacctgagcaaccagagcggcagagtgagcaagctgggcaacgagacccacttcctgttcttcggcctgtaccccggcaccacctacagcttcaccatcagagccagcaccgccaagggcttcggcccccccgccaccaaccagttcaccaccaagatcagcgcccccagcatgcccgcctacgagctggagacccccctgaaccagaccgacaacaccgtgaccgtgatgctgaagcccgcccacagcagaggcgcccccgtgagcgtgtaccagatcgtggtggaggaggagagacccagaagaaccaagaagaccaccgagatcctgaagtgctaccccgtgcccatccacttccagaacgccagcctgctgaacagccagtactacttcgccgccgagttccccgccgacagcctgcaggccgcccagcccttcaccatcggcgacaacaagacctacaacggctactggaacacccccctgctgccctacaagagctacagaatctacttccaggccgccagcagagccaacggcgagaccaagatcgactgcgtgcaggtggccaccaagggcgccgccacccccaagcccgtgcccgagcccgagaagcagaccgaccacaccgtgaagatcgccggcgtgatcgccggcatcctgctgttcgtgatcatcttcctgggcgtggtgctggtgatgaagaagagaaagctggccaagaagagaaaggagaccatgagcagcaccagacaggagatgaccgtgatggtgaacagcatggacaagagctacgccgagcagggcaccaactgcgacgaggccttcagcttcatggacacccacaacctgaacggcagaagcgtgagcagccccagcagcttcaccatgaagaccaacaccctgagcaccagcgtgcccaacagctactaccccgaccccttcgtgcccaccgccatcctggacttcagcctgaacaacgagacccacaccatggccagcgacaccagcagcctggtgcagagccacacctacaagaagagagagcccgccgacgtgccctaccagaccggccagctgcaccccgccatcagagtggccgacctgctgcagcacatcacccagatgaagtgcgccgagggctacggcttcaaggaggagtacgagagcttcttcgagggccagagcgccccctgggacagcgccaagaaggacgagaacagaatgaagaacagatacggcaacatcatcgcctacgaccacagcagagtgagactgcagaccatcgagggcgacaccaacagcgactacatcaacggcaactacatcgacggctaccacagacccaaccactacatcgccacccagggccccatgcaggagaccatctacgacttctggagaatggtgtggcacgagaacaccgccagcatcatcatggtgaccaacctggtggaggtgggcagagtgaagtgctgcaagtactggcccgacgacaccgagatctacaaggacatcaaggtgaccctgatcgagaccgagctgctggccgagtacgtgatcagaaccttcgccgtggagaagagaggcgtgcacgagatcagagagatcagacagttccacttcaccggctggcccgaccacggcgtgccctaccacgccaccggcctgctgggcttcgtgagacaggtgaagagcaagagcccccccagcgccggccccctggtggtgcactgcagcgccggcgccggcagaaccggctgcttcatcgtgatcgacatcatgctggacatggccgagagagagggcgtggtggacatctacaactgcgtgagagagctgagaagcagaagagtgaacatggtgcagaccgaggagcagtacgtgttcatccacgacgccatcctggaggcctgcctgtgcggcgacaccagcgtgcccgccagccaggtgagaagcctgtactacgacatgaacaagctggacccccagaccaacagcagccagatcaaggaggagttcagaaccctgaacatggtgacccccaccctgagagtggaggactgcagcatcgccctgctgcccagaaaccacgagaagaacagatgcatggacatcctgccccccgacagatgcctgcccttcctgatcaccatcgacggcgagagcagcaactacatcaacgccgccctgatggacagctacaagcagcccagcgccttcatcgtgacccagcaccccctgcccaacaccgtgaaggacttctggagactggtgctggactaccactgcaccagcgtggtgatgctgaacgacgtggaccccgcccagctgtgcccccagtactggcccgagaacggcgtgcacagacacggccccatccaggtggagttcgtgagcgccgacctggaggaggacatcatcagcagaatcttcagaatctacaacgccgccagaccccaggacggctacagaatggtgcagcagttccagttcctgggctggcccatgtacagagacacccccgtgagcaagagaagcttcctgaagctgatcagacaggtggacaagtggcaggaggagtacaacggcggcgagggcagaaccgtggtgcactgcctgaacggcggcggcagaagcggcaccttctgcgccatcagcatcgtgtgcgagatgctgagacaccagagaaccgtggacgtgttccacgccgtgaagaccctgagaaacaacaagcccaacatggtggacctgctggaccagtacaagttctgctacgaggtggccctggagtacctgaacagcggctag

SEQ ID NO: 41538 - DNA, 1740 bp, Artificial Sequence
  derived and/or modified sequence
atgaagaccgacagcatccagaacagaaccgccagagccctgggcaacctggccatggagcccgagagctgcggcgacatccactgcgccggcgccgtgcccctgctggtggagagcctgaccgcctgccaggacagccagtgcctgcagagcgtggccctgggcctggtgcccctgctggccggccagctgtgcggcgaggccggcgaggaggaggaggagggcagagaggccgccagctgggacttccccgaggagagaacccccgagagagcccagggcggcagcttcagaagcctgagaagctggctgatcagcgagggctacgccaccggccccgacgacatcagccccgactggagccccgagcagtgcccccccgagcccatggagcccgccagccccgcccccacccccaccagcctgagagcccccagaacccagagaacccccggcagaagccccgccgccgccatcgaggagccctggggcagagagggccccgccctgctgctgctgagcagattcagccaggcccccgaccccagcggcgccctggtgaccggccccgccctgtacggcctgctgacctacgtgaccggcgcccccggcccccccagccccagagccctgagaatcctgagcagactgacctgcaaccccgcctgcctggaggccttcgtgagaagctacggcgccgccctgctgagagcctggctggtgctgggcgtggcccccgacgactggcccgcccccagagccagacccaccctgcacagcagacacagagagctgggcgagagactgctgcagaacctgaccgtgcaggccgagagccccttcggcgtgggcgccctgacccacctgctgctgagcggcagccccgaggacagagtggcctgcgccctgaccctgcccttcatctgcagaaagcccagcctgtggagaagactgctgctggagcagggcggcctgagactgctgctggccgccctgaccagacccgccccccaccccctgttcctgttcttcgccgccgacagcctgagctgcctgcaggacctggtgagccccaccgtgagccccgccgtgccccaggccgtgcccatggacctggacagccccagcccctgcctgtacgagcccctgctgggccccgcccccgtgcccgcccccgacctgcacttcctgctggacagcggcctgcagctgcccgcccagagagccgccagcgccaccgccagccccttcttcagagccctgctgagcggcagcttcgccgaggcccagatggacctggtgcccctgagaggcctgagccccggcgccgcctggcccgtgctgcaccacctgcacggctgcagaggctgcggcgccgccctgggccccgtgcccccccccggccagcccctgctgggcagcgaggccgaggaggccctggaggccgccggcagattcctgctgcccggcctggaggaggagctggaggaggccgtgggcagaatccacctgggcccccagggcggccccgagagcgtgggcgaggtgttcagactgggcagacccagactggccgcccactgcgccagatggaccctgggcagcgagcagtgccccagaaagagaggcctggccctggtgggcctggtggaggccgccggcgaggaggccggccccctgaccgaggccctgctggccgtggtgatgggcatcgagctgggcgccagagtgcccgcctag

SEQ ID NO: 41539 - DNA, 1740 bp, Artificial Sequence
  derived and/or modified sequence
atgaagactgatagtatccagaataggacagcgagggctctcggcaatctcgccatggaacccgagagttgcggcgatatccattgcgctggagccgtgcctctcctcgtcgaatccctcaccgcctgtcaggactcccagtgcctccagtccgtggctctggggctggttcctctcttggccggtcagttgtgcggcgaagccggggaagaagaggaggagggtcgggaagccgcctcatgggatttcccagaagagcgtactcccgagagagcccaaggcgggtcgttccgtagtcttagatcctggctgatttccgaggggtatgcaaccggcccagacgatatttctcccgattggtcgcccgaacagtgtcctcccgagccaatggaacctgcgtcacccgcccctacccctacctccctcagagccccccgcacacagagaaccccgggcagatccccggcagctgcaattgaggaaccatggggacgcgagggacctgccctgctgctactatcaaggttctcccaggcgcccgacccttctggagccctggtgaccggacctgccctctatgggctgctgacatacgtcactggggccccgggcccgcctagtccccgggctctgagaattttatctcggctgacctgtaatcccgcttgtcttgaagcatttgtgcgcagctacggcgcggctctactgcgcgcctggctggtcttgggcgtggcccctgatgactggcccgcaccaagagccaggcctaccctacactctaggcacagggagctgggggaaaggctgcttcaaaatctaacagtgcaggccgagtctccttttggcgtgggggcgttgacccacctgctgctgtcgggctctccagaagatcgagtggcctgcgccctaactctcccctttatttgtaggaagccctccctgtggagacgtttgctgctagaacaggggggcctgaggctgcttctagccgctctgacccgccccgcaccccaccccctttttctgttcttcgcggccgatagtctctcatgcttgcaggatctagtctcgcccactgttagccccgctgttcctcaggccgtcccgatggacctggattctcctagcccctgcctgtatgagcctctgctggggccagcccccgttcccgcgcctgacctacacttcctgctagactctgggcttcagttacccgcccagcgagcagcatcagcaaccgcgagcccattttttcgcgctctcctctccgggtcatttgctgaggcccagatggatctggtaccactgagaggattgtctccgggcgctgcctggccagtccttcaccatctgcatgggtgccgcggatgtggggccgctctcggtcctgtgccgccacccggtcagcctctgctcggctcagaggcagaggaagccttagaggcagcaggtcgtttcctgttacccgggctggaggaagaacttgaggaagcagtcggccgcatccacttgggtccacagggggggcccgagtctgtgggcgaggtctttagactgggaagacctaggttagccgctcattgcgcaagatggaccctgggatccgaacagtgccctagaaaacgcggtctggcccttgttggactcgtagaagccgcgggggaggaggccgggccattgaccgaggctctccttgctgtggtgatgggaattgaacttggcgcacgcgttcctgcctag

SEQ ID NO: 41540 - DNA, 1740 bp, Artificial Sequence
  derived and/or modified sequence
atgaagacagacagcatccagaacagaacagcccgggccctgggcaacctggccatggagcctgagagctgtggggacatccactgtgccggggctgtgcccctgctggtggagagcctgacagcctgccaggacagccagtgcctgcagagcgtggccctgggcctggtgcccctgctggccggccagctgtgtggggaggccggggaggaggaggaggagggccgggaggccgcctcctgggacttccctgaggagaggaccccagagcgggcccagggcggcagcttccgcagcctgcgctcctggctgatcagcgagggctacgccactggaccagatgacatcagcccagactggagccctgagcagtgccccccagagcccatggagcccgccagccctgcccccacccccaccagcctgcgggcccccaggacccagaggaccccaggccgcagccctgctgctgccatcgaggagccctggggccgggagggccctgccctgctgctgctgagccgcttcagccaggccccagaccccagcggggccctggtgacaggccctgccctgtatggcctgctgacctacgtgactggagcccctggcccccccagcccccgggccctgcgcatcctgagccggctgacctgcaacccagcctgcctggaggcctttgtgcgctcctatggagctgccctgctgcgggcctggctggtgctgggcgtggccccagatgactggccagccccccgggcccggcccaccctgcacagccgccaccgggagctgggggagcggctgctgcagaacctgactgtgcaggccgagagcccctttggagtgggcgccctgacccacctgctgctgagcggcagccctgaggacagagtggcctgtgccctgaccctgcccttcatctgcaggaagcccagcctgtggaggcggctgctgctggagcagggcggcctgcggctgctgctggccgccctgaccaggcctgccccccaccccctcttcctgttctttgctgctgacagcctgagctgcctgcaggacctggtgagccccaccgtgtccccagctgtgccccaggccgtgcccatggacctggacagccccagcccctgcctgtatgagcccctgctgggccctgcccctgtgcctgccccagacctgcacttcctgctggacagcggcctgcagctgcctgcccagagagctgccagcgccacagccagccccttcttccgggccctgctgagcggcagctttgctgaggcccagatggacctggtgcccctgcggggcctgagccctggagctgcctggcctgtgctgcaccacctgcacggctgccggggctgtggggccgccctgggccctgtgcccccacctggccagcccctgctgggcagcgaggccgaggaggccctggaggccgccggccgcttcctgctgcccggcctggaggaggagctggaggaggccgtgggccgcatccacctgggcccccagggcggccctgagagcgtgggggaggtgttccggctgggccggccccggctggccgcccactgtgcccgctggaccctgggcagcgagcagtgccccaggaagaggggcctggccctggtgggcctggtggaggccgccggggaggaggccggccccctgacagaggccctgctggccgtggtgatgggcatcgagctgggcgcccgggtgcctgcctag

SEQ ID NO: 41541 - DNA, 1740 bp, Artificial Sequence
  derived and/or modified sequence
atgaagaccgacagcatccagaaccggaccgcccgggccctgggcaatctcgcgatggagccggagagctgtggggacatccactgcgctggagctgtgccactgctggtagaatcgctaactgcctgccaagactcgcaatgtttgcagtctgtggctttgggactggtcccactgctagctgggcagctatgtggtgaagcaggcgaagaggaagaggagggcagagaggcagcgtcttgggacttccctgaagagcgaactcctgaaagagcccaaggagggtcttttcgctcactcaggtcgtggctgatttcagaggggtatgcaacaggaccagacgacatctctcccgattggtccccagaacagtgtcctcccgaaccaatggagcctgccagtcccgcccccacacctacgtcactgagagctccgcgcacgcagcgcacccctggcaggagtccagccgcggcaattgaagagccctggggaagagaggggcccgccctgctgctgctaagtcgctttagccaagcccccgaccctagcggcgccctggtaaccggcccagcactgtacggcctgctgacatacgtcactggtgctccgggcccacccagcccgcgggctctgcgcattctgagtaggctgacatgcaacccagcatgtcttgaagccttcgttagaagctacggggccgcgttactccgggcgtggttggtgcttggagtggcaccggatgactggcccgccccgagggcccggccaaccctgcatagtagacacagagagctgggcgagcggttactgcagaatcttaccgtccaggcggaatcaccgttcggggttggagcacttactcatctgcttctctccggcagcccagaagatagagtagcttgtgccttgaccctcccattcatttgtaggaaaccatcactctggcgtagactgttgttggagcagggcggattgcggctacttcttgcggctctgactagaccagccccccaccctctgtttctcttcttcgcagcggattccctgagttgtcttcaggatctcgtatcacccacggtgtcccccgcggttccccaggcagtgccgatggacttagactcgccatcaccctgtttgtatgaacctctgctgggtcccgccccggttcccgcccctgacttacatttcctactggactccggcttgcagctccctgcccagagagcggcctctgccactgcttccccatttttcagggcgctgctgtctggaagtttcgctgaggctcaaatggatctcgtgccactgagggggctgagcccaggtgcagcatggccagtgctgcaccatctgcatggctgcagaggatgcggggcagcactgggtcctgtccctccccccggacagcctctactgggatctgaagccgaggaagctctggaggccgctggccgatttctcctccccggactggaagaagaactggaagaggcagttgggcggattcatcttggtccgcagggtgggccggaatccgtgggagaagtgttcagacttggccgtccacggctggcagcccattgcgcaagatggacactcggaagcgagcagtgcccgagaaaaaggggtctggccctcgtggggctggttgaggccgccggtgaggaggcgggtcccctgacagaggctttgctggcagtggtaatggggattgaactgggtgctagggttccagcatag

SEQ ID NO: 41542 - DNA, 1740 bp, Artificial Sequence
  derived and/or modified sequence
atgaaaactgattccatccagaatcgcaccgcacgcgcactgggtaatctggctatggagccagagtcgtgcggggatatccactgtgccggtgccgtgcccctgttagtagaatctctgaccgcgtgtcaggattcccagtgtctccagagcgtagccttgggcttagtgcctctcctggctggacagctatgtggcgaagcgggtgaagaggaggaagaaggccgtgaggcggcatcatgggattttcccgaagagaggacacccgagagagcccaaggcggtagttttaggtctctccgatcctggttaatcagcgaggggtatgcgaccggcccagatgatatttcgcccgactggagccccgaacagtgccccccagagccaatggagcccgcatcccccgcacctacacccacttcgctcagagcccctagaacccagaggacccccggtcgcagtcccgctgcggcaatcgaagagccctggggcagagaaggcccagccctactgcttctttcccggttcagtcaagctcctgatccaagcggcgctctggtgacaggacctgctctctatggtctgctcacatatgtgaccggggcacccggaccaccaagtccaagggcgttgaggatcctaagtcgcctgacttgcaatcctgcttgcctggaggcctttgtacgatcctacggcgctgctttactgcgcgcttggttggtattaggggttgctcctgacgattggcctgcaccccgagctaggccaaccttgcattcccgccatagagaactcggcgagcgactgcttcagaatctcacagtccaggcagagtctcccttcggggtgggagccttaacgcacctcctgctgtccgggtcccctgaagatagggtcgcctgcgcccttaccctgccattcatctgccggaaaccgtccctatggagacggctactgcttgaacaggggggactcagacttctgctggccgcactgaccagaccagctccccaccctctgtttctgttcttcgccgctgactctctctcctgtctccaggacttggtgtcacccacagtcagccccgctgttccacaggccgtgcctatggacctggatagcccgagcccatgtttatacgagccgctgctgggaccagcccctgtgcccgctccagaccttcacttcttgcttgactccggtctccaactccccgctcagagggctgcatccgctaccgcgtctccgttctttcgcgctctactgtccgggtcttttgccgaggcccagatggacctggttcccttgaggggtctgtcccccggagctgcttggccggtcctgcaccacctgcacggctgcagaggatgtggtgccgcactgggtcctgtgccccctccaggccaaccattgctcggctctgaagctgaggaagccctggaggcggcaggtcggttcctcctgcctgggctggaggaggagctggaggaggctgttggacggatccatctgggtccccagggaggcccagagagtgttggcgaagtgttccgcctagggaggcctcgcctcgccgctcattgcgccagatggactctgggtagcgaacaatgcccgcgaaagagagggctcgcactcgtaggcctagtggaagcggcaggagaagaggctggtcccctgaccgaagctctcctggctgtggttatgggcatagagctgggagcgagggtacctgcctag

SEQ ID NO: 41543 - DNA, 2072 bp, Artificial Sequence
  derived and/or modified sequence
ggaccgaagtgcgcagactcggaggcatactccctttggtgaccattcttcagtgcatgaagacagacagcatccagaaccgaacggcccgtgccctggggaacttagccatggaacctgagagctgtggggacatccactgtgctggtgctgttcccctgcttgtggagagcctgacagcctgccaggactcgcagtgcctacagagcgtggctctgggacttgtgcctctcctggctgggcagctgtgtggtgaggctggtgaggaggaagaagagggaagagaagctgcttcctgggactttcctgaggagaggacccctgagcgggcacagggtggaagcttccggagcctcaggtcgtggctgatctccgagggctatgccacaggccctgatgacatctcccccgactggtctcctgagcagtgtccgccggagcccatggagccggccagccccgccccgaccccgacctcgctgcgggcaccacgcacccaacgcactccgggccgcagccccgccgccgccatcgaggagccttggggacgcgaagggccagccctgctgctgctgtcgcgcttttcccaggcccctgacccaagtggggcacttgtgaccggcccggcgctgtacggcctgctgacctatgtgaccggcgcaccgggcccgcccagcccacgtgcactgcgcattctgtcacgcctcacctgcaaccctgcctgcctcgaggccttcgtgcgcagctatggcgcggcgctgctgcgggcctggctggtgctgggggtggcgcctgacgattggccggcaccacgtgcccggcccactctccacagccggcaccgagagctgggggagaggctactgcagaacctgacggttcaggctgagtcgccctttggggttggggccctgacgcacctgctgctctctgggagccctgaggaccgagtggcctgcgcgctgaccctgcccttcatctgccggaagccctctctgtggcgccggctgcttctggagcagggtggtctccggctcctccttgcggcgctgacccggccggccccacacccgctcttcctcttctttgccgcggactccctttcctgcctccaagacctggtgtctcccactgtgagcccagctgtcccacaggcagtccccatggacctagactcaccttccccttgcctctatgaacctctgctgggcccagcccctgtcccagctcccgacctgcacttcctgctggactcaggcctccagctccctgcccagcgagcggcctcagccaccgcctcccctttcttccgggccctgctgtcaggcagctttgcagaagcccagatggacctggtgcccctgcgaggtctgtcgcctggtgcagcctggcctgtcctgcatcatttgcatggttgtcgggggtgtggggctgccctggggcccgtgcccccaccaggccagcccctgctgggttcagaggccgaggaggcactggaggctgctggccgtttcctactgcctgggctggaggaggagctggaagaggccgtgggccgcatccacctgggaccccagggtggcccggagtcagtgggtgaggtgttccgcctgggccggccccggctggctgcccactgtgcccgctggacactggggtcagagcagtgcccgaggaagcggggtctggccctggtggggcttgtggaggcagcaggtgaagaggcagggcccctgacggaggctttgctggctgtggtgatggggattgagttgggggcaagggtccctgcctagactgttgacgtcccctgggaaggggacccaaggatgaattggctgtgaaggatcctccctgagactggcaagggaggaggctgagcagaaggagtcatcatggaggagcggtgagaacatggaaccggactccaagatgacgatctaaagacccgggagcgagaagccaaggccaggttctgggtgtagggcccagagaagcagaacagcccagagccccaggtgcctggcctggcctagacctctggaattgagattaaacaatttggagttgga

SEQ ID NO: 41544 - protein, 1006 aa, Artificial Sequence
  derived and/or modified sequence
MSAYYRNNWSEEDPDYPDYSGSQNRTQGYLKTQGYPDVPGPLNNPDYPGTRSNPYSVASRTRPDYPGSLAEPNYPRSLSNPDYSGTRSNAYSAASRTSPDHPTSLPEPDYSEFQSHPYHRASSRQPDYPGSQRNPDFAGSSSSGNYAGSRTHPDHFGSLEPDYPGAQSNSDHPGPRANLNHPGSRKNLEHTSFRINPYADSLGKPDYPGADIQPNSPPFFGEPDYPSAEDNQNLPSTWREPDYSDAENGHDYGSSETPKMTRGVLSRTSSIQPSFRHRSDDPVGSLWGENDYPEGIEMASMEMANSYGHSLPGAPGSGYVNPAYVGESGPVHAYGNPPLSECDWHKSPQGQKLIASLIPMTSRDRIKAIRNQPRTMEEKRNLRKIVDKEKSKQTHRILQLNCCIQCLNSISRAYRRSKNSLSEILNSISLWQKTLKIIGGKFGTSVLSYFNFLRWLLKFNIFSFILNFSFIIIPQFTVAKKNTLQFTGLEFFTGVGYFRDTVMYYGFYTNSTIQHGNSGASYNMQLAYIFTIGACLTTCFFSLLFSMAKYFRNNFINPHIYSGGITKLIFCWDFTVTHEKAVKLKQKNLSTEIRENLSELRQENSKLTFNQLLTRFSAYMVAWVVSTGVAIACCAAVYYLAEYNLEFLKTHSNPGAVLLLPFVVSCINLAVPCIYSMFRLVERYEMPRHEVYVLLIRNIFLKISIIGILCYYWLNTVALSGEECWETLIGQDIYRLLLMDFVFSLVNSFLGEFLRRIIGMQLITSLGLQEFDIARNVLELIYAQTLVWIGIFFCPLLPFIQMIMLFIMFYSKNISLMMNFQPPSKAWRASQMMTFFIFLLFFPSFTGVLCTLAITIWRLKPSADCGPFRGLPLFIHSIYSWIDTLSTRPGYLWVVWIYRNLIGSVHFFFILTLIVLIITYLYWQITEGRKIMIRLLHEQIINEGKDKMFLIEKLIKLQDMEKKANPSSLVLERREVEQQGFLHLGEHDGSLDLRSRRSVQEGNPRA

SEQ ID NO: 41545 - DNA, 3021 bp, Artificial Sequence
  derived and/or modified sequence
atgagcgcctactacagaaacaactggagcgaggaggaccccgactaccccgactacagcggcagccagaacagaacccagggctacctgaagacccagggctaccccgacgtgcccggccccctgaacaaccccgactaccccggcaccagaagcaacccctacagcgtggccagcagaaccagacccgactaccccggcagcctggccgagcccaactaccccagaagcctgagcaaccccgactacagcggcaccagaagcaacgcctacagcgccgccagcagaaccagccccgaccaccccaccagcctgcccgagcccgactacagcgagttccagagccacccctaccacagagccagcagcagacagcccgactaccccggcagccagagaaaccccgacttcgccggcagcagcagcagcggcaactacgccggcagcagaacccaccccgaccacttcggcagcctggagcccgactaccccggcgcccagagcaacagcgaccaccccggccccagagccaacctgaaccaccccggcagcagaaagaacctggagcacaccagcttcagaatcaacccctacgccgacagcctgggcaagcccgactaccccggcgccgacatccagcccaacagcccccccttcttcggcgagcccgactaccccagcgccgaggacaaccagaacctgcccagcacctggagagagcccgactacagcgacgccgagaacggccacgactacggcagcagcgagacccccaagatgaccagaggcgtgctgagcagaaccagcagcatccagcccagcttcagacacagaagcgacgaccccgtgggcagcctgtggggcgagaacgactaccccgagggcatcgagatggccagcatggagatggccaacagctacggccacagcctgcccggcgcccccggcagcggctacgtgaaccccgcctacgtgggcgagagcggccccgtgcacgcctacggcaacccccccctgagcgagtgcgactggcacaagagcccccagggccagaagctgatcgccagcctgatccccatgaccagcagagacagaatcaaggccatcagaaaccagcccagaaccatggaggagaagagaaacctgagaaagatcgtggacaaggagaagagcaagcagacccacagaatcctgcagctgaactgctgcatccagtgcctgaacagcatcagcagagcctacagaagaagcaagaacagcctgagcgagatcctgaacagcatcagcctgtggcagaagaccctgaagatcatcggcggcaagttcggcaccagcgtgctgagctacttcaacttcctgagatggctgctgaagttcaacatcttcagcttcatcctgaacttcagcttcatcatcatcccccagttcaccgtggccaagaagaacaccctgcagttcaccggcctggagttcttcaccggcgtgggctacttcagagacaccgtgatgtactacggcttctacaccaacagcaccatccagcacggcaacagcggcgccagctacaacatgcagctggcctacatcttcaccatcggcgcctgcctgaccacctgcttcttcagcctgctgttcagcatggccaagtacttcagaaacaacttcatcaacccccacatctacagcggcggcatcaccaagctgatcttctgctgggacttcaccgtgacccacgagaaggccgtgaagctgaagcagaagaacctgagcaccgagatcagagagaacctgagcgagctgagacaggagaacagcaagctgaccttcaaccagctgctgaccagattcagcgcctacatggtggcctgggtggtgagcaccggcgtggccatcgcctgctgcgccgccgtgtactacctggccgagtacaacctggagttcctgaagacccacagcaaccccggcgccgtgctgctgctgcccttcgtggtgagctgcatcaacctggccgtgccctgcatctacagcatgttcagactggtggagagatacgagatgcccagacacgaggtgtacgtgctgctgatcagaaacatcttcctgaagatcagcatcatcggcatcctgtgctactactggctgaacaccgtggccctgagcggcgaggagtgctgggagaccctgatcggccaggacatctacagactgctgctgatggacttcgtgttcagcctggtgaacagcttcctgggcgagttcctgagaagaatcatcggcatgcagctgatcaccagcctgggcctgcaggagttcgacatcgccagaaacgtgctggagctgatctacgcccagaccctggtgtggatcggcatcttcttctgccccctgctgcccttcatccagatgatcatgctgttcatcatgttctacagcaagaacatcagcctgatgatgaacttccagccccccagcaaggcctggagagccagccagatgatgaccttcttcatcttcctgctgttcttccccagcttcaccggcgtgctgtgcaccctggccatcaccatctggagactgaagcccagcgccgactgcggccccttcagaggcctgcccctgttcatccacagcatctacagctggatcgacaccctgagcaccagacccggctacctgtgggtggtgtggatctacagaaacctgatcggcagcgtgcacttcttcttcatcctgaccctgatcgtgctgatcatcacctacctgtactggcagatcaccgagggcagaaagatcatgatcagactgctgcacgagcagatcatcaacgagggcaaggacaagatgttcctgatcgagaagctgatcaagctgcaggacatggagaagaaggccaaccccagcagcctggtgctggagagaagagaggtggagcagcagggcttcctgcacctgggcgagcacgacggcagcctggacctgagaagcagaagaagcgtgcaggagggcaaccccagagcctag

SEQ ID NO: 41546 - DNA, 3021 bp, Artificial Sequence
  derived and/or modified sequence
atgagtgcttattaccggaataattggtctgaggaagatccggactacccagattactcgggttctcagaatcgtacacaaggctacctgaagactcagggctatccagacgtgcccggacctctcaataaccctgactacccaggaacccgctctaacccatactctgtggcctcgaggacaaggcccgactatcctgggtcactggccgaacccaactatccaaggtctcttagcaatcctgattactctgggactcgctccaacgcatactctgcggcctcaaggacttctcccgatcaccccactagccttccagagcccgactactcagagttccagtctcatccctaccacagggcatcatcacggcaacccgattatccaggttcccaaagaaatcctgacttcgcagggagctccagctccggaaattatgccggatctaggacccaccctgatcattttggatcccttgaaccagactatcccggcgctcaatcaaattccgatcaccctggacctagggctaatctgaaccacccaggaagtcgtaagaatctggagcacactagcttccggatcaacccttatgctgactcccttggtaaacctgactatcccggcgccgacattcagcccaatagccctcccttcttcggcgagcctgattacccatcagccgaagataaccagaatcttccttcaacttggagggaaccagattatagcgacgctgaaaatggacatgattacggtagctccgaaacaccaaaaatgacacgaggagtgttaagtagaacctcttccattcaaccctccttccgccaccggtcagacgaccctgtggggagcctctggggggagaatgactacccagaaggaatcgagatggcatcaatggagatggccaattcctatgggcactcgttgcccggagcgcccggcagtggttacgtgaaccctgcttatgtcggcgaatctgggccagtacacgcctacggtaacccgcctctcagcgagtgcgattggcacaaatcaccccaagggcaaaagctaattgcctcactgatacctatgacatctcgcgataggattaaagcgattaggaaccagccaaggaccatggaggagaaacgcaacctaagaaagattgtggacaaagagaaatctaaacagacccatcgtattcttcagctgaattgctgcatccagtgcctgaatagcatttctcgtgcctatcgccggtccaagaactccctgtctgaaattttgaattctatatctctctggcaaaagacgctgaaaattatcggcggaaaatttggtacctctgtcctgtcctatttcaacttcctaagatggctcctcaagtttaacatcttcagtttcattctgaacttcagctttataatcatccctcagttcaccgttgctaaaaagaacacattgcagtttaccgggctggaatttttcacaggggtgggctacttcagggatacagtgatgtactacggcttctataccaatagcactattcagcacggcaattccggcgcgtcatataacatgcagttagcttacatcttcacaattggcgcctgcttaacaacttgcttcttcagtttgttgttctctatggctaaatatttccggaacaacttcataaacccccacatctactccggaggcattaccaagctgattttttgctgggactttaccgtgacacatgagaaggctgtaaagctgaagcagaagaatttaagtacggaaataagggaaaacctttcagaattgcgccaggagaactcaaaactgacttttaatcagctcctcactagattctctgcttacatggtggcgtgggtggtgtctaccggagtggccatcgcttgttgcgctgcagtgtactacctggcagaatacaatctggagtttcttaagactcattcaaatcctggggcagtgctgctgctgccttttgtggtgtcgtgtataaacctcgctgtgccttgcatttacagcatgttccgactcgtggagcgttatgagatgccccgtcacgaggtgtacgtgcttctcattcgcaatatctttctgaagatatcgattatcgggattttatgttactattggttaaacactgtggctctcagcggcgaagagtgctgggaaactctcataggccaggatatctataggctgctgttgatggatttcgtgttctccctagtcaactccttcttgggggaatttttgcgtcggataatcggtatgcagctgatcacttcactcggtctgcaagaattcgacatcgcgcgtaatgttctggaactgatatatgcccagacattggtgtggatcgggattttcttttgccccctgctgccgttcatacagatgatcatgttgtttattatgttctatagtaagaatatctcattgatgatgaacttccagccgcccagcaaagcctggcgggccagccagatgatgaccttctttatcttcctccttttcttcccaagcttcactggcgtactgtgtactctagctattaccatttggcggcttaagccaagcgccgactgcggcccttttcgtggtttgccactatttatccattcaatttacagttggatcgatacattgtctacaagacctggatacctgtgggtcgtctggatttaccgcaacctcattggctccgtacatttctttttcatcctcacacttattgtactcataattacatacctatactggcagatcaccgaagggcgcaaaattatgatccgcctgctgcatgagcagatcatcaacgagggaaaagataagatgtttctgatcgagaagctcatcaaattgcaggacatggaaaagaaggctaacccatccagcctggtgctggaaaggcgcgaggttgaacaacaggggtttctgcacctgggagaacatgacgggtcgctggatctccgatcgcgacgttccgtccaggagggcaaccctagagcctag

SEQ ID NO: 41547 - DNA, 3021 bp, Artificial Sequence
  derived and/or modified sequence
atgtctgcatactacaggaataactggtccgaggaggaccccgactatcctgactacagcggtagccagaatcgtacccaaggctatcttaagacgcagggataccccgacgtgcccggaccactgaataatccagactaccccggtacacggagtaacccctacagcgtcgcttccagaacacggcccgattaccctgggtccctggccgagcccaattaccctagatctcttagtaatcccgactattctggaacccgaagcaatgcctatagcgccgcctcacgtacttctcccgaccaccccaccagcctgcctgagcccgactattccgaattccagtcccatccatatcatcgtgcaagtagtaggcagcccgattatccgggttctcagcgcaaccctgactttgccgggagctcctctagcggcaactacgccggcagtcgcactcacccagaccatttcggatcactggaaccagactacccaggggctcagagcaactccgatcatccagggcctcgagctaatctcaatcacccaggctcaaggaaaaatcttgagcatacctcctttcgtattaacccctacgcggattctcttggtaagccagactaccccggggccgatatccagcccaactctcctcccttttttggcgagcccgactatcccagtgcagaagataaccagaatctaccgtctacatggcgcgaacctgactactcggatgctgagaacgggcatgactacgggagctcagaaacccctaaaatgacaaggggtgttctgtccaggacctctagcattcagcctagcttcaggcaccgttctgacgaccctgttggaagtctgtggggggagaacgattaccccgaagggatagaaatggcatccatggagatggccaattcttatgggcacagcctccccggggcccccggatctggctatgtgaatccagcatacgtgggggagtccggcccagtgcacgcatatggcaacccccccctgtctgaatgtgactggcataaaagccctcagggccagaagctgatcgcatctctgattcccatgacttcaagagataggatcaaggctatccgcaatcagcccagaactatggaggagaagcggaacctcagaaagattgtggataaagaaaagtctaaacagacacaccggatactccagcttaattgctgcatccagtgtctaaactccatctcacgggcctatcggcgctcaaagaattcattgtctgaaattcttaactcgatctcactctggcagaaaactctcaagatcatcggtggcaaattcggcacttcagtactcagctacttcaacttcctgcgttggctgcttaagtttaacattttttccttcatcctgaatttttcctttattatcatcccccaatttactgttgccaagaaaaatacattgcagttcacaggcctagaattttttacgggagtaggctacttccgggatactgtgatgtattatggcttctacactaactctactattcagcacgggaacagcggagctagttacaatatgcagctagcctatatcttcacaataggcgcatgtttgaccacttgtttcttctccttgctgttctcaatggccaaatatttccgtaataactttatcaatccccatatctatagcggcggcatcactaaactgatattttgctgggatttcaccgtaacccatgagaaggccgttaagcttaaacaaaaaaatctgagcacagagatacgtgaaaatctgagcgagctgaggcaggaaaactccaagctgacattcaaccaactcctgacccgcttttcggcatacatggtcgcgtgggttgtgtctaccggagtcgcaatcgcttgttgcgctgcagtctactatctggccgagtataacttggaattcctcaagactcattctaaccccggcgccgttctgctcctcccattcgtggtttcctgtatcaatcttgccgtaccttgtatttactccatgttccgtctcgtcgagcgatatgagatgcccagacatgaggtctacgtcttgttaattcgcaatatttttctgaagatttccatcatcggaatcctatgttactactggttgaatacagtagctttgtctggcgaagagtgctgggagacactgattggccaggatatctaccgcctcctactcatggactttgtcttcagcctggtaaactctttcctcggtgagtttcttagaaggatcataggcatgcaactgataacgtcactcggcctgcaggagtttgatattgcaagaaacgtactggaattgatatatgctcagaccctggtctggatcggtatctttttctgccccctgctgccctttatccagatgataatgctcttcatcatgttttactctaagaacattagtctgatgatgaattttcagccaccctctaaagcttggcgggcctctcagatgatgactttcttcatcttcctcctctttttcccttcctttaccggggtgttgtgtacccttgccattacaatttggcgcctcaaaccgagcgccgattgcggcccctttcgcgggctccctctcttcattcactcgatctattcttggattgacactctctctactcgcccaggctacctgtgggtggtgtggatttaccggaatcttataggctcggtgcactttttctttatccttaccttaatcgtcctgattatcacctatttatactggcagatcaccgagggccggaagataatgataagacttctgcacgaacagatcatcaacgaaggaaaagataagatgtttctgatcgagaaattaatcaaattgcaggacatggagaagaaggcaaatccaagttcattggtattggaacggagggaagttgagcagcagggctttctccatctcggcgagcatgatgggtcccttgatctgagaagtcggcggtctgttcaagagggcaaccccagggcttag

SEQ ID NO: 41548 - DNA, 3021 bp, Artificial Sequence
  derived and/or modified sequence
atgtctgcctactacagaaacaactggagcgaggaggaccctgactacccagactacagcggcagccagaacagaacccagggctacctgaagacccagggctacccagatgtgcccggccccctgaacaacccagactacccaggcaccaggagcaacccctacagcgtggccagcaggaccaggccagactacccaggcagcctggccgagcccaactaccccaggagcctgagcaacccagactacagcggcaccaggagcaatgcctacagcgctgccagcaggaccagcccagaccaccccaccagcctgcctgagccagactacagcgagttccagagccacccctaccaccgggccagcagccggcagcctgactacccaggcagccagagaaatccagactttgctggcagcagcagcagcggcaactatgccggcagcaggacccacccagaccacttcggcagcctggagccagactacccaggggcccagagcaacagcgaccaccctggcccccgggccaacctgaaccaccctggcagcaggaagaacctggagcacaccagcttccgcatcaacccctatgctgacagcctgggcaagccagactacccaggagctgacatccagcccaacagcccccccttcttcggggagccagactaccccagcgctgaggacaaccagaacctgcccagcacctggagggagccagactacagtgatgctgaaaatggacatgactatggcagcagcgagacccccaagatgacccggggcgtgctgagcaggaccagcagcatccagcccagcttccgccacagaagtgatgatcctgtgggcagcctgtggggagaaaatgactacccagagggcatcgagatggcctccatggagatggccaacagctatggccacagcctgcccggggcccctggcagcggctacgtgaacccagcctacgtgggggagagcggccctgtgcacgcctacggcaacccccccctgtctgaatgtgactggcacaagagcccccagggccagaagctgattgccagcctcatccccatgaccagccgggaccgcatcaaggccatccggaaccagcccaggaccatggaggagaagaggaacctgaggaagatcgtggacaaggagaagagcaagcagacccaccgcatcctgcagctgaactgctgcatccagtgcctgaacagcatcagccgggcctacagaagaagcaagaacagcctgtctgagatcctgaacagcatcagcctgtggcagaagaccctgaagatcatcggcggcaagtttggcacctctgtgctgagctacttcaacttcctgcgctggctgctgaagttcaacatcttctccttcatcctgaacttctccttcatcatcatcccccagttcaccgtggccaagaagaacaccctgcagttcaccggcctggagttcttcaccggggtgggctacttccgggacacagtgatgtactacggcttctacaccaacagcaccatccagcacggcaacagcggggccagctacaacatgcagctggcctacatcttcaccatcggggcctgcctgaccacctgcttcttcagcctgctcttctccatggccaagtacttcaggaacaacttcatcaacccccacatctacagcggcggcatcaccaagctgatcttctgctgggacttcaccgtgacccatgagaaggctgtgaagctgaagcagaagaacctgagcacagagatccgggagaacctgtctgagctgcggcaggagaacagcaagctgaccttcaaccagctgctgacccgcttcagcgcctacatggtggcctgggtggtgtccactggagtggccatcgcctgctgtgccgctgtgtactacctggccgagtacaacctggagttcctgaagacccacagcaaccctggagctgtgctgctgctgccctttgtggtgtcctgcatcaacctggccgtgccctgcatctacagcatgttccggctggtggagagatatgagatgcccaggcatgaggtgtatgtgctgctgatccggaacatcttcctgaagatcagcatcatcggcatcctgtgctactactggctgaacacagtggccctgagcggggaggagtgctgggagaccctgattggccaggacatctaccgcctgctgctgatggactttgtgttcagcctggtgaacagcttcctgggggagttcctgcggcgcatcatcggcatgcagctgatcaccagcctgggcctgcaggagtttgatattgccagaaatgtgctggagctgatctatgcccagaccctggtgtggattggcatcttcttctgccccctgctgcccttcatccagatgatcatgctgttcatcatgttctacagcaagaacatcagcctgatgatgaacttccagccccccagcaaggcctggagggccagccagatgatgaccttcttcatcttcctgctcttcttccccagcttcaccggggtgctgtgcaccctggccatcaccatctggaggctgaagcccagcgctgactgtggccccttccggggcctgcccctcttcatccacagcatctacagctggattgacaccctgagcaccaggcctggctacctgtgggtggtgtggatctacagaaacctgattggctctgtgcacttcttcttcatcctgaccctcatcgtgctgatcatcacctacctgtactggcagatcacagagggcaggaagatcatgatccggctgctgcacgagcagatcatcaatgaaggcaaggacaagatgttcctgattgagaagctgatcaagctgcaggacatggagaagaaggccaaccccagcagcctggtgctggagcggcgggaggtggagcagcagggcttcctgcacctgggggagcatgatggcagcctggacctgcggagccgccgctctgtgcaggagggcaacccccgggcctag

SEQ ID NO: 41549 - DNA, 3021 bp, Artificial Sequence
  derived and/or modified sequence
atgagcgcctactaccggaacaactggagcgaggaggaccccgactacccagattattctggatcacagaaccggacccagggatacctcaagacccaaggctatcccgatgtgcccggccccctgaacaatcccgactatcccggtacaaggtccaacccttacagtgtcgcctcacgcacccgaccagactatcctggctctctggctgagccgaactaccctaggtctctgagcaaccctgattatagcggaacacgcagtaatgcctatagtgccgccagtagaacatctcccgaccatccgactagtctccctgagcccgattattccgaattccagtcacacccttaccatcgggcctctagcaggcaacccgactaccctggaagccaacgtaatccagattttgccggtagctcctcctctggaaattatgccggtagccgcacacaccccgatcactttggttccctcgaaccagattatccaggcgcacaaagcaacagcgatcacccaggaccccgagctaacctgaaccaccccggctcacggaagaaccttgaacacaccagttttagaatcaacccttatgcagatagcctggggaagccagattatcccggtgctgatattcaaccaaactcacctcccttttttggagaacctgactatccgagcgccgaggacaatcagaacttaccctccacttggcgagaacccgactattcggatgccgaaaacggacatgactatggaagcagtgaaacccccaagatgacaagaggcgtactgtcccggacaagctcaatccagccttccttccgccaccgcagcgatgacccggttgggagtctttggggagagaatgattatcctgaggggatcgagatggcctctatggagatggcaaactcatacggccattcactcccaggggctcctggttctggttacgtcaaccctgcttacgtgggcgagtccgggcccgtgcacgcttacggcaacccccccttgtctgagtgcgattggcacaagtcaccccagggacagaagttaatagccagcctgatccctatgacatctagggatcgcataaaggccatcagaaatcagcccaggacaatggaggaaaagaggaacctgaggaagattgtcgataaggagaaaagcaagcagacgcatcgaattctgcagctgaactgttgcatccagtgtctgaactccatttcgcgggcctacaggagatcaaagaattcgctgagcgaaattttaaactccatcagcctgtggcagaagactctgaagatcatcggtggaaagtttggtacctctgttctgtcctacttcaatttcctaagatggctcctcaaatttaacatttttagtttcatcctcaacttcagctttatcattattccccagttcacagttgctaaaaaaaatactctgcagttcactggcctggaattctttaccggagttggctattttcgagatactgttatgtactatggattctataccaattccaccatccagcatggtaactctggggcatcttacaatatgcagctggcctacatctttacaattggggcatgtttgactacctgtttcttcagcctgctcttctccatggctaaatactttcgaaataactttattaacccacatatttattcaggaggaatcacgaaactcattttttgctgggacttcacagtgacccacgagaaggccgtgaaactgaaacagaaaaacttatctaccgaaatacgggaaaatttgagcgagctgcgccaggaaaatagtaaattgacgtttaaccagctgctgactcggttcagcgcgtacatggttgcttgggttgtgtccactggagtggctatcgcttgctgcgctgctgtttactatcttgctgaatataatctggagtttttgaagacacattccaaccccggagccgttttactcttaccttttgttgtatcatgtattaaccttgctgttccatgtatatactcaatgttcaggctggttgagcgttatgaaatgccaaggcacgaagtttacgtgctcctgatccggaacatcttccttaaaatctccataatcggaatactctgttactattggctcaataccgtggccctgagcggagaagaatgttgggaaactcttataggacaggatatctatcgcctgttgttaatggacttcgtgttcagtctggtgaatagctttctcggggagtttctgagaagaatcattggaatgcaactgatcaccagcttaggcctgcaagaatttgatattgcgcgcaatgtcctggaacttatctacgctcagactttggtgtggatcggcatctttttctgccctctactgccctttattcagatgatcatgctgtttattatgttttacagtaagaacattagtctgatgatgaactttcagccaccctcgaaggcatggagagcaagccagatgatgacattcttcatctttctgttgttttttcctagtttcacaggagtgctgtgcaccctggccatcacaatatggcgacttaagccgagtgcagactgcggcccctttcggggcctaccgctgtttatccactctatctatagttggattgacactctgagcacacgtcccggctatctgtgggttgtgtggatctaccgcaacctgataggttctgtccacttctttttcattcttaccctcatcgtgctgataatcacgtacctgtactggcagattacagaaggccgcaagattatgataagactgctccatgaacagatcataaatgaggggaaagacaaaatgttcctcatcgagaagctgatcaaactgcaggacatggagaaaaaggcaaatccaagctccttggtcttagaacgcagggaggtggaacagcagggattcctgcatctgggggagcatgatggcagtctggatttgcggtctcgaaggagcgtgcaggaaggtaaccctagggcctag

SEQ ID NO: 41550 - DNA, 3021 bp, Artificial Sequence
  derived and/or modified sequence
atgagcgcctactaccggaacaactggagcgaggaggaccccgactatcctgattatagcggtagccagaacaggacccagggatatcttaagacacaggggtaccctgacgtccccggccccctgaacaaccccgactacccaggcacccgaagcaacccatattctgtcgcatctaggacccgccctgactaccccggatccctcgccgaacctaactaccccagaagtctgtctaaccctgactattctgggaccaggagcaacgcttactcagccgcatcaaggactagccctgatcaccccacgtcactgcctgaaccggactatagcgaatttcaatcacatccatatcaccgtgcgagctcccgtcagcccgactaccctggcagccagaggaacccggattttgccggctcgagctcatcaggaaattacgcggggtcccgtacccatccagatcactttgggtccctcgagccagattacccaggagcacagagcaattctgaccatcccggcccccgagccaacctgaaccacccaggcagtagaaagaatctggaacataccagtttcaggattaacccttacgctgactctcttgggaaaccagactaccctggcgctgacatccagcctaatagcccacctttctttggggagcctgactacccttctgccgaagataatcaaaatttaccatccacttggcgggagccagactattccgacgcagaaaacggccatgattacggctcttcagaaacacccaaaatgactaggggtgtcttgtcacggacttccagcatacagccatcgttccgccatcgttccgatgatccagtgggcagcctctggggggagaatgactatccagagggcatcgagatggcttcgatggagatggccaatagttacggtcatagcctgcctggggctccaggatctggttacgttaatcctgcctatgtgggggagagcggcccagtgcacgcttatggaaacccgccattaagcgagtgcgactggcataagtctcctcagggccaaaaattgatcgcctcgctcatcccaatgacttcccgcgacaggattaaggcgataaggaaccagccccgcacgatggaagagaaacggaatctgaggaaaatcgtagataaggaaaagagcaaacagacccaccgcatcctccagctcaattgctgtatccagtgcctgaactcaatttcccgtgcctacagaagaagcaaaaatagcctttcagagattcttaacagcatctctctctggcagaaaaccctgaaaattattggcgggaaattcggcacaagcgtgctttcctactttaacttcctccggtggcttctgaagttcaacatcttcagctttatcttgaactttagcttcattataatccctcagtttacagtcgctaaaaaaaataccctgcagtttacaggcctggaattcttcactggcgtgggctactttagagataccgtcatgtactatggcttctacaccaacagcaccattcaacatggtaattcaggggcgtcttataacatgcagctggcctacatcttcacaatcggcgcttgcctgacgacttgcttcttttccctgctgttctccatggccaagtatttcaggaataattttataaacccacacatatatagcggcggaataactaaactgatcttttgttgggactttacagttacgcatgaaaaggctgtcaaactgaaacagaaaaatctgagcaccgagatccgtgagaacttaagcgaacttcgacaggaaaattccaagcttacattcaatcaattgcttactcgattcagcgcttacatggtggcctgggtggtgtcgacgggggtcgccattgcctgctgcgctgccgtgtactatttggccgagtacaacttagagttcctgaagacccactctaaccctggagcagtacttctgttgccctttgtggtgtcctgcataaaccttgctgtgccctgtatttatagcatgtttaggttagtggaacgctacgagatgcccagacacgaagtctacgtgttactcatccgtaacattttcctgaagattagcattatagggatcctgtgctactactggctgaacacagtggctctgtctggtgaagaatgctgggagacgctgatcggccaagatatataccgtctcctgctaatggatttcgtgttttctctcgtaaacagtttcctgggtgaattcctcaggcgcattattggaatgcagctcattacttcactcgggctccaggagttcgatattgcccgcaatgtgctggagctcatctacgctcagacacttgtttggatcgggatctttttctgtccactcctgcccttcattcagatgataatgctttttatcatgttctactccaagaatatttcccttatgatgaacttccaacccccctccaaggcgtggcgtgcatcccagatgatgactttcttcatttttctgctgttttttccatcctttaccggtgtcctatgtactctggccattacaatctggagattgaaacccagcgctgactgcggaccattcaggggcctgccactgttcattcattcgatatactcatggatcgataccctctccacacgcccaggctatctctgggttgtttggatttatagaaatctgatcggaagcgtgcacttcttcttcatcctcacattaattgtacttatcattacctacctgtattggcagataacggaggggaggaagatcatgattcgcctgctgcacgaacaaatcataaacgagggaaaggacaagatgttcttgatcgagaagcttatcaagttacaggacatggagaaaaaagctaatccttcatctctagttttggaaaggcgcgaggtagagcagcagggcttcctgcacctgggggaacacgacggttcactggaccttaggtctcgacggtctgtgcaggaggggaacccaagggcttag

SEQ ID NO: 41551 - DNA, 3021 bp, Artificial Sequence
  derived and/or modified sequence
atgtcagcatactacaggaataattggtctgaagaggaccctgattaccctgactatagtgggtctcagaatcgcacgcagggatatctgaaaacccaaggctatccagatgtccctggtccactaaacaatccggactaccccggtactcgctcgaatccatattctgtggcctctaggactcgtccagattatcccggttccctggctgagcctaactatcctaggtctttgtctaatcctgactattccggcacccggtctaatgcttattctgcagccagccggacaagtcccgaccacccgacttccctacccgaaccagactactccgagtttcagtctcacccttaccaccgcgcttcaagtcgccagcccgattatccgggaagccagagaaatcccgattttgctggctcttcctcctctggaaactacgcagggtcgcgcacacatccggatcactttggcagcctggagcctgattatcctggcgcacaaagtaattctgatcatcctggacccagagcaaacctcaatcatccagggagccgtaagaacctcgagcacacgagctttaggattaacccttacgctgactccttagggaagcccgattaccctggtgcagatatccagcccaacagtccacccttcttcggcgaacccgattatccttcagctgaagacaaccagaatctcccctccacctggcgggagcctgactacagtgatgccgaaaatggccatgattacggatcaagcgagacccccaaaatgaccagaggcgtactgtcacgcacctccagcatccagccctcctttcgccaccggtctgacgatcccgtgggttccctttggggcgaaaatgattacccggaaggcatcgaaatggcctccatggaaatggcaaactcttacggccacagcttgccgggagcccctggctccggttacgtcaatcctgcttatgtgggagaaagtgggcctgttcacgcatacggtaacccgccattatccgagtgcgactggcataagtccccccaaggacagaagttgatcgcttctctcattcccatgaccagcagagatagaatcaaggcaatcagaaaccagcctcgcaccatggaagagaagaggaatctgcgcaagatagtggacaaggaaaagtccaagcagacccatcgtattctccagctaaattgttgcatccagtgtctgaactcaatatcccgggcataccggcgttcaaagaactccctcagcgagatcctcaacagtatcagcctgtggcaaaagactctgaagatcatcgggggtaagttcggaaccagtgtcttatcgtactttaactttctgcgatggctgctgaaatttaacatcttctccttcatactgaacttctcctttatcattatcccacagtttaccgttgctaagaaaaatacattgcaatttactggtctggaatttttcactggcgtaggttattttcgcgataccgtgatgtactatggattctatacaaatagcacaattcagcacggtaacagtggcgcttcttacaatatgcaactggcttacatcttcacaatcggtgcctgtttgacaacatgcttcttctcactcttattctcaatggccaaatacttcagaaacaattttatcaacccacatatttattctgggggtattacaaaattgatcttttgctgggactttaccgtcacccacgagaaagcggtgaagctaaaacagaagaatctgagtactgaaattcgggagaacctgtcagagcttcgacaggagaattctaagctgaccttcaatcagctgctcactaggttctcagcatatatggtggcgtgggtggtatcaactggcgtggccatcgcctgttgtgcggcagtttactacctggccgaatacaatcttgagttcctgaaaacccatagcaaccccggagcagtcttgcttctgcctttcgtagttagttgtattaacttggccgtgccgtgtatatatagtatgtttaggctggtggagagatatgagatgccacgtcatgaggtatacgtgctgttaatcaggaacatcttccttaagatctccattattggtatcctttgttactattggctcaatactgtcgctctctctggcgaagagtgttgggagaccctgattgggcaggatatttacaggctactgcttatggatttcgttttttcactggttaacagtttcctgggcgagttcttacgacggatcatcggcatgcagctaataactagcctcggactgcaggaattcgacatcgcacgcaacgttctggaactgatctacgcacaaactctggtttggattggcatttttttctgccccctgcttccattcatccaaatgataatgttgttcataatgttctacagcaagaatatatcactgatgatgaacttccagcctccctcaaaagcctggcgggcaagccagatgatgaccttttttatttttctgctcttttttccgtcattcaccggggtcttgtgcacccttgcaattaccatctggaggctcaaaccatcggccgactgcggacccttccggggacttcctctctttatccattctatctacagctggattgacactctgtctacgaggccaggctatttgtgggttgtgtggatctaccggaacttaattggttcggtacacttcttttttatcctgacactgatcgtactcatcatcacttacctgtactggcagataactgagggacgtaagattatgatacggctgctccatgagcagattatcaatgagggcaaggacaagatgtttctgattgagaagttaatcaaactgcaggacatggagaagaaggctaaccctagctctctggttctcgaaaggcgggaggtcgagcagcagggatttctgcatcttggagagcacgatggcagcttggacttgcggagccgacgatccgtgcaggaaggcaatcccagagcctag

SEQ ID NO: 41552 - DNA, 3021 bp, Artificial Sequence
  derived and/or modified sequence
atgtctgcgtactaccggaacaattggtcagaggaagacccagactatcctgattattccggcagccagaacagaacccaggggtacttgaagactcagggataccctgatgttccgggtcccctgaataatccagactatcctggaaccaggtccaatccttacagcgtagcctcccgcactaggcctgactatccaggcagtctggcagagccgaactatccgcgaagtctgagtaaccctgactacagcggcacccgcagtaacgcatacagcgccgcatccaggactagtccagaccacccaacctcgttgcccgagcccgactactcagagttccagtctcatccataccatcgcgcttcttctcggcaaccggactaccctgggtcccagcgtaacccggacttcgccggtagttcaagctctggtaattatgcgggatctcggacacacccagaccacttcggtagcctggagcctgattacccaggagctcagagtaattctgatcacccgggtccaagagcaaatctgaaccacccagggtccagaaaaaatctggagcacacttccttccgtatcaatccatatgccgactcactaggtaagccagattatcccggtgccgacatccagccaaattcgccacccttttttggcgagccagactatccatccgctgaggacaatcagaacctgccaagcacatggcgtgaacctgactactcagatgccgagaatggccacgattacggatcaagtgaaactcctaagatgacgcgcggtgttctcagccgtacatcctccatccaaccaagcttcaggcatagatcagacgatcccgtagggtcgctttggggagagaacgattaccccgaaggtattgaaatggccagcatggagatggccaattcctacgggcattcactccccggagcgcctggaagcggttacgtgaatcctgcctacgtgggggagagtggaccagttcatgcttacggaaaccctccactcagcgaatgcgattggcacaaatcaccacagggacaaaaactgattgcttctttgatccctatgacatccagggataggattaaagccatcagaaaccagccaaggactatggaagaaaagcgtaatctacggaagatagtggacaaggagaagtcgaaacagacccatagaatcctccagctgaactgctgcattcagtgtctaaattcaattagcagggcctacaggcggagtaagaatagcctaagcgaaattctgaatagcatttccctgtggcagaagaccctgaagatcattggcggaaagttcggtacaagcgtcctatcgtatttcaatttcttaaggtggctgttaaaattcaacatcttcagctttattcttaatttttctttcatcatcattccacagtttacagtggcaaagaagaacacgttgcagttcacgggactggaattttttacaggagttgggtacttcagggacacggtgatgtattatggattctataccaattccaccatccagcacggcaattcgggagctagttataatatgcaactggcttacattttcaccattggcgcttgcttgaccacctgtttcttttccctccttttttcgatggcgaaatatttcaggaacaatttcataaatccacacatctacagtgggggaattactaagctgatattctgctgggatttcaccgttacacacgagaaggccgtgaaactaaaacagaaaaacctgtcaaccgaaatcagggagaatttatctgagttgaggcaggaaaacagtaagcttaccttcaatcaattgcttacaaggtttagcgcctatatggtcgcctgggtggtctctaccggcgtagccatagcctgctgtgctgctgtgtactatttagccgaatacaatctggaatttctgaaaacccacagtaatcctggcgctgtcctgctcttacccttcgtcgtgagctgcatcaacttagccgtcccatgcatttattccatgttcaggctcgttgaaagatatgaaatgccccgtcacgaggtttacgtgttgcttatccgcaatatctttctcaagatatctataattggtatattgtgttattattggctgaacaccgtggccctttcaggcgaggaatgctgggaaacgcttattggccaggacatctatcgtttactccttatggactttgtgttttccctggttaatagcttccttggggagttcctgcgacggattattggaatgcagctgatcacttctctagggctccaagagttcgacatagctagaaatgtgctggaactgatctacgctcagacattagtgtggatcggtatcttcttttgcccacttctgccctttatccagatgataatgctatttatcatgttttatagcaagaatatctctctcatgatgaattttcaacctcccagtaaagcatggcgcgcttctcagatgatgaccttctttatatttctactgttcttcccatctttcaccggagtcctgtgcacattggccatcacaatatggcgcctgaaacctagtgcggactgcggcccattcaggggattgcccctgttcatccatagcatctactcctggattgatactttgagtacaaggccgggatacctatgggttgtgtggatttatcggaatctgattggctctgtacattttttctttatcctaactctcatcgtgcttatcattacttatctgtattggcaaattacagaagggagaaagatcatgattagactattgcacgagcagatcataaacgaaggtaaggacaagatgtttcttattgaaaagctgattaaattgcaggacatggagaaaaaggccaacccgagtagcctggttctcgagcgtagagaggttgaacagcaaggttttcttcatctgggagagcatgatggaagcttagacctccggtctaggaggtcagtgcaagaaggcaatcccagagcttag

SEQ ID NO: 41553 - DNA, 4917 bp, Artificial Sequence
  derived and/or modified sequence
gagggccagcgcaagcagcggcaacaggagcgccaggaggtgaggcgggttcgccaggagtggggccagcgcccgggctgccagcctagcaggggcgtcttggcggagccccctcgccggctcccagagaggctgggaagaactgggaggggtgtccccaatgcggggcgcccaagcgtggcagcacgggctgggagcggggagccagcggggtgcggcgccggagtgcggggagaaccaccaggcgccggaattggggagcacgtggagggggcagcggctccagccccagaccgccgcgctctgtcactttgcattaagaaagcttccggggaatgcacacggcctggccgccgccttcgtgcagcccgccctgcaggtgcaggaagaaaagaataatcgcacccgtttctcaggtgcttacttcaccatgtccgatccggacatgaggctctgcctgcagtcagcaacttggaatattcagacttcagaccagcatcacagattataaccctccgtaaatcatctgcatcccagctcccatcaaaagccagcctgaaggacccatggacacgtgactccagtgttctcaacaacatcttaagatcaagttggtttgcacaacatttgcatctacttgggacaaagcaagaacaataagggcaaaaaagtgaaaaaaaaaaaagatccctgagtaattgcaaatgctgggacagtttaccactccagggtgaagagtccataccaacatgtctgcctactacaggaataactggtctgaggaagacccagattaccctgactattcagggtctcagaaccgtacgcaggggtatttgaaaactcaaggttatccagatgttccaggtcctctgaacaatccagactaccccggcaccaggagcaatccatactctgtagcctccagaacacgtccagactatcctgggtctctggcagaaccaaattatcctagatctctgagtaatccagactattctggcaccagaagcaatgcatactctgcagcctctagaacaagcccagaccatcctacctctctaccagagccagattatagtgaatttcagagtcatccctaccaccgagcatcatccagacaaccagactaccctggatctcaacgaaatcctgattttgcaggctccagcagcagtggaaactatgcaggctccagaacacatccagatcattttggctccttagaaccggactaccctggagctcagagcaactctgatcatcctggacccagagccaatttgaaccatccaggatccagaaagaatctggaacatacaagttttagaatcaatccatacgcagactctctgggaaagcctgattatccaggcgctgacattcaacctaactctccacccttttttggggagccagactatcccagtgctgaggacaatcagaacttgccaagcacttggagagaacctgattattcagatgctgagaatggtcatgattatggctcttctgagaccccaaagatgaccaggggggtgctcagcagaacatcttcaatccagccctcatttcgtcacaggagtgatgaccccgtgggcagtctttggggagagaatgattaccctgaaggcattgaaatggcatccatggagatggcaaactcatatggccactctctgccaggtgctcctggaagtggctatgtgaaccctgcttatgtaggtgaaagtggtcctgtccatgcttatggaaacccaccattgtctgaatgtgattggcacaagtcaccccaaggacagaagttaatcgcatcccttatacccatgacatccagagacagaattaaagccatcaggaaccagccaaggaccatggaagagaaaaggaaccttaggaaaatagttgacaaagaaaaaagcaaacagacccatcgtatccttcagctcaattgctgtattcagtgtctgaactccatttcccgggcttatcggagatccaagaacagcctgtcggaaattctgaattccatcagcctgtggcagaagacgctgaagatcattggaggcaagtttggaaccagcgtcctctcctatttcaactttctgagatggcttttgaagttcaacattttctcattcatcctgaacttcagcttcatcataatccctcagtttaccgtggccaaaaagaacaccctccagttcactgggctggagtttttcactggggtgggttattttagggacacagtgatgtactatggcttttacaccaattccaccatccagcacgggaacagcggggcatcctacaacatgcagctggcctacatcttcacaatcggagcatgcttgaccacctgcttcttcagtttgctgttcagcatggccaagtatttccggaacaacttcattaatccccacatttactccggagggatcaccaagctgatcttttgctgggacttcactgtcactcatgaaaaagctgtgaagctaaaacagaagaatcttagcactgagataagggagaacctgtcagagctccgtcaggagaattccaagttgacgttcaatcagctgctgacccgcttctctgcctacatggtagcctgggttgtctctacaggagtggccatagcctgctgtgcagccgtttattacctggctgagtacaacttagagttcctgaagacacacagtaaccctggggcggtgctgttactgcctttcgttgtgtcctgcattaatctggccgtgccatgcatctactccatgttcaggcttgtggagaggtacgagatgccacggcacgaagtctacgttctcctgatccgaaacatctttttgaaaatatcaatcattggcattctttgttactattggctcaacaccgtggccctgtctggtgaagagtgttgggaaaccctcattggccaggacatctaccggctccttctgatggattttgtgttctctttagtcaattccttcctgggggagtttctgaggagaatcattgggatgcaactgatcacaagtcttggccttcaggagtttgacattgccaggaacgttctagaactgatctatgcacaaactctggtgtggattggcatcttcttctgccccctgctgccctttatccaaatgattatgcttttcatcatgttctactccaaaaatatcagcctgatgatgaatttccagcctccgagcaaagcctggcgggcctcacagatgatgactttcttcatcttcttgctctttttcccatccttcaccggggtcttgtgcaccctggccatcaccatctggagattgaagccttcagctgactgtggcccttttcgaggtctgcctctcttcattcactccatctacagctggatcgacaccctaagtacacggcctggctacctgtgggttgtttggatctatcggaacctcattggaagtgtgcacttctttttcatcctcaccctcattgtgctaatcatcacctatctttactggcagatcacagagggaaggaagattatgataaggctgctccatgagcagatcattaatgagggcaaagataaaatgttcctgatagaaaaattgatcaagctgcaggatatggagaagaaagcaaaccccagctcacttgttctggaaaggagagaggtggagcaacaaggctttttgcatttgggggaacatgatggcagtcttgacttgcgatctagaagatcagttcaagaaggtaatccaagggcctgatgactcttttggtaaccagacaccaatcaaataaggggaggagacgaaaatggaatgatttcttccatgccacctgtgcctttaggaactgcccagaagaaaatccaaggctttagccaggagcggaaactgactaccatgtaattatcaaagtaaaattgggcattccatgctatttttaatacctggattgctgatttttcaagacaaaatacttggggttttccaataaagattgttgtaatattgaaatgagcctacaaaaacctaggaagagataactagggaataatgtatattatcttcaagaagtgtgtgcaggaatgattggttcttagaaatctctcctgccagacttcccagacctggcaaaggtttagaaactgttgctaagaaaagtggtccatcctgaataaacatgtaatactccagcagggatatgaagcctctgaattgtagaacctgcatttatttgtgactttgaactaaagacatcccccatgtcccaaaggtggaatacaaccagaggtctcatctctgaactttcttgcgtactgattacatgagtctttggagtcggggatggaggaggttctgcccctgtgaggtgttatacatgaccatcaaagtcctacgtcaagctagctttgcagtggcagtaccgtagccaatgagatttatccgagacgcgattattgctaattggaaattttcccaataccccaccgtgatgacttgaaatataatcagcgctggcaatttttgacagtctctacggagactgaataagaaaaaagaaaagaaaagaaattagctgggtgcgatggcttatgcctgtaatcccggcactttgggaggctgaggcaagcggatcacttaatgtcaggagttcaagaccagcctggccaacatggtgaaaccccgtctctactaaaaataaaaaaactagctgggcgtggtggtacatgcctataatcccagctactcgggaggctgaggcaggagaattgcttgaacctgggaggcagaggttgcagtgaggcgagattgtaccactgcattccagcctgggcaacagtgagactctgcctcaaaaaaataaataaataaataaataaagtaaattaaaagtcttattcaaaccaaa

SEQ ID NO: 41554 - DNA, 3887 bp, Artificial Sequence
  derived and/or modified sequence
aacttgggacctgagttaggccttcatcgtcgcggactcagtagacagaggccataggtgcagctgtgatggtagaggtggaagactgatttgcattttcaccaggtgagacctggttactcattggttgatgaggaaagagatgatagccagggcggcataaaacggcaatgagctcagtaaacaacccccttcccgtgatcttcgtggcttcccgcccagacgtgtgaccaagatagcaaggagcagtctttaaggcgacacggcagagaggcagaaaaagatgggccttaccggttagttaagaaaaaaagaggacctgttgcctgtccctctagctttgaactacaaagtggaggggaagtttgtctggattttcctgtagaactgagggcaggacatgaggctctgcctgcagtcagcaacttggaatattcagacttcagaccagcatcacagattataaccctccgtaaatcatctgcatcccagctcccatcaaaagccagcctgaaggacccatggacacgtgactccagtgttctcaacaacatcttaagatcaagttggtttgcacaacatttgcatctacttgggacaaagcaagaacaataagggcaaaaaagtgaaaaaaaaaaaagatccctgagtaattgcaaatgctgggacagtttaccactccagggtgaagagtccataccaacatgtctgcctactacaggaataactggtctgaggaagacccagattaccctgactattcagggtctcagaaccgtacgcaggggtatttgaaaactcaaggttatccagatgttccaggtcctctgaacaatccagactaccccggcaccaggagcaatccatactctgtagcctccagaacacgtccagactatcctgggtctctggcagaaccaaattatcctagatctctgagtaatccagactattctggcaccagaagcaatgcatactctgcagcctctagaacaagcccagaccatcctacctctctaccagagccagattatagtgaatttcagagtcatccctaccaccgagcatcatccagacaaccagactaccctggatctcaacgaaatcctgattttgcaggctccagcagcagtggaaactatgcaggctccagaacacatccagatcattttggctccttagaaccggactaccctggagctcagagcaactctgatcatcctggacccagagccaatttgaaccatccaggatccagaaagaatctggaacatacaagttttagaatcaatccatacgcagactctctgggaaagcctgattatccaggcgctgacattcaacctaactctccacccttttttggggagccagactatcccagtgctgaggacaatcagaacttgccaagcacttggagagaacctgattattcagatgctgagaatggtcatgattatggctcttctgagaccccaaagatgaccaggggggtgctcagcagaacatcttcaatccagccctcatttcgtcacaggagtgatgaccccgtgggcagtctttggggagagaatgattaccctgaaggcattgaaatggcatccatggagatggcaaactcatatggccactctctgccaggtgctcctggaagtggctatgtgaaccctgcttatgtaggtgaaagtggtcctgtccatgcttatggaaacccaccattgtctgaatgtgattggcacaagtcaccccaaggacagaagttaatcgcatcccttatacccatgacatccagagacagaattaaagccatcaggaaccagccaaggaccatggaagagaaaaggaaccttaggaaaatagttgacaaagaaaaaagcaaacagacccatcgtatccttcagctcaattgctgtattcagtgtctgaactccatttcccgggcttatcggagatccaagaacagcctgtcggaaattctgaattccatcagcctgtggcagaagacgctgaagatcattggaggcaagtttggaaccagcgtcctctcctatttcaactttctgagatggcttttgaagttcaacattttctcattcatcctgaacttcagcttcatcataatccctcagtttaccgtggccaaaaagaacaccctccagttcactgggctggagtttttcactggggtgggttattttagggacacagtgatgtactatggcttttacaccaattccaccatccagcacgggaacagcggggcatcctacaacatgcagctggcctacatcttcacaatcggagcatgcttgaccacctgcttcttcagtttgctgttcagcatggccaagtatttccggaacaacttcattaatccccacatttactccggagggatcaccaagctgatcttttgctgggacttcactgtcactcatgaaaaagctgtgaagctaaaacagaagaatcttagcactgagataagggagaacctgtcagagctccgtcaggagaattccaagttgacgttcaatcagctgctgacccgcttctctgcctacatggtagcctgggttgtctctacaggagtggccatagcctgctgtgcagccgtttattacctggctgagtacaacttagagttcctgaagacacacagtaaccctggggcggtgctgttactgcctttcgttgtgtcctgcattaatctggccgtgccatgcatctactccatgttcaggcttgtggagaggtacgagatgccacggcacgaagtctacgttctcctgatccgaaacatctttttgaaaatatcaatcattggcattctttgttactattggctcaacaccgtggccctgtctggtgaagagtgttgggaaaccctcattggccaggacatctaccggctccttctgatggattttgtgttctctttagtcaattccttcctgggggagtttctgaggagaatcattgggatgcaactgatcacaagtcttggccttcaggagtttgacattgccaggaacgttctagaactgatctatgcacaaactctggtgtggattggcatcttcttctgccccctgctgccctttatccaaatgattatgcttttcatcatgttctactccaaaaatatcagcctgatgatgaatttccagcctccgagcaaagcctggcgggcctcacagatgatgactttcttcatcttcttgctctttttcccatccttcaccggggtcttgtgcaccctggccatcaccatctggagattgaagccttcagctgactgtggcccttttcgaggtctgcctctcttcattcactccatctacagctggatcgacaccctaagtacacggcctggctacctgtgggttgtttggatctatcggaacctcattggaagtgtgcacttctttttcatcctcaccctcattgtgctaatcatcacctatctttactggcagatcacagagggaaggaagattatgataaggctgctccatgagcagatcattaatgagggcaaagataaaatgttcctgatagaaaaattgatcaagctgcaggatatggagaagaaagcaaaccccagctcacttgttctggaaaggagagaggtggagcaacaaggctttttgcatttgggggaacatgatggcagtcttgacttgcgatctagaagatcagttcaagaaggtaatccaagggcctgatgactcttttggtaaccagacaccaatcaaataaggggaggagacgaaaatggaatgatttcttccatgccacctgtgcctttaggaactgcccagaagaaaatccaaggctttagccaggagcggaaactgactaccatgtaattatcaaagtaaaattgg

SEQ ID NO: 41555 - protein, 948 aa, Artificial Sequence
  derived and/or modified sequence
MSAYYRNNWSEEDPDYPDYSGSQNRTQGYLKTQGYPDVPGPLNNPDYPGTRSNPYSVASRTRPDYPGSLAEPNYPRSLSNPDYSGTRSNAYSAASRTSPDHPTSLPEPDYSEFQSHPYHRASSRQPDYPGSQRNPDFAGSSSSGNYAGSRTHPDHFGSLEPDYPGAQSNSDHPGPRANLNHPGSRKNLEHTSFRINPYADSLGKPDYPGADIQPNSPPFFGEPDYPSAEDNQNLPSTWREPDYSDAENGHDYGSSETPKMTRGVLSRTSSIQPSFRHRSDDPVGSLWGENDYPEGIEMASMEMANSYGHSLPGAPGSGYVNPAYVGESGPVHAYGNPPLSECDWHKSPQGQKLIASLIPMTSRDRIKAIRNQPRTMEEKRNLRKIVDKEKSKQTHRILQLNCCIQCLNSISRAYRRSKNSLSEILNSISLWQKTLKIIGGKFGTSVLSYFNFLRWLLKFNIFSFILNFSFIIIPQFTVAKKNTLQFTGLEFFTGVGYFRDTVMYYGFYTNSTIQHGNSGASYNMQLAYIFTIGACLTTCFFSLLFSMAKYFRNNFINPHIYSGGITKLIFCWDFTVTHEKAVKLKQKNLSTEIRENLSELRQENSKLTFNQLLTRFSAYMVAWVVSTGVAIACCAAVYYLAEYNLEFLKTHSNPGAVLLLPFVVSCINLAVPCIYSMFRLVERYEMPRHEVYVLLIRNIFLKISIIGILCYYWLNTVALSGEECWETLIGQDIYRLLLMDFVFSLVNSFLGEFLRRIIGMQLITSLGLQEFDIARNVLELIYAQTLVWIGIFFCPLLPFIQMIMLFIMFYSKNISLMMNFQPPSKAWRASQMMTFFIFLLFFPSFTGVLCTLAITIWRIITYLYWQITEGRKIMIRLLHEQIINEGKDKMFLIEKLIKLQDMEKKANPSSLVLERREVEQQGFLHLGEHDGSLDLRSRRSVQEGNPRA

SEQ ID NO: 41556 - DNA, 2847 bp, Artificial Sequence
  derived and/or modified sequence
atgagcgcctactacagaaacaactggagcgaggaggaccccgactaccccgactacagcggcagccagaacagaacccagggctacctgaagacccagggctaccccgacgtgcccggccccctgaacaaccccgactaccccggcaccagaagcaacccctacagcgtggccagcagaaccagacccgactaccccggcagcctggccgagcccaactaccccagaagcctgagcaaccccgactacagcggcaccagaagcaacgcctacagcgccgccagcagaaccagccccgaccaccccaccagcctgcccgagcccgactacagcgagttccagagccacccctaccacagagccagcagcagacagcccgactaccccggcagccagagaaaccccgacttcgccggcagcagcagcagcggcaactacgccggcagcagaacccaccccgaccacttcggcagcctggagcccgactaccccggcgcccagagcaacagcgaccaccccggccccagagccaacctgaaccaccccggcagcagaaagaacctggagcacaccagcttcagaatcaacccctacgccgacagcctgggcaagcccgactaccccggcgccgacatccagcccaacagcccccccttcttcggcgagcccgactaccccagcgccgaggacaaccagaacctgcccagcacctggagagagcccgactacagcgacgccgagaacggccacgactacggcagcagcgagacccccaagatgaccagaggcgtgctgagcagaaccagcagcatccagcccagcttcagacacagaagcgacgaccccgtgggcagcctgtggggcgagaacgactaccccgagggcatcgagatggccagcatggagatggccaacagctacggccacagcctgcccggcgcccccggcagcggctacgtgaaccccgcctacgtgggcgagagcggccccgtgcacgcctacggcaacccccccctgagcgagtgcgactggcacaagagcccccagggccagaagctgatcgccagcctgatccccatgaccagcagagacagaatcaaggccatcagaaaccagcccagaaccatggaggagaagagaaacctgagaaagatcgtggacaaggagaagagcaagcagacccacagaatcctgcagctgaactgctgcatccagtgcctgaacagcatcagcagagcctacagaagaagcaagaacagcctgagcgagatcctgaacagcatcagcctgtggcagaagaccctgaagatcatcggcggcaagttcggcaccagcgtgctgagctacttcaacttcctgagatggctgctgaagttcaacatcttcagcttcatcctgaacttcagcttcatcatcatcccccagttcaccgtggccaagaagaacaccctgcagttcaccggcctggagttcttcaccggcgtgggctacttcagagacaccgtgatgtactacggcttctacaccaacagcaccatccagcacggcaacagcggcgccagctacaacatgcagctggcctacatcttcaccatcggcgcctgcctgaccacctgcttcttcagcctgctgttcagcatggccaagtacttcagaaacaacttcatcaacccccacatctacagcggcggcatcaccaagctgatcttctgctgggacttcaccgtgacccacgagaaggccgtgaagctgaagcagaagaacctgagcaccgagatcagagagaacctgagcgagctgagacaggagaacagcaagctgaccttcaaccagctgctgaccagattcagcgcctacatggtggcctgggtggtgagcaccggcgtggccatcgcctgctgcgccgccgtgtactacctggccgagtacaacctggagttcctgaagacccacagcaaccccggcgccgtgctgctgctgcccttcgtggtgagctgcatcaacctggccgtgccctgcatctacagcatgttcagactggtggagagatacgagatgcccagacacgaggtgtacgtgctgctgatcagaaacatcttcctgaagatcagcatcatcggcatcctgtgctactactggctgaacaccgtggccctgagcggcgaggagtgctgggagaccctgatcggccaggacatctacagactgctgctgatggacttcgtgttcagcctggtgaacagcttcctgggcgagttcctgagaagaatcatcggcatgcagctgatcaccagcctgggcctgcaggagttcgacatcgccagaaacgtgctggagctgatctacgcccagaccctggtgtggatcggcatcttcttctgccccctgctgcccttcatccagatgatcatgctgttcatcatgttctacagcaagaacatcagcctgatgatgaacttccagccccccagcaaggcctggagagccagccagatgatgaccttcttcatcttcctgctgttcttccccagcttcaccggcgtgctgtgcaccctggccatcaccatctggagaatcatcacctacctgtactggcagatcaccgagggcagaaagatcatgatcagactgctgcacgagcagatcatcaacgagggcaaggacaagatgttcctgatcgagaagctgatcaagctgcaggacatggagaagaaggccaaccccagcagcctggtgctggagagaagagaggtggagcagcagggcttcctgcacctgggcgagcacgacggcagcctggacctgagaagcagaagaagcgtgcaggagggcaaccccagagcctag

SEQ ID NO: 41557 - DNA, 2847 bp, Artificial Sequence
  derived and/or modified sequence
atgagcgcctactataggaataattggagtgaggaagatcccgactacccagactattctgggtcacagaatcgcactcagggttatctcaagacccaaggttatcccgacgtccccgggccgcttaataaccctgattacccgggcacaaggagcaacccttactcagtggccagccgtacaagaccagattatcccggcagtcttgctgaacctaactatccacgtagcctatccaacccggattatagcgggactcgatctaatgcttatagcgccgcgtccagaacatccccagatcacccaacgtctctgccagagcccgattatagcgaattccagagtcacccctaccatagagcgagctcgaggcagccggactaccccggcagccaaagaaatcctgactttgcagggagctccagctctgggaactacgcgggaagcagaactcacccagaccactttggctccttggaacccgattaccccggagcccagtccaattccgaccaccccggccctcgggctaacctaaatcacccgggatctagaaagaatcttgagcatacctctttcagaattaacccctatgctgacagcttgggtaagcctgattatcctggcgcagatattcagcccaattctcctccctttttcggggaaccagattatccatcggcggaggacaaccaaaacctgcccagcacttggagggagcctgactattcggacgccgaaaacggccacgactacggaagttcagaaacccctaaaatgaccagaggagtccttagtcgtaccagctcaatacagccatccttccgtcacaggagtgatgaccctgtgggcagcctctggggcgaaaatgactacccagagggcattgagatggccagcatggaaatggccaattcttacggacacagtttgcctggcgcccccggaagtggctatgtcaatcccgcctatgtcggcgagagtgggcctgtgcacgcttatggaaatcctcccctgtccgagtgcgattggcataagagcccacagggacaaaaacttatcgcctcgttgatccctatgacaagccgagaccgtataaaggcgattcggaaccagccaagaacaatggaagagaagaggaaccttagaaaaatcgtagacaaggagaagagcaagcagactcacaggattcttcaacttaattgttgtatccagtgcctgaattctatttccagagcgtataggaggtctaagaactctcttagtgaaattctgaattcgatctccctttggcaaaaaacccttaaaatcatcggtggcaaattcgggactagtgtgctgtcatacttcaactttctcaggtggctcctcaaatttaacattttctctttcatattgaacttcagctttatcattatcccccaatttactgtggccaaaaagaatactctgcagtttaccggcttggagtttttcacgggagtgggatattttagggatacagtcatgtactatggcttttatacaaacagcactatccagcatggaaatagcggggcaagttacaatatgcagctcgcctatatttttaccatcggagcctgcctgactacctgcttcttcagtctgctcttttccatggccaagtatttccgcaacaactttatcaacccccatatctactcgggtgggattacaaagctgattttctgctgggactttactgttacacatgagaaagccgttaaactgaagcagaagaacctttcaaccgagatcagggagaatctgagtgaactcaggcaggagaacagcaagctgaccttcaatcagcttctcacacgcttctccgcctatatggtggcctgggtggtctccaccggggtagcaatagcctgctgtgctgctgtctactaccttgctgaatataacctcgaatttctcaaaactcacagtaaccccggtgcagtgctgctgctcccctttgttgtgtcctgtataaacctggccgtgccttgcatctacagtatgttccgccttgtggagcggtacgagatgccgagacacgaggtgtatgtgttacttattcgcaacattttcctcaaaatcagtatcattggtatcttgtgttattattggctgaacacggtcgcactgagcggagaagagtgctgggagaccctcatcggccaggatatttatagattattactaatggactttgtgttctctctggtgaacagtttcctgggcgaattcctacggcggataatcggtatgcaactgatcacatctttgggacttcaggaatttgacattgcaaggaatgtgctcgaactgatctacgcccaaacattggtatggatcggcatctttttctgtcctctcctccctttcatacagatgattatgctcttcataatgttctattcaaaaaacatcagtctgatgatgaatttccagccgccctctaaagcttggagggcaagccagatgatgaccttcttcatctttctcctgttctttccctccttcactggagttctttgcaccctggcaataacaatctggcgcattatcacctacctctattggcagattaccgagggtagaaaaataatgattcgcctgctccatgagcaaattattaatgaggggaaagataagatgtttctaatcgaaaagctgataaagttacaagatatggaaaagaaagcaaatccatcttctcttgtcctggagcggagagaggtcgagcagcagggatttcttcacttgggagagcacgatgggagcctggatctcaggagtagacgaagcgttcaggagggtaaccctagagcatag

SEQ ID NO: 41558 - DNA, 2847 bp, Artificial Sequence
  derived and/or modified sequence
atgtctgcctactacagaaacaactggagcgaggaggaccctgactacccagactacagcggcagccagaacagaacccagggctacctgaagacccagggctacccagatgtgcccggccccctgaacaacccagactacccaggcaccaggagcaacccctacagcgtggccagcaggaccaggccagactacccaggcagcctggccgagcccaactaccccaggagcctgagcaacccagactacagcggcaccaggagcaatgcctacagcgctgccagcaggaccagcccagaccaccccaccagcctgcctgagccagactacagcgagttccagagccacccctaccaccgggccagcagccggcagcctgactacccaggcagccagagaaatccagactttgctggcagcagcagcagcggcaactatgccggcagcaggacccacccagaccacttcggcagcctggagccagactacccaggggcccagagcaacagcgaccaccctggcccccgggccaacctgaaccaccctggcagcaggaagaacctggagcacaccagcttccgcatcaacccctatgctgacagcctgggcaagccagactacccaggagctgacatccagcccaacagcccccccttcttcggggagccagactaccccagcgctgaggacaaccagaacctgcccagcacctggagggagccagactacagtgatgctgaaaatggacatgactatggcagcagcgagacccccaagatgacccggggcgtgctgagcaggaccagcagcatccagcccagcttccgccacagaagtgatgatcctgtgggcagcctgtggggagaaaatgactacccagagggcatcgagatggcctccatggagatggccaacagctatggccacagcctgcccggggcccctggcagcggctacgtgaacccagcctacgtgggggagagcggccctgtgcacgcctacggcaacccccccctgtctgaatgtgactggcacaagagcccccagggccagaagctgattgccagcctcatccccatgaccagccgggaccgcatcaaggccatccggaaccagcccaggaccatggaggagaagaggaacctgaggaagatcgtggacaaggagaagagcaagcagacccaccgcatcctgcagctgaactgctgcatccagtgcctgaacagcatcagccgggcctacagaagaagcaagaacagcctgtctgagatcctgaacagcatcagcctgtggcagaagaccctgaagatcatcggcggcaagtttggcacctctgtgctgagctacttcaacttcctgcgctggctgctgaagttcaacatcttctccttcatcctgaacttctccttcatcatcatcccccagttcaccgtggccaagaagaacaccctgcagttcaccggcctggagttcttcaccggggtgggctacttccgggacacagtgatgtactacggcttctacaccaacagcaccatccagcacggcaacagcggggccagctacaacatgcagctggcctacatcttcaccatcggggcctgcctgaccacctgcttcttcagcctgctcttctccatggccaagtacttcaggaacaacttcatcaacccccacatctacagcggcggcatcaccaagctgatcttctgctgggacttcaccgtgacccatgagaaggctgtgaagctgaagcagaagaacctgagcacagagatccgggagaacctgtctgagctgcggcaggagaacagcaagctgaccttcaaccagctgctgacccgcttcagcgcctacatggtggcctgggtggtgtccactggagtggccatcgcctgctgtgccgctgtgtactacctggccgagtacaacctggagttcctgaagacccacagcaaccctggagctgtgctgctgctgccctttgtggtgtcctgcatcaacctggccgtgccctgcatctacagcatgttccggctggtggagagatatgagatgcccaggcatgaggtgtatgtgctgctgatccggaacatcttcctgaagatcagcatcatcggcatcctgtgctactactggctgaacacagtggccctgagcggggaggagtgctgggagaccctgattggccaggacatctaccgcctgctgctgatggactttgtgttcagcctggtgaacagcttcctgggggagttcctgcggcgcatcatcggcatgcagctgatcaccagcctgggcctgcaggagtttgatattgccagaaatgtgctggagctgatctatgcccagaccctggtgtggattggcatcttcttctgccccctgctgcccttcatccagatgatcatgctgttcatcatgttctacagcaagaacatcagcctgatgatgaacttccagccccccagcaaggcctggagggccagccagatgatgaccttcttcatcttcctgctcttcttccccagcttcaccggggtgctgtgcaccctggccatcaccatctggaggatcatcacctacctgtactggcagatcacagagggcaggaagatcatgatccggctgctgcacgagcagatcatcaatgaaggcaaggacaagatgttcctgattgagaagctgatcaagctgcaggacatggagaagaaggccaaccccagcagcctggtgctggagcggcgggaggtggagcagcagggcttcctgcacctgggggagcatgatggcagcctggacctgcggagccgccgctctgtgcaggagggcaacccccgggcctag

SEQ ID NO: 41559 - DNA, 2847 bp, Artificial Sequence
  derived and/or modified sequence
atgagcgcctactaccggaacaactggagcgaggaggaccccgactaccctgactacagcggctcgcagaaccgaacacagggttatctgaagacacaggggtacccagacgtgccgggacctctcaacaacccagactatccaggaacaagaagcaacccttactccgtggcgtcccgcaccaggcctgactatccgggttccttggccgagccaaattaccccaggtccctgagcaaccctgattacagtggcacacgcagcaacgcctattccgcggcaagtaggacatcccccgaccaccccactagcctgcctgaaccagattactcagagttccagtcccacccataccatagagccagttcacgccagccagattatcctggtagccagcggaatcccgactttgctgggagctcaagctctggtaattacgctggcagtcgtacacatcctgaccacttcggtagtctggagccggattacccaggtgctcagtccaacagcgaccatcccggaccccgggcaaatctgaatcatccagggagcagaaagaacctcgagcacacctcttttcggattaacccgtacgctgactctctcggcaagccagattaccccggcgctgatattcagccaaactcccccccattttttggcgaaccagattatccaagtgcagaagacaaccagaacctcccctccacctggcgggaaccagattattctgatgccgaaaacggtcatgattacggatcctctgagacccccaagatgacccgcggcgtgctaagccggacttcctcaatccaaccatcttttcggcaccggtccgatgatccagtcggttcgctgtggggggaaaacgattatcccgagggtattgagatggctagcatggaaatggccaactcgtacgggcattctctgcccggggcccccggatccggttacgtgaacccagcctacgtcggagagtccgggcctgttcacgcctatgggaatcctccattgtccgaatgtgattggcataaaagtccacaaggccagaagctaatcgcctccttaattccgatgacatctcgcgacaggatcaaggccatcaggaatcagcctaggactatggaggaaaagcgaaatctgcgtaagatcgtcgacaaggagaaatcaaaacagactcatcgtatcctgcagctgaactgctgcattcaatgcctgaactctatcagtcgcgcctatagacgaagtaagaattctctgtcagagattctcaacagtatatcgctatggcagaaaacacttaagataattggggggaagtttggtaccagtgtattatcgtacttcaattttcttcggtggttgctgaagtttaacatcttctcttttatcttgaacttctcattcattattattcctcagttcacggtggccaagaagaataccttgcagttcactggccttgagttctttacaggagttgggtattttcgcgataccgtgatgtattacgggttttataccaactctactattcagcacggcaactctggcgcaagttacaacatgcagcttgcttatatttttacgatcggggcctgcctgactacctgttttttctccttgctcttttctatggccaagtacttcaggaataactttattaatccccatatttacagtgggggtattacaaaactgatcttctgctgggacttcacagtcacgcatgagaaggccgttaaactgaagcagaagaacctctcaacagagatccgggagaacttgagcgaactgcgtcaggagaatagcaagctgactttcaatcagctgctgacacgattttctgcatatatggtcgcgtgggtggtgtcaactggggtcgctattgcctgttgcgcagccgtgtattatttggctgagtacaatttagaattcctgaagacccactctaatcccggcgccgtgttactcctccccttcgtcgtatcctgtatcaacctggcagtaccctgcatctattcaatgttcaggctagttgagcggtatgaaatgccaaggcacgaagtgtatgttttgctgattagaaatattttcctgaaaatcagcattatcggaatcctctgttactattggctgaatactgtggctctgagcggggaagagtgctgggaaaccctcatcggtcaggatatatataggttgctcctcatggacttcgtattctcccttgtcaactctttcttgggagaattcctgaggcgtatcatcggaatgcaactgatcacatcactggggctccaggaattcgacatcgccagaaacgtcctcgaactgatctacgcccagactctggtttggatcggtatctttttctgtcccctgctgccatttatacaaatgatcatgctatttatcatgttttactccaagaacatctctcttatgatgaatttccagccgccctccaaagcttggcgggcatctcagatgatgacattctttatctttctgcttttcttcccctcttttaccggcgtgctttgcactttagctattacaatctggagaattattacctacctctattggcagattacagaaggccggaagatcatgattcgtctgctgcatgaacagatcatcaatgagggcaaagacaagatgtttctgatcgagaagctaatcaaactacaggacatggagaagaaagcaaatccatcatccctcgtgctggagaggcgcgaagtggaacagcagggctttttacacttaggggagcacgacgggagtctagatctgaggtctcgccgctctgtccaggagggaaatccccgcgcctag

SEQ ID NO: 41560 - DNA, 2847 bp, Artificial Sequence
  derived and/or modified sequence
atgtctgcctactatcgcaacaactggtctgaggaagaccccgattatcccgattactccggatcccagaatcgaacccagggctatttaaagactcaggggtatcccgatgttccaggccctctgaataatcccgactacccaggcaccaggtctaacccgtattccgtggccagcagaaccaggccagactatcctgggagcttggccgagcccaattacccgaggtccttatccaacccggattactccgggactcggagtaacgcttacagtgcggctagccgaacttcacctgatcatcccacatctctgcctgagcctgattactctgagttccagtcacacccataccatcgtgcgagttctaggcaaccagactaccctggctctcagcgcaatccggactttgcaggaagttcctccagcggaaactatgctggttcaagaacccatcccgatcattttggatctctcgagccggactaccctggagcgcaatcaaattctgatcacccgggaccccgagcgaatctgaaccacccaggaagccgaaaaaatctcgagcacacatccttcagaattaacccatatgcggattctctgggcaagcccgattaccctggcgctgacatccaacctaattcccccccattcttcggagagccagactacccctccgcggaggataatcagaatcttccttccacttggcgtgaaccagactactccgatgcagagaacgggcatgactacggctcctctgaaacgccaaaaatgacccgcggagttctcagcagaacctcatccatacagccaagttttaggcaccggtccgacgaccctgtgggctccttgtggggcgagaacgactaccctgaaggtatcgaaatggcctccatggaaatggccaatagctatggccactccctgccaggcgctccaggctcagggtacgtcaatcccgcatacgtaggcgagagtggaccggtacacgcatatgggaacccaccattgtcagaatgcgattggcacaagtcaccccaagggcagaaactaattgcatccttgatccctatgacatctcgtgatcgcatcaaggccatccgtaaccaacccagaactatggaggagaagcggaacctgcgcaaaattgtggataaggagaagagcaagcagactcaccggattctgcagctcaattgctgcattcaatgccttaacagtatctctagggcataccgcagatccaagaactccttaagcgaaattttgaacagcatttccctctggcagaaaacattaaagattatcggcggaaagtttggtaccagcgtactgagctactttaatttcttgagatggctcttaaaatttaatatcttctctttcatcctcaatttctcgttcattattatccctcagtttacagtagctaagaagaacacattgcagttcaccggcctggagttttttacaggcgtgggctactttagggacaccgtcatgtattacggattttacactaactcgactatacagcatggcaattctggtgcctcttacaatatgcagcttgcttacatctttaccattggagcctgtctcacaacctgtttttttagcctgctcttttccatggcaaaatactttcgcaacaacttcatcaatcctcacatatattcaggaggcattacaaaattgattttttgttgggattttacagtgacccacgagaaagccgtcaaactgaaacagaagaacctctcaacggagattagagagaacttaagtgagctgaggcaggagaacagtaagctgacatttaatcagctacttacccggttcagtgcatatatggtcgcatgggtggtgtccacaggcgtggccattgcttgctgtgctgctgtctactacttagcggaatataaccttgagttccttaaaactcacagcaatcccggagctgtcctcctgttaccattcgttgtgagctgtatcaacctggccgtaccctgcatctactccatgttccgtcttgttgaaagatatgagatgccccgacacgaggtttatgtgctgctaattcgtaacatctttctaaagataagtattattggcattctgtgctattactggctcaatacggtggctctctccggagaggagtgttgggaaacacttatagggcaggacatttatcgtctgctgctcatggattttgttttctcattggtgaacagtttccttggagagtttctgaggaggatcatcggtatgcagctgataactagtttaggactgcaggagtttgacattgcccgtaatgtcctggaacttatctatgcgcagaccctggtatggatcggtatattcttctgtcccttgctgccctttattcagatgatcatgctcttcattatgttttactctaaaaacattagcctgatgatgaacttccagccgcctagcaaagcatggcgggcaagccaaatgatgacattcttcatttttctgctgttctttcctagctttaccggcgttctgtgtaccttagccattactatctggagaataattacttatctatactggcagattactgagggcagaaagatcatgattaggctgctgcatgagcaaatcattaatgagggcaaggacaaaatgtttttaatcgagaaacttataaagctgcaggatatggagaaaaaagccaatccctcatccctcgttctcgaacgcagggaagtggaacagcaaggcttcctacatctgggtgagcatgatgggtccctggatctgcgctcccgtaggagcgtacaagagggaaacccacgcgcatag

SEQ ID NO: 41561 - DNA, 4755 bp, Artificial Sequence
  derived and/or modified sequence
cagggtcgacccgagggccagcgcaagcagcggcaacaggagcgccaggaggtgaggcgggttcgccaggagtggggccagcgcccgggctgccagcctagcaggggcgtcttggcggagccccctcgccggctcccagagaggctgggaagaactgggaggggtgtccccaatgcggggcgcccaagcgtggcagcacgggctgggagcggggagccagcggggtgcggcgccggagtgcggggagaaccaccaggcgccggaattggggagcacgtggagggggcagcggctccagccccagaccgccgcgctctgtcactttgcattaagaaagcttccggggaatgcacacggcctggccgccgccttcgtgcagcccgccctgcaggtgcaggaagaaaagaataatcgcacccgtttctcaggtgcttacttcaccatgtccgatccggacatgaggctctgcctgcagtcagcaacttggaatattcagacttcagaccagcatcacagattataaccctccgtaaatcatctgcatcccagctcccatcaaaagccagcctgaaggacccatggacacgtgactccagtgttctcaacaacatcttaagatcaagttggtttgcacaacatttgcatctacttgggacaaagcaagaacaataagggcaaaaaagtgaaaaaaaaaaaagatccctgagtaattgcaaatgctgggacagtttaccactccagggtgaagagtccataccaacatgtctgcctactacaggaataactggtctgaggaagacccagattaccctgactattcagggtctcagaaccgtacgcaggggtatttgaaaactcaaggttatccagatgttccaggtcctctgaacaatccagactaccccggcaccaggagcaatccatactctgtagcctccagaacacgtccagactatcctgggtctctggcagaaccaaattatcctagatctctgagtaatccagactattctggcaccagaagcaatgcatactctgcagcctctagaacaagcccagaccatcctacctctctaccagagccagattatagtgaatttcagagtcatccctaccaccgagcatcatccagacaaccagactaccctggatctcaacgaaatcctgattttgcaggctccagcagcagtggaaactatgcaggctccagaacacatccagatcattttggctccttagaaccggactaccctggagctcagagcaactctgatcatcctggacccagagccaatttgaaccatccaggatccagaaagaatctggaacatacaagttttagaatcaatccatacgcagactctctgggaaagcctgattatccaggcgctgacattcaacctaactctccacccttttttggggagccagactatcccagtgctgaggacaatcagaacttgccaagcacttggagagaacctgattattcagatgctgagaatggtcatgattatggctcttctgagaccccaaagatgaccaggggggtgctcagcagaacatcttcaatccagccctcatttcgtcacaggagtgatgaccccgtgggcagtctttggggagagaatgattaccctgaaggcattgaaatggcatccatggagatggcaaactcatatggccactctctgccaggtgctcctggaagtggctatgtgaaccctgcttatgtaggtgaaagtggtcctgtccatgcttatggaaacccaccattgtctgaatgtgattggcacaagtcaccccaaggacagaagttaatcgcatcccttatacccatgacatccagagacagaattaaagccatcaggaaccagccaaggaccatggaagagaaaaggaaccttaggaaaatagttgacaaagaaaaaagcaaacagacccatcgtatccttcagctcaattgctgtattcagtgtctgaactccatttcccgggcttatcggagatccaagaacagcctgtcggaaattctgaattccatcagcctgtggcagaagacgctgaagatcattggaggcaagtttggaaccagcgtcctctcctatttcaactttctgagatggcttttgaagttcaacattttctcattcatcctgaacttcagcttcatcataatccctcagtttaccgtggccaaaaagaacaccctccagttcactgggctggagtttttcactggggtgggttattttagggacacagtgatgtactatggcttttacaccaattccaccatccagcacgggaacagcggggcatcctacaacatgcagctggcctacatcttcacaatcggagcatgcttgaccacctgcttcttcagtttgctgttcagcatggccaagtatttccggaacaacttcattaatccccacatttactccggagggatcaccaagctgatcttttgctgggacttcactgtcactcatgaaaaagctgtgaagctaaaacagaagaatcttagcactgagataagggagaacctgtcagagctccgtcaggagaattccaagttgacgttcaatcagctgctgacccgcttctctgcctacatggtagcctgggttgtctctacaggagtggccatagcctgctgtgcagccgtttattacctggctgagtacaacttagagttcctgaagacacacagtaaccctggggcggtgctgttactgcctttcgttgtgtcctgcattaatctggccgtgccatgcatctactccatgttcaggcttgtggagaggtacgagatgccacggcacgaagtctacgttctcctgatccgaaacatctttttgaaaatatcaatcattggcattctttgttactattggctcaacaccgtggccctgtctggtgaagagtgttgggaaaccctcattggccaggacatctaccggctccttctgatggattttgtgttctctttagtcaattccttcctgggggagtttctgaggagaatcattgggatgcaactgatcacaagtcttggccttcaggagtttgacattgccaggaacgttctagaactgatctatgcacaaactctggtgtggattggcatcttcttctgccccctgctgccctttatccaaatgattatgcttttcatcatgttctactccaaaaatatcagcctgatgatgaatttccagcctccgagcaaagcctggcgggcctcacagatgatgactttcttcatcttcttgctctttttcccatccttcaccggggtcttgtgcaccctggccatcaccatctggagaatcatcacctatctttactggcagatcacagagggaaggaagattatgataaggctgctccatgagcagatcattaatgagggcaaagataaaatgttcctgatagaaaaattgatcaagctgcaggatatggagaagaaagcaaaccccagctcacttgttctggaaaggagagaggtggagcaacaaggctttttgcatttgggggaacatgatggcagtcttgacttgcgatctagaagatcagttcaagaaggtaatccaagggcctgatgactcttttggtaaccagacaccaatcaaataaggggaggagacgaaaatggaatgatttcttccatgccacctgtgcctttaggaactgcccagaagaaaatccaaggctttagccaggagcggaaactgactaccatgtaattatcaaagtaaaattgggcattccatgctatttttaatacctggattgctgatttttcaagacaaaatacttggggttttccaataaagattgttgtaatattgaaatgagcctacaaaaacctaggaagagataactagggaataatgtatattatcttcaagaagtgtgtgcaggaatgattggttcttagaaatctctcctgccagacttcccagacctggcaaaggtttagaaactgttgctaagaaaagtggtccatcctgaataaacatgtaatactccagcagggatatgaagcctctgaattgtagaacctgcatttatttgtgactttgaactaaagacatcccccatgtcccaaaggtggaatacaaccagaggtctcatctctgaactttcttgcgtactgattacatgagtctttggagtcggggatggaggaggttctgcccctgtgaggtgttatacatgaccatcaaagtcctacgtcaagctagctttgcagtggcagtaccgtagccaatgagatttatccgagacgcgattattgctaattggaaattttcccaataccccaccgtgatgacttgaaatataatcagcgctggcaatttttgacagtctctacggagactgaataagaaaaaagaaaagaaaagaaattagctgggtgcgatggcttatgcctgtaatcccggcactttgggaggctgaggcaagcggatcacttaatgtcaggagttcaagaccagcctggccaacatggtgaaaccccgtctctactaaaaataaaaaaactagctgggcgtggtggtacatgcctataatcccagctactcgggaggctgaggcaggagaattgcttgaacctgggaggcagaggttgcagtgaggcgagattgtaccactgcattccagcctgggcaacagtgagactctgcctcaaaaaaataaataaataaataaataaagtaaattaaaagtcttattcaaaccaaa

SEQ ID NO: 41562 - protein, 459 aa, Artificial Sequence
  derived and/or modified sequence
MHLRIHARRSPPRRPAWTLGIWFLFWGCIVSSVWSSSNVASSSSTSSSPGSHSQHEHHFHGSKHHSVPISIYRSPVSLRGGHAGATYIFGKSGGLILYTWPANDRPSTRSDRLAVGFSTTVKDGILVRIDSAPGLGDFLQLHIEQGKIGVVFNIGTVDISIKEERTPVNDGKYHVVRFTRNGGNATLQVDNWPVNEHYPTGNTDNERFQMVKQKIPFKYNRPVEEWLQEKGRQLTIFNTQAQIAIGGKDKGRLFQGQLSGLYYDGLKVLNMAAENNPNIKINGSVRLVGEVPSILGTTQTTSMPPEMSTTVMETTTTMATTTTRKNRSTASIQPTSDDLVSSAECSSDDEDFVECEPSTANPTEPGIRRVPGASEVIRESSSTTGMVVGIVAAAALCILILLYAMYKYRNRDEGSYQVDETRNYISNSAQSNGTLMKEKQQSSKSGHKKQKNKDREYYV

SEQ ID NO: 41563 - DNA, 1380 bp, Artificial Sequence
  derived and/or modified sequence
atgcaccttagaattcacgcacggcgctcaccccctaggcgccccgcttggaccctgggcatttggtttcttttctggggctgcatagtatcatcagtgtggtcatccagtaacgtggcctcctctagctcgaccagcagttctcccgggtcccactcgcaacacgaacatcatttccacgggtccaaacatcactctgtcccgatctcgatataccggtctcccgtttccctacgtggaggccacgctggagccacgtatattttcggcaaatccgggggccttattctgtacacgtggcccgcaaatgaccggccctccacacgctcagatcgcctggcagtcggattttcaaccaccgttaaggacggaattctcgttcgtatagatagcgcgccggggctgggcgactttcttcagttacacatcgaacagggtaagatcggtgtggtcttcaatatcgggacagttgacatttccattaaggaggagaggactcctgttaatgatgggaaataccatgtcgtcaggtttacgagaaacgggggaaacgctacgctgcaggtcgataattggcccgttaatgaacactatccaaccggtaataccgacaatgaaagattccagatggttaaacagaagattcccttcaagtacaatcgtcccgtagaagagtggctccaggaaaagggcaggcaactgaccatcttcaatacgcaggcccagatcgccattggagggaaagataagggacggctgtttcagggccaattgtctggtctgtattacgacggcctcaaggtgctgaacatggccgccgaaaataatccaaatattaaaattaacggatccgttagactcgtcggcgaggtcccatctattctcggtacgacgcagaccacgtcaatgccaccagaaatgtcaaccaccgtgatggagaccaccacaaccatggccacgacaaccacacgaaagaacagaagtaccgcgagtatccagccaacctccgatgacctcgtctctagtgccgaatgcagctctgacgatgaagattttgttgagtgcgagccttctacagctaatcctactgaacctgggatccggcgagtgcccggagccagtgaggtgataagagagtcctcctccaccaccggcatggtcgtagggatcgtcgcagcagccgctctgtgtatacttatcctgctgtacgcaatgtacaaatacagaaaccgagacgagggctcttatcaggtggacgaaacgcgcaattacattagtaactccgcgcagtctaatgggaccctgatgaaggaaaagcagcaatcatctaaatctggtcataagaagcagaagaataaggatcgcgaatattatgtttag

SEQ ID NO: 41564 - DNA, 1380 bp, Artificial Sequence
  derived and/or modified sequence
atgcacctgcgcatccacgcccggcgcagccccccaagaagacctgcctggaccctgggcatctggttcctgttctggggctgcatcgtgtcctctgtgtggagcagcagcaatgtggccagcagcagcagcaccagcagcagccctggcagccacagccagcacgagcaccacttccacggcagcaagcaccacagcgtgcccatcagcatctaccgcagccctgtgtccctgcggggcggccatgctggggccacctacatctttgggaagagcggcggcctcatcctgtacacctggccagccaatgaccggcccagcaccaggagtgaccggctggccgtgggcttcagcaccaccgtgaaggatggcatcctggtgagaattgattctgcccctggcctgggggacttcctgcagctgcacatcgagcagggcaagattggagtggtgttcaacatcggcaccgtggacatcagcatcaaggaggagaggacccctgtgaatgatggcaagtaccacgtggtgcgcttcaccagaaatggaggaaatgccaccctgcaggtggacaactggcctgtgaatgagcactaccccaccggcaacacagacaatgaacgcttccagatggtgaagcagaagatccccttcaagtacaacagacctgtggaggagtggctgcaggagaagggccggcagctgaccatcttcaacacccaggcccagatcgccatcggcggcaaggacaagggccgcctcttccagggccagctgagcggcctgtactatgatggcctgaaggtgctgaacatggctgctgagaacaaccccaacatcaagatcaatggatctgtgcggctggtgggggaggtgcccagcatcctgggcaccacccagaccacctccatgcctcctgagatgagcaccaccgtgatggagaccaccaccaccatggccaccaccaccaccaggaagaacagaagcacagccagcatccagcccaccagtgatgacctggtgagcagcgctgagtgcagcagtgatgatgaggactttgtggagtgtgagcccagcacagccaaccccacagagcccggcatccggcgggtgcctggggccagcgaggtgatccgggagagcagcagcaccaccggcatggtggtgggcatcgtggccgccgccgccctgtgcatcctgatcctgctgtatgccatgtacaagtacagaaacagagatgagggcagctaccaggtggatgagaccaggaactacatcagcaacagcgcccagagcaatggcaccctgatgaaggagaagcagcagagcagcaagagcggccacaagaagcagaagaacaaggaccgggagtactacgtgtag

SEQ ID NO: 41565 - DNA, 1380 bp, Artificial Sequence
  derived and/or modified sequence
atgcacctgcggatccacgcccggcggagccccccccggcggcccgcttggactctaggcatatggttcctgttctggggctgcatcgtgagctctgtctggtcaagctccaacgtggctagcagtagctctacgagctcatcacctggtagccacagccagcacgaacaccactttcacgggagcaagcatcactcggtccccatttccatttaccgatcccctgtctccctgcgaggggggcacgcgggggcgacttatatattcggtaagtccggagggttaatcctctatacttggccagctaatgaccgaccttctaccaggtcggatagactggcagtcggttttagcaccacagtcaaggatggaattcttgtgcggattgattctgcccccgggcttggcgactttctgcagctccacatcgagcagggcaagattggggttgtatttaacattgggacagtggacatcagtattaaggaggaaagaactcctgttaatgacggcaagtaccacgtcgtacgatttactcggaacggaggaaacgctaccttgcaagtcgacaattggccagttaatgaacactacccgacagggaacaccgacaacgaacggttccagatggttaagcagaagataccttttaagtacaaccggcccgttgaagagtggctgcaggaaaaagggcggcagcttacaatcttcaatacgcaggctcagatagcaataggtggtaaggacaaaggccgtctatttcagggccaacttagtggcctatactatgacggtctgaaggtattgaacatggcagccgagaataatcccaacatcaaaatcaacgggagcgtcaggctagtcggcgaggttcctagtatcctgggcacaacacagaccacatccatgcccccggaaatgtcaacaaccgtgatggagaccaccacgaccatggcaactactaccactcggaagaaccgcagcacagccagcatccagccgacctccgatgacctggtgagtagcgccgagtgctcctcggatgatgaggacttcgtcgaatgtgagccatccacagcaaacccgacagagcccgggattcggcgcgtgcctggtgctagcgaggtcattcgggaatccagcagcacaaccgggatggtggtgggcatcgttgctgcggctgctctgtgcatcctgattctgctatacgcaatgtacaagtaccggaacagggatgagggctcatatcaagttgacgaaacacgaaattatatcagcaattcagctcagtccaacggtaccctgatgaaggaaaaacagcaatccagcaagtctggacataagaagcaaaagaacaaagatcgcgaatactacgtttag

SEQ ID NO: 41566 - DNA, 4219 bp, Artificial Sequence
  derived and/or modified sequence
ctctgtgtggctcccgggagtgtgcggttaagtcatcagactcgaagtgcctagagatccggaggaagccgcgccggtcttcccctgacatgcgtggcatgccggggctccgtaggaggtttgctatacctgggaggaccctggcattctaaatttcagctccgggaaagagaaggggctttttgccttttatcttttttttttctttctttaagtagtaattttttaactgattcattgtttggaaagcgcatattgcttccctcttccccgaattctggcaactcttcctcctgctatgatgggcccttgggcatcatgaacttcattactcctcactggctggaattcaaactgcccatctgtagtggtcccgtgcgttgaccatgcacctgagaatccacgcgagacggagccctcctcgccggccggcctggacgcttgggatctggttcctgttctggggatgtatcgtcagctctgtatggagttcttctaatgtagcttcctcctcctccacctcttcctcgccggggtctcactctcagcacgagcaccatttccatggcagcaagcatcactcagtgcctatttctatctatcgttcccctgtttcccttcgaggaggacacgctggcgctacgtacatctttgggaaaagtggtgggcttatcctctacacctggccagccaatgacaggcccagcacgcggtctgaccgccttgccgtgggcttcagcaccactgtgaaggatggcatcttggtccgcatcgacagtgctccaggacttggtgacttcctccagcttcacatagaacaggggaaaattggagttgtcttcaacattggcacagttgacatctccatcaaagaggagagaacccctgtaaatgacggcaaataccatgtggtacgcttcaccaggaacggcggcaacgccaccctgcaggtggacaactggccagtgaatgaacattatcctacaggcaacactgataatgaacgcttccaaatggtaaaacagaaaatccccttcaaatataatcggcctgtagaggagtggctgcaggaaaaaggccggcagttaaccatcttcaacactcaggcgcaaatagccattggtggaaaggacaaaggacgcctcttccaaggccaactctctgggctctattatgatggtttgaaagtactgaacatggcggctgagaacaaccccaatattaaaatcaatggaagtgttcggctggttggagaagtcccatcaattttgggaacaacacagacgacctccatgccaccagaaatgtctactactgtcatggaaaccactactacaatggcgactaccacaacccgtaagaatcgctctacagccagcattcagccaacatcagatgatcttgtttcatctgctgaatgttcaagtgatgatgaagactttgttgaatgtgagccgagtacagcaaaccccacggagccgggaatcagacgggttccgggggcctcagaggtgatccgggagtcgagcagcacaacagggatggtcgtcggcattgtggctgctgccgccctctgcatcttgatcctcctgtacgccatgtacaagtacaggaacagggacgaggggtcctatcaagtggacgagacgcggaactacatcagcaactccgcccagagcaacggcacgctcatgaaggagaagcagcagagctcgaagagcggccacaagaaacagaaaaacaaggacagggagtattacgtgtaaacatgcgaacactgctcacacgcgagttttcacagttatttctatccacgcctatgaatctttggacggtgagatctcacagatgtcagaactgctggaactatgaaatggggtatataaccacgactctggtggggaaaaccgttttttaaaggacacacacacacacagcgatgcatctctctctaaagctcagccacggctgcggcaaggtcccagcggtcgctgggagacagaaggttttgtgccctgctgtatcataaagcacacacttagcgctctggagccggacggtggctccaccacttccgcaggcctggaaacttccttctccggaggaccttttactaaaaggtagaagacttcatggcttacttgttccataactccaagtgagtctgtaatgtttgtgaagcttgactgtaaccatgttttttctgtttaattatgtaaaaaacaaaactacaacaacaaaaaaagaaaaaagttaaaaaagaaaaaaacaccaaaaaacaaaaacaaacaaaaaaaaaaacccacaacccttatctggttctgaccagtgtgcgtgtaactttatgatctgaggggaaaaatggcttttgggtttttgtttatttttttgataatgactggacatcagaagaggaaaaaaactcaaaacaaaagcgagagagactattgccatatgaactcaaaagctatcatggtgttcactctacatatcaggttatggtgtctctagaatctgttgtttgtttcctataagatgctttgctgaacacatagcaaaattcatgtgacggatgataaattgattcgaaaagctggtcccccaggatctaatttcagaatttaccacccaaacccggaacagatgggtttagggctggtgttatcagagctattggctttacgtaacaatattgttcctgtccattcacccagccaaattgtgttaaagaggaaagccccacaaactaaaacagcctttcctagggaagaggaaggggaggtgggctggatctgtgactgattgaaatgcatgcaaataaaaaagacaatattaaagtctgttatcaaaccagacagtaggggagttcaactcgtgatggaaccacaaaaggtcacacaagccaaccatgtcatgccagagtacaaaacacatagttctttccccgccccgaatgtgacaatggttttcatagtggtttaattttgtagcctgacatttatggataactctgtccttccatttgctcacttctctcttcacccatcttttttaaaaacaaataaatgaataaagctgctgtgacacacacacaaaaggaatttaatagtataatatatatataaataaatatatatacagatatatttatcatggtatgtttgatgggatgactgacacaggaaatctgttaaagtcttaaaatggaatgagaatgttgttttaaaagaaaatagcaaaacaacaaaaaagcaaaccttaaaatgtgaagaaagtgtgaattttagttttgtcacagttaactgtgtcaaagagaattaaaaaaaaaaacttcagattttgtttacatattttactacatttttgctggtataattccttagccacctatgtacatactgctttaagaaatgtttttttcctgtttatttctgtttggtttatattctggttgtctttttctttttgtaaagaggaaacaatgtacagaaaaacaataaactggttgtatggccatagctatccgaaaagcaagagacaaagcaagacaaatattcacacaaaaatgaagtgtgtcctctggagggtcagatatacaatttcttttgtacagatgaaaatcaatcagctgcttagatttagaaatctactcttgctggtctttgtaagttgcatgaatatttgactttgaaaaaatatcttaacgacatggggcaaaaagtgcaatctaaatggtagcctttactaatgtgtgtggaaagaggtgttcctcattatctaatatttcaatgtgttaagagtttaatttttttgttatcattaaaaaagacaggattataaagagatatcaaagcacgattttagataacctaaacggcccagcctatacgaagttgattatatctcgatgtctgtaaaagattgctgttcttggagtcttgaggtcttgtgaattgatttcctgctttctttcatttttttcaatttaagtaataatacatttgttatattcctttcagtgtaagtttctatttggacaattttatgggaacatgtgcattctctatgtgagcttctatcatattcctgttttattagcagaacctaaaggaatttatttaatgatgttgtgacattactgctttttcttttttcttttcttagttcatatttgcattttcgttcaaggatatgcttagcaataaaatgttcttcccaa

SEQ ID NO: 41567 - DNA, 1380 bp, Artificial Sequence
  derived and/or modified sequence
atgcacctccgcatccacgctcggaggagccccccacgaaggcctgcctggactctgggaatatggtttctgttttggggttgtatcgtgtcctccgtttggagttcttccaacgtcgcttcatcaagttcaacctctagctcccccggatcacatagtcagcacgaacatcattttcatgggtcaaagcatcacagcgtgcccatctcaatttatcggagcccagtgagcctaagggggggtcatgcaggagctacttacatatttggtaagtcaggtggcttgatcttatatacctggccagcaaatgaccgcccttctactcgaagcgaccgtctggcagtcggctttagcacaacagtgaaggatggtatcttggtccgaatcgattctgctcctgggctgggcgattttctccaactccacatcgagcaaggaaagatcggtgtcgtctttaatattggtaccgtggatatcagcatcaaagaagagaggacacctgtgaatgacggcaagtaccacgtcgtgaggtttacgcgcaacggcggtaatgccaccctgcaggttgataattggccagtgaatgaacattaccctacaggtaatactgacaacgagaggttccaaatggtcaagcagaagattccttttaagtataaccggcctgtggaggaatggctgcaggagaaaggtcggcagttaactatttttaatacacaggcacagatcgccatcgggggaaaggacaaaggtcgtctctttcaagggcagctctccggcttgtattacgacgggctgaaggtactgaatatggcggctgagaataaccccaacatcaaaatcaatgggtctgtacgcctggtgggcgaggtccccagcatcctcgggactactcagacgacaagtatgccaccggaaatgagcacaaccgtgatggaaaccacaacaacaatggcaacgaccacgacccgcaaaaatcggagcaccgcctctatccaacctacctctgacgacctggtttcgtccgctgaatgctcgtctgatgacgaggactttgtggagtgtgagccaagcactgccaatcctaccgagcctggtatacggagagttccgggtgcttccgaggtcatccgagaaagttcttcgaccacaggcatggtggtcggtatcgtggccgctgccgctttgtgtatactgattctgctgtatgccatgtacaagtaccggaacagggacgaaggatcttaccaggtcgacgaaactcgcaactacatcagcaattctgcacagtctaatggcacgctgatgaaggaaaaacagcagagttccaagtcgggccacaagaaacagaaaaacaaagatagggagtattacgtgtag

SEQ ID NO: 41568 - DNA, 1380 bp, Artificial Sequence
  derived and/or modified sequence
atgcacctgagaatccacgccagaagaagcccccccagaagacccgcctggaccctgggcatctggttcctgttctggggctgcatcgtgagcagcgtgtggagcagcagcaacgtggccagcagcagcagcaccagcagcagccccggcagccacagccagcacgagcaccacttccacggcagcaagcaccacagcgtgcccatcagcatctacagaagccccgtgagcctgagaggcggccacgccggcgccacctacatcttcggcaagagcggcggcctgatcctgtacacctggcccgccaacgacagacccagcaccagaagcgacagactggccgtgggcttcagcaccaccgtgaaggacggcatcctggtgagaatcgacagcgcccccggcctgggcgacttcctgcagctgcacatcgagcagggcaagatcggcgtggtgttcaacatcggcaccgtggacatcagcatcaaggaggagagaacccccgtgaacgacggcaagtaccacgtggtgagattcaccagaaacggcggcaacgccaccctgcaggtggacaactggcccgtgaacgagcactaccccaccggcaacaccgacaacgagagattccagatggtgaagcagaagatccccttcaagtacaacagacccgtggaggagtggctgcaggagaagggcagacagctgaccatcttcaacacccaggcccagatcgccatcggcggcaaggacaagggcagactgttccagggccagctgagcggcctgtactacgacggcctgaaggtgctgaacatggccgccgagaacaaccccaacatcaagatcaacggcagcgtgagactggtgggcgaggtgcccagcatcctgggcaccacccagaccaccagcatgccccccgagatgagcaccaccgtgatggagaccaccaccaccatggccaccaccaccaccagaaagaacagaagcaccgccagcatccagcccaccagcgacgacctggtgagcagcgccgagtgcagcagcgacgacgaggacttcgtggagtgcgagcccagcaccgccaaccccaccgagcccggcatcagaagagtgcccggcgccagcgaggtgatcagagagagcagcagcaccaccggcatggtggtgggcatcgtggccgccgccgccctgtgcatcctgatcctgctgtacgccatgtacaagtacagaaacagagacgagggcagctaccaggtggacgagaccagaaactacatcagcaacagcgcccagagcaacggcaccctgatgaaggagaagcagcagagcagcaagagcggccacaagaagcagaagaacaaggacagagagtactacgtgtag

SEQ ID NO: 41569 - protein, 859 aa, Artificial Sequence
  derived and/or modified sequence
MLPVYQEVKPNPLQDANLCSRVFFWWLNPLFKIGHKRRLEEDDMYSVLPEDRSQHLGEELQGFWDKEVLRAENDAQKPSLTRAIIKCYWKSYLVLGIFTLIEESAKVIQPIFLGKIINYFENYDPMDSVALNTAYAYATVLTFCTLILAILHHLYFYHVQCAGMRLRVAMCHMIYRKALRLSNMAMGKTTTGQIVNLLSNDVNKFDQVTVFLHFLWAGPLQAIAVTALLWMEIGISCLAGMAVLIILLPLQSCFGKLFSSLRSKTATFTDARIRTMNEVITGIRIIKMYAWEKSFSNLITNLRKKEISKILRSSCLRGMNLASFFSASKIIVFVTFTTYVLLGSVITASRVFVAVTLYGAVRLTVTLFFPSAIERVSEAIVSIRRIQTFLLLDEISQRNRQLPSDGKKMVHVQDFTAFWDKASETPTLQGLSFTVRPGELLAVVGPVGAGKSSLLSAVLGELAPSHGLVSVHGRIAYVSQQPWVFSGTLRSNILFGKKYEKERYEKVIKACALKKDLQLLEDGDLTVIGDRGTTLSGGQKARVNLARAVYQDADIYLLDDPLSAVDAEVSRHLFELCICQILHEKITILVTHQLQYLKAASQILILKDGKMVQKGTYTEFLKSGIDFGSLLKKDNEESEQPPVPGTPTLRNRTFSESSVWSQQSSRPSLKDGALESQDTENVPVTLSEENRSEGKVGFQAYKNYFRAGAHWIVFIFLILLNTAAQVAYVLQDWWLSYWANKQSMLNVTVNGGGNVTEKLDLNWYLGIYSGLTVATVLFGIARSLLVFYVLVNSSQTLHNKMFESILKAPVLFFDRNPIGRILNRFSKDIGHLDDLLPLTFLDFIQRWDLAVLSWLVSNS

SEQ ID NO: 41570 - DNA, 2580 bp, Artificial Sequence
  derived and/or modified sequence
atgttgccggtgtaccaagaggtgaagccaaatcctttacaggacgcgaatctttgttcacgggtcttcttttggtggcttaaccccctgtttaaaataggccacaaacgccggctggaagaggatgatatgtattccgtgcttcccgaggacaggtctcagcatcttggcgaggaattgcagggtttctgggacaaagaggtgctacgggccgagaatgatgctcaaaagccaagcctcacccgtgctatcattaagtgctactggaaaagctacctagttctcggcattttcaccttgatcgaggagtccgcaaaagtcattcagcccatcttcctcggaaaaataatcaactattttgagaattacgatccaatggactctgtggctctgaataccgcctatgcatacgccaccgtgttgaccttctgcacactgatactcgcaattcttcatcacttatatttctatcacgtgcagtgtgcaggcatgagactgcgcgtggcaatgtgtcacatgatttataggaaggctctgaggttaagcaacatggccatgggtaaaacgacaacaggccagattgtcaatcttctgtccaacgacgtcaacaagttcgaccaagtgactgtatttctccattttctctgggcaggccccctgcaagcaatagccgtcaccgccctgctctggatggagatcggcatttcctgtctggcgggcatggcggttcttatcatcctgctcccactgcagagctgctttggcaagctgttctccagtctccgaagcaaaactgccacattcacggacgcgcgcatccgaactatgaatgaggtaatcaccggcatcaggatcattaagatgtacgcttgggagaaatcttttagcaacctaatcacaaaccttcgcaagaaagaaatcagtaaaattcttcgctcttcctgcctaagaggcatgaatttggcgtcgtttttctctgcatcaaagattatagtgtttgttaccttcactacttacgttctcctgggtagcgtcatcactgctagtcgggtttttgtggctgtcacgttgtatggtgccgtacgtttaactgttacccttttttttccctcggcaattgagcgagtgagtgaggcaattgtgtccatccgccgcatccagactttcctcctgctcgacgagatatcccagcggaatcggcagcttcctagcgacggtaagaaaatggtgcacgttcaagactttacggccttctgggacaaagccagcgagacgcccacacttcagggactatcgtttacagtgcgccccggagagttactcgccgtggtcggcccagtgggcgcaggcaaaagttctttattgtccgcagtgctaggcgaactcgcaccatcacacgggttggtatccgtccatggtcgcatcgcttatgtctcgcagcagccttgggtatttagcgggactctccggagtaacatcctctttggcaagaagtacgaaaaagagaggtacgaaaaggtgataaaggcgtgtgctttaaagaaggatctccagctgctggaggatggggatctcacggtaattggagacagagggactaccctctccgggggccagaaggcccgcgtgaatctcgccagagcagtttaccaggacgcagacatctatctgctggacgaccctctgtccgccgtcgacgctgaagtctcacgacacttgtttgagctgtgcatttgccagatactgcatgagaaaatcacgatccttgtgacacaccaactgcagtacctaaaagcagcaagccagatcctgattctgaaagatggcaagatggtgcaaaagggtacatacaccgaatttttaaagtcggggatagattttggaagccttctcaaaaaggacaacgaggagtctgaacagcctcctgtccctgggacccccacacttcggaacaggaccttttccgaatcgtccgtttggagccagcaaagtagcaggccctctttgaaggatggggctctggaatcccaggacaccgaaaatgttcccgtgacactgtcagaagaaaaccgaagtgagggcaaagtcggctttcaggcatacaagaactatttcagggccggagcccattggattgtttttatctttctgatcctccttaacacggcggcccaggtcgcatacgtgctgcaggattggtggctgagctactgggctaacaaacagagcatgctgaatgtcaccgtgaatggcgggggtaacgtgactgagaagctcgaccttaattggtacttaggtatttactccggattgaccgtcgctactgtcctgttcggcattgcaaggtccctgctggtcttttatgtgcttgtcaatagttcccagacactccacaataaaatgttcgagagcatcctgaaagctcctgttttgttctttgaccggaaccctatcggacggattctgaacaggtttagcaaagacattggccacctcgacgatctgctgccattgactttcctcgatttcattcagagatgggatctggccgtgctgtcttggctggtgagtaattcctag

SEQ ID NO: 41571 - DNA, 2580 bp, Artificial Sequence
  derived and/or modified sequence
atgctgcctgtgtaccaggaggtgaagcccaaccccctgcaggatgccaacctgtgcagcagggtcttcttctggtggctgaaccccctcttcaagattggccacaagaggcggctggaggaggatgacatgtacagcgtgctgcctgaggacaggagccagcacctgggggaggagctgcagggcttctgggacaaggaggtgctgcgggcagaaaatgatgcccagaagcccagcctgacccgggccatcatcaagtgctactggaagagctacctggtgctgggcatcttcaccctgattgaggagagcgccaaggtgatccagcccatcttcctgggcaagatcatcaactactttgaaaattatgaccccatggacagcgtggccctgaacacagcctatgcctatgccaccgtgctgaccttctgcaccctcatcctggccatcctgcaccacctgtacttctaccacgtgcagtgtgccggcatgaggctgcgggtggccatgtgccacatgatctacaggaaggccctgcggctgagcaacatggccatgggcaagaccaccaccggccagatcgtgaacctgctgagcaatgatgtgaacaagtttgaccaggtgacagtgttcctgcacttcctgtgggccggccccctgcaggccatcgctgtgacagccctgctgtggatggagatcggcatcagctgcctggccggcatggctgtgctgatcatcctgctgcccctgcagagctgcttcggcaagctgttcagcagcctgcggagcaagacagccaccttcacagatgcccgcatccgcaccatgaatgaagtcatcaccggcatccgcatcatcaagatgtatgcctgggagaagagcttcagcaacctgatcaccaacctgaggaagaaggagatcagcaagatcctgcggagcagctgcctgcggggcatgaacctggccagcttcttcagcgccagcaagatcatcgtgtttgtgaccttcaccacctacgtgctgctgggcagcgtcatcacagccagccgggtgtttgtggccgtgaccctgtatggagctgtgcggctgactgtgaccctcttcttccccagcgccatcgagcgggtgtctgaggccatcgtgtccatccgccgcatccagaccttcctgctgctggatgagatcagccagaggaaccggcagctgcccagtgatggcaagaagatggtgcacgtgcaggacttcaccgccttctgggacaaggccagcgagacccccaccctgcagggcctgtccttcaccgtgcggcctggagagctgctggccgtggtgggccctgtgggcgccggcaagagcagcctgctgtctgctgtgctgggggagctggcccccagccacggcctggtgtctgtgcacggcagaattgcctacgtgtcccagcagccctgggtgttcagcggcaccctgcggagcaacatcctgtttgggaagaagtatgagaaggagagatatgagaaggtgatcaaggcctgtgccctgaagaaggacctgcagctgctggaggatggagacctgaccgtcatcggggaccggggcaccaccctgagcggcggccagaaggcccgggtgaacctggcccgggctgtgtaccaggatgctgacatctacctgctggatgaccccctgtctgctgtggatgctgaggtgagccgccacctgtttgagctgtgcatctgccagatcctgcacgagaagatcaccatcctggtgacccaccagctgcagtacctgaaggccgccagccagatcctgatcctgaaggatggcaagatggtgcagaagggcacctacacagagttcctgaagtctggaattgactttggcagcctgctgaagaaggacaatgaggagagcgagcagccccctgtgcccggcacccccaccctgaggaacagaaccttcagcgagagctctgtgtggagccagcagagcagccggcccagcctgaaggatggagccctggagagccaggacacagaaaatgtgcctgtgaccctgtctgaagaaaatagaagtgagggcaaggtgggcttccaggcctacaagaactacttccgggccggggcccactggatcgtgttcatcttcctgatcctgctgaacacagctgcccaggtggcctacgtgctgcaggactggtggctgagctactgggccaacaagcagagcatgctgaatgtgacagtgaatggaggcggcaatgtgacagagaagctggacctgaactggtacctgggcatctacagcggcctgactgtggccaccgtgctgtttggcatcgcccggagcctgctggtgttctacgtgctggtgaacagcagccagaccctgcacaacaagatgtttgagagcatcctgaaggcccctgtgctcttctttgacaggaaccccatcggccgcatcctgaaccgcttcagcaaggacatcggccacctggatgacctgctgcccctgaccttcctggacttcatccagcgctgggacctggccgtgctgtcctggctggtgagcaacagctag

SEQ ID NO: 41572 - DNA, 2580 bp, Artificial Sequence
  derived and/or modified sequence
atgctgcccgtgtaccaggaggtgaagcccaaccccctgcaggacgcaaatctgtgtagtcgcgtctttttttggtggctgaaccccctattcaaaataggtcacaaacgccgtctggaggaagatgacatgtacagtgtcctgcctgaggaccgctctcagcatcttggggaggaactccagggattctgggacaaggaagtgctgagggcagaaaacgacgcgcagaaacctagtctgacccgcgcaataattaaatgttattggaagagctatctggtgttagggatttttactttgattgaggagtccgccaaggttatccaaccaatttttctcggcaaaatcattaattacttcgagaactatgatccaatggactcagtcgctctcaacacagcctatgcatatgcaactgttttaaccttctgcaccctgatcttagctatcctacatcatctttatttctatcacgtccagtgcgcaggcatgcgactcagggtggcgatgtgccacatgatctatagaaaggcattgcgcttgtcgaatatggctatgggcaaaaccacaaccggacaaattgtgaaccttctgtccaatgatgtgaataagtttgaccaggtgaccgtttttctgcattttctgtgggccggccccctgcaggctatcgccgttacggcgctgctgtggatggagatagggatcagctgcctagccggcatggcagtactgattatcttgctccccttgcagtcctgttttggaaaactgttttccagcctacggagcaaaactgccacctttactgatgcgagaatccgcacaatgaacgaagtgatcaccggcattcgaattataaaaatgtatgcgtgggagaagtcattcagcaatctcatcactaatctaagaaaaaaggaaattagtaagatactccggtcttcttgcctgagaggtatgaaccttgcgagcttctttagtgcttcgaagatcatcgtgtttgtcacctttactacctatgtgttgctcggaagcgttatcacagcatctagagttttcgtcgccgtgaccctgtatggggcagttaggttgacagtcacactgttctttccctcagccatcgagagggtgagcgaggccatcgtctctattcggagaatacagacatttcttcttctcgatgaaatttcacaaaggaacaggcagctgccgagcgacggcaagaaaatggtccatgtgcaggactttaccgctttctgggacaaggccagcgagaccccgacacttcagggactcagtttcactgtccgccctggagaacttctagcagtggttggccctgtgggagcaggtaagagttccctgctgtctgctgtactgggagagctggctccatctcatggcctggtatccgtgcacgggagaatcgcgtacgtcagccagcagccttgggtgtttagtggtacactacgttcgaacattctcttcggcaagaagtacgaaaaggaacgctacgagaaggtgataaaggcttgtgcactcaagaaggatttgcaactcttagaagatggcgacctgactgtgattggcgatcgcggcaccaccctgtccgggggacagaaagccagagtgaacctggcgagggctgtctaccaggatgcagatatctatctcctggacgatccactatccgccgtggatgcagaagtctcacgtcacttgtttgaactctgcatttgccaaattcttcatgagaagattaccatcctggtgacgcaccagctgcagtacctgaaggcggcctcccagatcttgattctgaaggatggaaagatggtgcagaagggcacttatactgagtttctaaaaagcggtatcgacttcggcagccttctgaaaaaggacaatgaggagagtgagcagcccccggtcccaggtacacccacacttcgcaacagaacattctccgaatctagtgtttggagccagcagtctagccggccctctctgaaggacggcgcattggagtcccaggataccgagaacgtccccgtgaccttgtctgaggagaacagaagtgaaggcaaggtcggtttccaggcgtacaaaaattattttagggccggcgctcactggatagtctttatcttcctgatattgctgaatactgcagcacaagtcgcctatgttctgcaagattggtggcttagctattgggctaataagcagtcaatgttgaatgtgaccgttaacggaggagggaatgtcacagagaagcttgacttgaattggtatctgggcatatacagtggcctgactgtggcaacagtgcttttcggcatcgcacgcagcctgcttgtattttacgtcctggtaaattccagtcagaccttgcataataaaatgttcgaatctatcttgaaggcgcccgtcctgttttttgatagaaatcctattgggcgaattcttaaccgcttcagcaaggatattggccacctggatgatctgctcccattgaccttcctggactttatccagagatgggacctcgcagtgctctcctggctggtttcgaattcttag

SEQ ID NO: 41573 - DNA, 2580 bp, Artificial Sequence
  derived and/or modified sequence
atgctgcccgtgtaccaggaagtcaagcccaaccctctgcaagacgctaatttgtgctcccgggtattcttttggtggctaaatccactctttaagatcgggcacaagagacgcctcgaagaagacgatatgtactcagttctgccagaggaccggagccaacatttgggcgaggaactccaaggattctgggataaggaagtgctgcgcgcagaaaatgacgctcagaaaccaagtctgaccagagctataattaagtgttactggaaatcatacctggtgctcggaatttttaccctgatagaggagtccgctaaggttatccaacctatttttctgggcaagattatcaactattttgaaaactatgatccaatggattcagtggctctgaatacggcttacgcgtatgccaccgtcctcactttctgcaccctgattctcgccatcctgcaccacctctacttttatcacgttcagtgcgcaggtatgcgtttacgcgtcgcaatgtgccacatgatctatcgcaaggcactgaggctgtcaaatatggccatgggtaagacaaccaccggtcaaatcgtcaacttactgagcaacgacgtgaacaagttcgatcaggtgaccgtgtttctccactttctgtgggccggaccattgcaagccatcgccgtgacagcactgctgtggatggagatcgggatcagttgccttgccggaatggctgtgctgatcatcctactgcccctgcagtcctgctttggtaagctattttcctcacttagatcaaaaactgcaacctttaccgacgcgagaattcggacaatgaacgaagtgatcacgggcatccggatcattaagatgtacgcctgggagaagtcattctcaaaccttatcaccaacctgcggaaaaaggagattagtaaaatcctcaggtcctcttgcctgcgagggatgaacttagcttcctttttttcagccagtaaaatcatcgtttttgtgactttcaccacatatgtgctgctgggtagcgtcatcactgcaagtagagtattcgtggccgtgaccctctacggagcggtgcgattaacagtgactcttttctttccctcagcaatagaaagggtgagcgaggccattgtgagcatccgacgcatccagactttcctgctgcttgacgaaatctcccagcgcaaccggcagttgccttcagacggtaaaaagatggtgcatgttcaggacttcacagctttctgggataaggcaagcgagacgccaactctgcagggactcagttttaccgtgaggccgggtgagctcttagcagtggtaggcccagtgggggctggaaaatcctctctgctgtcagctgtgctgggggagttggccccttcccatggattggttagtgtacacggccgaattgcctatgtatctcagcagccttgggtcttttctgggacgctcagatccaacattctgtttggaaagaagtatgagaaggaacggtacgagaaggtgattaaagcttgtgcattaaaaaaagatctacagctgttggaggacggggatttgacagtgatcggggatcgcggtaccactttgagtggcggacaaaaggcccgtgtaaatctggctagggccgtgtatcaggacgccgatatatatctcttggatgacccccttagcgccgtcgatgcagaggtgtccagacatctgtttgagctgtgcatctgccagattctgcatgagaagatcactatccttgtaacccatcagctacaatatttgaaggccgcttcacagatcctgatcctgaaggacggaaaaatggtacagaagggcacctacactgagttccttaaaagcggtattgactttggaagtcttctgaaaaaggataatgaggagagcgagcagccccctgtccccggaactcccacactgcggaataggaccttcagcgagagcagcgtttggtcacagcagtcctcacgcccaagcttaaaagatggggctctggaatctcaggacaccgaaaacgttccagtgactctgtcagaggaaaacaggtcagaaggtaaagttggattccaggcttacaagaattactttcgggctggggctcactggattgtcttcattttcctcatactcctcaataccgcagcccaggtcgcctacgtgctccaagactggtggctctcctattgggccaataagcagagtatgctcaacgtgacagtgaacggaggaggcaatgtcacagaaaaactcgacctgaactggtatttgggaatctacagtggactgacagtggccacagttctattcgggatagctcggtctttactcgtcttttacgtactcgtaaatagcagccagacactgcacaataagatgtttgagtctattttaaaagcccctgtgcttttcttcgaccgcaatccgattggtcgtatacttaatcggtttagcaaagatataggtcacctggacgatctcctgcctttaacctttctggatttcatccagcgatgggacttagctgtgctctcttggttggtgtctaactcttag

SEQ ID NO: 41574 - DNA, 3063 bp, Artificial Sequence
  derived and/or modified sequence
gagcggacaggcgtggcggccggagccccagcatccctgcttgaggtccaggagcggagcccgcggccaccgccgcctgatcagcgcgaccccggcccgcgcccgccccgcccggcaagatgctgcccgtgtaccaggaggtgaagcccaacccgctgcaggacgcgaacctctgctcacgcgtgttcttctggtggctcaatcccttgtttaaaattggccataaacggagattagaggaagatgatatgtattcagtgctgccagaagaccgctcacagcaccttggagaggagttgcaagggttctgggataaagaagttttaagagctgagaatgacgcacagaagccttctttaacaagagcaatcataaagtgttactggaaatcttatttagttttgggaatttttacgttaattgaggaaagtgccaaagtaatccagcccatatttttgggaaaaattattaattattttgaaaattatgatcccatggattctgtggctttgaacacagcgtacgcctatgccacggtgctgactttttgcacgctcattttggctatactgcatcacttatatttttatcacgttcagtgtgctgggatgaggttacgagtagccatgtgccatatgatttatcggaaggcacttcgtcttagtaacatggccatggggaagacaaccacaggccagatagtcaatctgctgtccaatgatgtgaacaagtttgatcaggtgacagtgttcttacacttcctgtgggcaggaccactgcaggcgattgcagtgactgccctactctggatggagataggaatatcgtgccttgctgggatggcagttctaatcattctcctgcccttgcaaagctgttttgggaagttgttctcatcactgaggagtaaaactgcaactttcacggatgccaggatcaggaccatgaatgaagttataactggtataaggataataaaaatgtacgcctgggaaaagtcattttcaaatcttattaccaatttgagaaagaaggagatttccaagattctgagaagttcctgcctcagagggatgaatttggcttcatttttcagtgcaagcaaaatcatcgtgtttgtgaccttcaccacctacgtgctcctcggcagtgtgatcacagccagccgcgtgttcgtggcagtgacgctgtatggggctgtgcggctgacggttaccctcttcttcccctcagccattgagagggtgtcagaggcaatcgtcagcatccgaagaatccagacctttttgctacttgatgagatatcacagcgcaaccgtcagctgccgtcagatggtaaaaagatggtgcatgtgcaggattttactgctttttgggataaggcatcagagaccccaactctacaaggcctttcctttactgtcagacctggcgaattgttagctgtggtcggccccgtgggagcagggaagtcatcactgttaagtgccgtgctcggggaattggccccaagtcacgggctggtcagcgtgcatggaagaattgcctatgtgtctcagcagccctgggtgttctcgggaactctgaggagtaatattttatttgggaagaaatacgaaaaggaacgatatgaaaaagtcataaaggcttgtgctctgaaaaaggatttacagctgttggaggatggtgatctgactgtgataggagatcggggaaccacgctgagtggagggcagaaagcacgggtaaaccttgcaagagcagtgtatcaagatgctgacatctatctcctggacgatcctctcagtgcagtagatgcggaagttagcagacacttgttcgaactgtgtatttgtcaaattttgcatgagaagatcacaattttagtgactcatcagttgcagtacctcaaagctgcaagtcagattctgatattgaaagatggtaaaatggtgcagaaggggacttacactgagttcctaaaatctggtatagattttggctcccttttaaagaaggataatgaggaaagtgaacaacctccagttccaggaactcccacactaaggaatcgtaccttctcagagtcttcggtttggtctcaacaatcttctagaccctccttgaaagatggtgctctggagagccaagatacagagaatgtcccagttacactatcagaggagaaccgttctgaaggaaaagttggttttcaggcctataagaattacttcagagctggtgctcactggattgtcttcattttccttattctcctaaacactgcagctcaggttgcctatgtgcttcaagattggtggctttcatactgggcaaacaaacaaagtatgctaaatgtcactgtaaatggaggaggaaatgtaaccgagaagctagatcttaactggtacttaggaatttattcaggtttaactgtagctaccgttctttttggcatagcaagatctctattggtattctacgtccttgttaactcttcacaaactttgcacaacaaaatgtttgagtcaattctgaaagctccggtattattctttgatagaaatccaataggaagaattttaaatcgtttctccaaagacattggacacttggatgatttgctgccgctgacgtttttagatttcatccagagatgggatctcgctgtgttgtcctggctggtctcaaactcctaggctcaagcaatcctcctccctcctcaagcaaacctcagtgctgggattataggcatgagccactgtacctggctaaatgttgtttttttgatattcaatttttgtttatagaattttcatttgttttgctcttatacttttcatctttttatgtttattgaccaattaaatatcatttgggtaagcacctatttaagtgtcttaacaatttttctattgagtactctgggtttttgttttgtttttcttactgatttgtagaattctttatgtattctgaattgcagataccttccttctgtactaatgcttatctttttagccctgtaatattgtgttttcataaacatacttatcaatcttt

SEQ ID NO: 41575 - DNA, 2580 bp, Artificial Sequence
  derived and/or modified sequence
atgctgcccgtgtaccaggaggtgaagcccaaccccctgcaggacgccaacctgtgcagcagagtgttcttctggtggctgaaccccctgttcaagatcggccacaagagaagactggaggaggacgacatgtacagcgtgctgcccgaggacagaagccagcacctgggcgaggagctgcagggcttctgggacaaggaggtgctgagagccgagaacgacgcccagaagcccagcctgaccagagccatcatcaagtgctactggaagagctacctggtgctgggcatcttcaccctgatcgaggagagcgccaaggtgatccagcccatcttcctgggcaagatcatcaactacttcgagaactacgaccccatggacagcgtggccctgaacaccgcctacgcctacgccaccgtgctgaccttctgcaccctgatcctggccatcctgcaccacctgtacttctaccacgtgcagtgcgccggcatgagactgagagtggccatgtgccacatgatctacagaaaggccctgagactgagcaacatggccatgggcaagaccaccaccggccagatcgtgaacctgctgagcaacgacgtgaacaagttcgaccaggtgaccgtgttcctgcacttcctgtgggccggccccctgcaggccatcgccgtgaccgccctgctgtggatggagatcggcatcagctgcctggccggcatggccgtgctgatcatcctgctgcccctgcagagctgcttcggcaagctgttcagcagcctgagaagcaagaccgccaccttcaccgacgccagaatcagaaccatgaacgaggtgatcaccggcatcagaatcatcaagatgtacgcctgggagaagagcttcagcaacctgatcaccaacctgagaaagaaggagatcagcaagatcctgagaagcagctgcctgagaggcatgaacctggccagcttcttcagcgccagcaagatcatcgtgttcgtgaccttcaccacctacgtgctgctgggcagcgtgatcaccgccagcagagtgttcgtggccgtgaccctgtacggcgccgtgagactgaccgtgaccctgttcttccccagcgccatcgagagagtgagcgaggccatcgtgagcatcagaagaatccagaccttcctgctgctggacgagatcagccagagaaacagacagctgcccagcgacggcaagaagatggtgcacgtgcaggacttcaccgccttctgggacaaggccagcgagacccccaccctgcagggcctgagcttcaccgtgagacccggcgagctgctggccgtggtgggccccgtgggcgccggcaagagcagcctgctgagcgccgtgctgggcgagctggcccccagccacggcctggtgagcgtgcacggcagaatcgcctacgtgagccagcagccctgggtgttcagcggcaccctgagaagcaacatcctgttcggcaagaagtacgagaaggagagatacgagaaggtgatcaaggcctgcgccctgaagaaggacctgcagctgctggaggacggcgacctgaccgtgatcggcgacagaggcaccaccctgagcggcggccagaaggccagagtgaacctggccagagccgtgtaccaggacgccgacatctacctgctggacgaccccctgagcgccgtggacgccgaggtgagcagacacctgttcgagctgtgcatctgccagatcctgcacgagaagatcaccatcctggtgacccaccagctgcagtacctgaaggccgccagccagatcctgatcctgaaggacggcaagatggtgcagaagggcacctacaccgagttcctgaagagcggcatcgacttcggcagcctgctgaagaaggacaacgaggagagcgagcagccccccgtgcccggcacccccaccctgagaaacagaaccttcagcgagagcagcgtgtggagccagcagagcagcagacccagcctgaaggacggcgccctggagagccaggacaccgagaacgtgcccgtgaccctgagcgaggagaacagaagcgagggcaaggtgggcttccaggcctacaagaactacttcagagccggcgcccactggatcgtgttcatcttcctgatcctgctgaacaccgccgcccaggtggcctacgtgctgcaggactggtggctgagctactgggccaacaagcagagcatgctgaacgtgaccgtgaacggcggcggcaacgtgaccgagaagctggacctgaactggtacctgggcatctacagcggcctgaccgtggccaccgtgctgttcggcatcgccagaagcctgctggtgttctacgtgctggtgaacagcagccagaccctgcacaacaagatgttcgagagcatcctgaaggcccccgtgctgttcttcgacagaaaccccatcggcagaatcctgaacagattcagcaaggacatcggccacctggacgacctgctgcccctgaccttcctggacttcatccagagatgggacctggccgtgctgagctggctggtgagcaacagctag

SEQ ID NO: 41576 - protein, 867 aa, Artificial Sequence
  derived and/or modified sequence
MTENKTVSSSSTRDDQTNIGLTCQEVKALREKAWSRTNEGNAMSQSLVLYGASKENSEGFHESKMTNTEGVNKGIYFSYPCRRHSCAVVNIPAPCVNKMISHIQDVESKIQEHLKRFETSFEEWSRTSSTKDLKEDWSVTTPVKEVKPGEKRDEKCPELKQEMETLLSEAIRLIKSLETDRADAEEALKQQRSRKNMINMKIDSWSVWKLQELPLAVQKEHEAYLSDVIELQWHLEDKANQLQHFEKQKTELEEANAKIQADIDYMNEHGPLLDSKQNQELQDLKNHYKKKMEVMDLHRKVNEELEEALEACENARLKAQQIKEEIDKDIYQDEKTIEAYKREIYQLNSLFDHYSSSVINVNTNIEEKEEEVTEAIRETKSSKNELHSLSKMLEDLRRVYDQLTWKQKSHENQYLEAVNDFYAAKKTWDIELSDVAKDFSAISLACTKLTEDNKKLEIDINKITVKTNESIRKKSKYESEIKYLTIMKLKNDKHLKNIYKEAYRIGTLFHLTKHKTDEMEDKIAEVRRKFKGREEFLKKLTQGEVAAGMVLQKKLYSIYEVQALERKELIKNRAICAMSLAELQEPLLQLEDEAERIRSLDKEHSVMLNNIIDQKDLIRRKVGKVKKKLRKKGKKTLDALIETESKRSAIFKDLEATKSKTMIFYAKINELNEELKAKEEEKKSFDQTLEILKNKFITMRFKREHAQTVFDHYMQEKKDCEERIFEEDQRFRVLLAVRQKTLQDTQKIIADSLEENLRLAQEYQQLQITFLKEKDNYFNIYDKQLSLDTSIRDKKQLCQLQRRMHTLWQEHFKLVVLFSQMRLANFQTDSQESIQKILAVQEESSNLMQHILGFFQTLTDGTCENDG

SEQ ID NO: 41577 - protein, 297 aa, Artificial Sequence
  derived and/or modified sequence
MTENKTVSSSSTRDDQTNIGLTCQEVKALREKAWSRTNEGNAMSQSLVLYGASKENSEGFHESKMTNTEGVNKGIYFSYPCRRHSCAVVNIPAPCVNKMISHIQDVESKIQEHLKRFETSFEEWSRTSSTKDLKEDWSVTTPVKEVKPGEKRDEKCPELKQEMETLLSEAIRLIKSLETDRADAEEALKQQRSRKNMINMKIDSWSVWKLQELPLAVQKEHEAYLSDVIELQWHLEDKANQLQHFEKQKTELEEANAKIQADIDYMNEHGPLLDSKQNQELQDLKNHYKKKIKKKKK

SEQ ID NO: 41578 - DNA, 3391 bp, Artificial Sequence
  derived and/or modified sequence
ggcgcgggtccgggagacgcgcggggaaacgcgcggagccgtgtctgctcaatcaagtcaaatactgaacaacttcctggcggagaggctgagaattttatacttgcttgctcgaaagcaccccaaataagatgatccacgccaacacctcccctttacaggttttaaaatattcttataactatgactgaaaacaagacagtttcctcttcttccactagagatgatcaaaccaatataggtttaacatgtcaggaagtaaaggctctcagagagaaggcatggtcaaggacaaatgaaggcaatgccatgtctcaaagtttggttctatatggagcctctaaggagaacagtgaaggttttcatgaaagtaaaatgacaaatactgaaggggtgaataaaggcatttactttagctacccatgtcgacgtcacagctgtgccgtagtaaatattccagcaccttgtgtcaacaaaatgatttcacacatccaagatgtggagtccaaaatacaggagcatttgaaaaggtttgaaacttcttttgaagaatggagcagaacttcttccacaaaagacctgaaagaagattggagtgtaactacaccagtgaaagaggtcaaaccaggagaaaagagagatgaaaagtgtccagagttaaagcaggaaatggaaacattgctctcagaggccattcgtctcattaaaagtctagaaactgaccgggcagacgctgaagaagctttaaaacaacagagatcaagaaagaatatgattaacatgaaaattgactcttggtcagtctggaaacttcaagaactcccattggctgtgcagaaagaacatgaggcctatttgagtgatgttatagaattacaatggcatcttgaagataaagctaatcaactacaacattttgaaaaacaaaagacagagttagaagaagcaaatgcaaagattcaagcagacatagactacatgaatgaacatggccctctactggactctaagcagaatcaggaacttcaagatctgaagaaccattataaaaaaaaaatggaggtaatggacctacacagaaaagttaatgaagaacttgaagaagctttagaagcctgtgaaaatgccagattgaaggctcagcaaattaaagaagagattgataaggatatttaccaggatgaaaaaaccatagaggcctacaagagagagatatatcaacttaacagtctatttgatcattactcttcatcagtgataaatgttaatactaatattgaggagaaggaagaggaagtgactgaagcaataagggaaacaaagtcatcaaaaaatgaattacattctctatcaaaaatgctggaagatttgagaagagtttatgaccaactaacctggaagcaaaaaagtcatgaaaatcagtatctggaagcagttaatgatttttatgctgcaaaaaaaacatgggatattgagctttctgatgttgcaaaagatttttcagctatttctttggcatgtacaaaactgacggaagacaataaaaaacttgagattgatattaacaaaataacagtaaaaaccaatgaaagcatacggaaaaaatcaaaatacgaatctgaaataaaatatttgacaataatgaagttaaagaatgataaacatctcaagaacatctataaggaggcttatcgcattggtactcttttccacctaaccaaacacaagacagatgaaatggaagataaaatagcagaagtgagaagaaagttcaagggtagagaagaattcctgaaaaaactcactcaaggtgaagtggctgctggaatggtgcttcagaaaaaactatattccatttacgaagtccaggcacttgagcggaaagagcttataaaaaatagagcaatatgtgccatgtcactggcagaactacaggaacctctgcttcaactagaagatgaagctgaaagaatcagaagtctcgacaaagaacattctgttatgcttaataatataattgatcagaaagatcttattagaagaaaggtgggaaaagtaaagaaaaaattacgaaaaaaggggaagaaaacccttgatgcattaatagaaactgagagtaaacgctcagcaatttttaaagacctagaagcaactaaaagtaagacaatgattttttatgcaaaaataaatgaattgaatgaggaattaaaagcaaaagaagaagaaaagaaaagttttgatcagacacttgaaatattaaagaacaaatttataactatgagatttaaaagggaacatgcacaaactgtgtttgatcattatatgcaagagaaaaaagactgtgaagagagaatctttgaggaagatcagagatttagagtgctccttgctgtaagacaaaaaactcttcaagatacccaaaaaataatagctgattcacttgaagaaaatctgcgtttagctcaagagtatcaacagctacagattacattcttaaaagaaaaggacaattatttcaatatatatgataaacagctatcacttgatacttcaattagagataagaaacagctctgtcagctgcagagaaggatgcacacactgtggcaggagcacttcaaactggtggtcctcttcagccagatgaggctggccaacttccagacagactctcaggagagtattcagaaaatattagctgtgcaggaggaatcttcaaatttaatgcaacacatcttaggtttcttccagactttgacagatggcacatgcgaaaacgatggttaagcaaacaaccaatgtatcttggatgctgaaataaaagacaagaaaagtcacacagttcagataacagtgtaattggacattcacctgtttgccatttcacacttccatgaacgaaaaactcactcacctcccagcatgctttgccactcttttactcacagcaaatccataacaatgaaacaggtgactttcatgctgctgtcaggaacgatctaatttcagctctgggtgactgattgcaattggctttgcctcatctgataattaatctatgtcaccattaattggaagagagaataattactggcggtgttgacagtgactgttcgcttccccagatttccctatcgtcttggcccaaataaaggctttgccattcagtacttaaagtttgtgtaaactgtaacaatatctatgcccatgtgacactttgagacactctgtctaatgtacttttgtttttgtgtttaccagtcttttttagctcactgagagctgtctctctcaatcactcctcaatgttctatcttaattttgtggaagtttaaagttttcaatgagctggagatgaatgattaatgaataaatttaaatgcttcatttt

SEQ ID NO: 41579 - DNA, 3354 bp, Artificial Sequence
  derived and/or modified sequence
tgtctgctcaatcaagtcaaatactgaacaacttcctggcggagaggctgagaattttatacttgcttgctcgaaagcaccccaaataagatgatccacgccaacacctcccctttacaggttttaaaatattcttataactatgactgaaaacaagacagtttcctcttcttccactagagatgatcaaaccaatataggtttaacatgtcaggaagtaaaggctctcagagagaaggcatggtcaaggacaaatgaaggcaatgccatgtctcaaagtttggttctatatggagcctctaaggagaacagtgaaggttttcatgaaagtaaaatgacaaatactgaaggggtgaataaaggcatttactttagctacccatgtcgacgtcacagctgtgccgtagtaaatattccagcaccttgtgtcaacaaaatgatttcacacatccaagatgtggagtccaaaatacaggagcatttgaaaaggtttgaaacttcttttgaagaatggagcagaacttcttccacaaaagacctgaaagaagattggagtgtaactacaccagtgaaagaggtcaaaccaggagaaaagagagatgaaaagtgtccagagttaaagcaggaaatggaaacattgctctcagaggccattcgtctcattaaaagtctagaaactgaccgggcagacgctgaagaagctttaaaacaacagagatcaagaaagaatatgattaacatgaaaattgactcttggtcagtctggaaacttcaagaactcccattggctgtgcagaaagaacatgaggcctatttgagtgatgttatagaattacaatggcatcttgaagataaagctaatcaactacaacattttgaaaaacaaaagacagagttagaagaagcaaatgcaaagattcaagcagacatagactacatgaatgaacatggccctctactggactctaagcagaatcaggaacttcaagatctgaagaaccattataaaaaaaaaatggaggtaatggacctacacagaaaagttaatgaagaacttgaagaagctttagaagcctgtgaaaatgccagattgaaggctcagcaaattaaagaagagattgataaggatatttaccaggatgaaaaaaccatagaggcctacaagagagagatatatcaacttaacagtctatttgatcattactcttcatcagtgataaatgttaatactaatattgaggagaaggaagaggaagtgactgaagcaataagggaaacaaagtcatcaaaaaatgaattacattctctatcaaaaatgctggaagatttgagaagagtttatgaccaactaacctggaagcaaaaaagtcatgaaaatcagtatctggaagcagttaatgatttttatgctgcaaaaaaaacatgggatattgagctttctgatgttgcaaaagatttttcagctatttctttggcatgtacaaaactgacggaagacaataaaaaacttgagattgatattaacaaaataacagtaaaaaccaatgaaagcatacggaaaaaatcaaaatacgaatctgaaataaaatatttgacaataatgaagttaaagaatgataaacatctcaagaacatctataaggaggcttatcgcattggtactcttttccacctaaccaaacacaagacagatgaaatggaagataaaatagcagaagtgagaagaaagttcaagggtagagaagaattcctgaaaaaactcactcaaggtgaagtggctgctggaatggtgcttcagaaaaaactatattccatttacgaagtccaggcacttgagcggaaagagcttataaaaaatagagcaatatgtgccatgtcactggcagaactacaggaacctctgcttcaactagaagatgaagctgaaagaatcagaagtctcgacaaagaacattctgttatgcttaataatataattgatcagaaagatcttattagaagaaaggtgggaaaagtaaagaaaaaattacgaaaaaaggggaagaaaacccttgatgcattaatagaaactgagagtaaacgctcagcaatttttaaagacctagaagcaactaaaagtaagacaatgattttttatgcaaaaataaatgaattgaatgaggaattaaaagcaaaagaagaagaaaagaaaagttttgatcagacacttgaaatattaaagaacaaatttataactatgagatttaaaagggaacatgcacaaactgtgtttgatcattatatgcaagagaaaaaagactgtgaagagagaatctttgaggaagatcagagatttagagtgctccttgctgtaagacaaaaaactcttcaagatacccaaaaaataatagctgattcacttgaagaaaatctgcgtttagctcaagagtatcaacagctacagattacattcttaaaagaaaaggacaattatttcaatatatatgataaacagctatcacttgatacttcaattagagataagaaacagctctgtcagctgcagagaaggatgcacacactgtggcaggagcacttcaaactggtggtcctcttcagccagatgaggctggccaacttccagacagactctcaggagagtattcagaaaatattagctgtgcaggaggaatcttcaaatttaatgcaacacatcttaggtttcttccagactttgacagatggcacatgcgaaaacgatggttaagcaaacaaccaatgtatcttggatgctgaaataaaagacaagaaaagtcacacagttcagataacagtgtaattggacattcacctgtttgccatttcacacttccatgaacgaaaaactcactcacctcccagcatgctttgccactcttttactcacagcaaatccataacaatgaaacaggtgactttcatgctgctgtcaggaacgatctaatttcagctctgggtgactgattgcaattggctttgcctcatctgataattaatctatgtcaccattaattggaagagagaataattactggcggtgttgacagtgactgttcgcttccccagatttccctatcgtcttggcccaaataaaggctttgccattcagtacttaaagtttgtgtaaactgtaacaatatctatgcccatgtgacactttgagacactctgtctaatgtacttttgtttttgtgtttaccagtcttttttagctcactgagagctgtctctctcaatcactcctcaatgttctatcttaattttgtggaagtttaaagttttcaatgagctggagatgaatgattaatgaataaatttaaatgcttcattttgtcc

SEQ ID NO: 41580 - DNA, 2604 bp, Artificial Sequence
  derived and/or modified sequence
atgaccgagaacaagaccgtgagcagcagcagcaccagagacgaccagaccaacatcggcctgacctgccaggaggtgaaggccctgagagagaaggcctggagcagaaccaacgagggcaacgccatgagccagagcctggtgctgtacggcgccagcaaggagaacagcgagggcttccacgagagcaagatgaccaacaccgagggcgtgaacaagggcatctacttcagctacccctgcagaagacacagctgcgccgtggtgaacatccccgccccctgcgtgaacaagatgatcagccacatccaggacgtggagagcaagatccaggagcacctgaagagattcgagaccagcttcgaggagtggagcagaaccagcagcaccaaggacctgaaggaggactggagcgtgaccacccccgtgaaggaggtgaagcccggcgagaagagagacgagaagtgccccgagctgaagcaggagatggagaccctgctgagcgaggccatcagactgatcaagagcctggagaccgacagagccgacgccgaggaggccctgaagcagcagagaagcagaaagaacatgatcaacatgaagatcgacagctggagcgtgtggaagctgcaggagctgcccctggccgtgcagaaggagcacgaggcctacctgagcgacgtgatcgagctgcagtggcacctggaggacaaggccaaccagctgcagcacttcgagaagcagaagaccgagctggaggaggccaacgccaagatccaggccgacatcgactacatgaacgagcacggccccctgctggacagcaagcagaaccaggagctgcaggacctgaagaaccactacaagaagaagatggaggtgatggacctgcacagaaaggtgaacgaggagctggaggaggccctggaggcctgcgagaacgccagactgaaggcccagcagatcaaggaggagatcgacaaggacatctaccaggacgagaagaccatcgaggcctacaagagagagatctaccagctgaacagcctgttcgaccactacagcagcagcgtgatcaacgtgaacaccaacatcgaggagaaggaggaggaggtgaccgaggccatcagagagaccaagagcagcaagaacgagctgcacagcctgagcaagatgctggaggacctgagaagagtgtacgaccagctgacctggaagcagaagagccacgagaaccagtacctggaggccgtgaacgacttctacgccgccaagaagacctgggacatcgagctgagcgacgtggccaaggacttcagcgccatcagcctggcctgcaccaagctgaccgaggacaacaagaagctggagatcgacatcaacaagatcaccgtgaagaccaacgagagcatcagaaagaagagcaagtacgagagcgagatcaagtacctgaccatcatgaagctgaagaacgacaagcacctgaagaacatctacaaggaggcctacagaatcggcaccctgttccacctgaccaagcacaagaccgacgagatggaggacaagatcgccgaggtgagaagaaagttcaagggcagagaggagttcctgaagaagctgacccagggcgaggtggccgccggcatggtgctgcagaagaagctgtacagcatctacgaggtgcaggccctggagagaaaggagctgatcaagaacagagccatctgcgccatgagcctggccgagctgcaggagcccctgctgcagctggaggacgaggccgagagaatcagaagcctggacaaggagcacagcgtgatgctgaacaacatcatcgaccagaaggacctgatcagaagaaaggtgggcaaggtgaagaagaagctgagaaagaagggcaagaagaccctggacgccctgatcgagaccgagagcaagagaagcgccatcttcaaggacctggaggccaccaagagcaagaccatgatcttctacgccaagatcaacgagctgaacgaggagctgaaggccaaggaggaggagaagaagagcttcgaccagaccctggagatcctgaagaacaagttcatcaccatgagattcaagagagagcacgcccagaccgtgttcgaccactacatgcaggagaagaaggactgcgaggagagaatcttcgaggaggaccagagattcagagtgctgctggccgtgagacagaagaccctgcaggacacccagaagatcatcgccgacagcctggaggagaacctgagactggcccaggagtaccagcagctgcagatcaccttcctgaaggagaaggacaactacttcaacatctacgacaagcagctgagcctggacaccagcatcagagacaagaagcagctgtgccagctgcagagaagaatgcacaccctgtggcaggagcacttcaagctggtggtgctgttcagccagatgagactggccaacttccagaccgacagccaggagagcatccagaagatcctggccgtgcaggaggagagcagcaacctgatgcagcacatcctgggcttcttccagaccctgaccgacggcacctgcgagaacgacggctag

SEQ ID NO: 41581 - DNA, 2604 bp, Artificial Sequence
  derived and/or modified sequence
atgacagaaaacaagacagtgagtagtagttcaacacgtgatgatcagacaaatatcggactcacctgccaggaagtcaaggcactgcgagaaaaggcttggtcacgtacaaatgagggtaacgctatgtcgcagagcctggtgctatacggtgctagtaaagagaactcagaaggatttcatgagtctaagatgaccaatacagagggagtgaacaaaggaatctacttctcctacccctgccggcgtcacagctgtgccgtggtcaatatcccagccccatgtgtgaataagatgatctctcatattcaagacgtggaaagcaagatccaggagcacctgaaacggtttgagacaagcttcgaagagtggtcccgcacctccagcacaaaggaccttaaagaagactggagcgtcactacgccagtgaaggaagtgaaaccgggagagaagagagatgaaaaatgtccagagctaaagcaggagatggagactctattatcagaagcaatccggcttattaagagcctcgagaccgacagagctgatgccgaggaagctttgaaacagcaaaggtctagaaagaacatgatcaacatgaagattgactcatggtccgtatggaagctgcaagagctccccctggccgtccagaaggagcacgaggcatacctgagtgacgtgattgaacttcaatggcatctggaggataaggccaaccagttacagcatttcgaaaagcagaaaacagagcttgaggaagcaaatgcaaaaatacaggcggacatcgactatatgaacgagcatggacctttgctcgactctaagcagaatcaggaattgcaggatctgaagaaccactataaaaaaaagatggaggtgatggacctgcataggaaggtgaacgaagagttggaagaggcactggaggcctgcgagaacgctcgactgaaggcgcagcagattaaagaggaaatcgacaaggatatttatcaagatgaaaagactatcgaggcctacaagcgagaaatctaccagctgaacagtctgtttgaccactacagtagcagcgtaataaacgtgaacaccaatatagaagagaaggaggaggaggttacagaagcaattcgggagactaagagtagcaaaaatgaactgcacagtcttagcaagatgctggaagatctgagacgagtctacgatcagttaacatggaaacaaaagtctcacgagaatcagtatcttgaagcagtgaacgacttctacgccgccaagaagacctgggacatcgaactgtccgatgtggccaaggacttttccgcgattagtctggcatgtactaagttgaccgaagacaataaaaaacttgagatcgacattaataagatcaccgtgaaaaccaacgaaagcatccgaaagaagagcaaatacgagtccgagattaagtatttgaccataatgaagctgaagaacgacaagcacctcaagaacatttataaggaagcctaccgcattgggacgctcttccatctgaccaaacacaaaaccgacgaaatggaggacaagattgccgaagtcaggcgaaaatttaaaggtcgagaagaatttctcaagaagttgacacagggcgaggtggccgccggaatggtcttgcaaaaaaagctctacagcatctacgaggtccaggccctcgagaggaaggagttaataaaaaaccgcgctatctgcgccatgagtctggccgaattgcaggagcccctgctgcagctcgaagacgaagctgagagaataaggtctctcgataaagaacactctgttatgttgaataacattattgaccagaaggatctgattcggaggaaagtcggtaaagtcaagaaaaagctgcggaagaagggcaagaagaccctcgacgcactgattgagactgagtccaagcgttccgctatcttcaaagacctggaagcaacaaagagcaaaaccatgatattctatgcaaagatcaatgagttgaacgaagagcttaaagcgaaggaggaggagaagaaatctttcgaccagaccctcgagattttgaagaacaaattcattacaatgcggtttaaaagagaacacgcccaaaccgtcttcgatcactatatgcaggaaaagaaggactgtgaagagcgcatatttgaggaggatcagcggttccgagtcctccttgccgtcagacaaaagaccctgcaagatacacaaaagatcatcgcagacagtcttgaggaaaacctgagactcgcgcaagaataccagcagctacagatcacgttcctgaaggagaaggataactatttcaacatctatgacaaacagctgagcttagacacaagtattcgagacaagaagcagctgtgtcagctgcagagacgcatgcatacattatggcaggagcacttcaagctggtcgtactgttctcccagatgcggctggctaatttccagactgattcccaagagagcatccagaaaatccttgccgtccaggaagaatcctctaatctcatgcagcacattctgggattctttcagactctcactgacggtacatgtgagaacgacggctag

SEQ ID NO: 41582 - DNA, 2604 bp, Artificial Sequence
  derived and/or modified sequence
atgaccgaaaataaaaccgtgtcttcatcctcaacccgggacgatcagactaacattggcttaacatgtcaggaggttaaagctcttagagagaaagcctggtcaagaacgaacgaagggaacgctatgagtcagtcgcttgttctatatggtgcatctaaggagaactccgagggctttcacgagtccaaaatgaccaacaccgagggcgtcaacaaaggaatctacttctcatatccttgccgtcgtcatagctgcgctgtggtgaacatccctgccccttgcgttaataagatgatttcacatatccaggacgtagagtctaagatacaggagcacctgaaaaggtttgaaacttcctttgaggaatggagtcggaccagctcaaccaaagatctcaaagaagattggtccgtgactacccctgtgaaggaagtcaagccaggtgaaaagcgggatgaaaaatgtcccgagttaaaacaggagatggagaccctcttgtccgaggccattcgacttatcaaatccctggaaaccgacagagctgatgctgaggaggcacttaaacagcagaggtcccgaaagaacatgattaacatgaagatcgattcctggtccgtgtggaagctgcaagagctacctctcgccgttcaaaaagagcatgaggcgtatcttagtgatgttatcgaactgcagtggcacctcgaagataaggccaatcagttgcaacattttgagaagcagaaaacagaactcgaggaggcaaatgctaagatccaggccgacatcgattacatgaatgagcacgggcctcttctggactccaaacaaaatcaggaacttcaggacctcaaaaaccattataaaaagaaaatggaggtaatggacctccatcggaaggtaaatgaagaactggaggaagctctggaggcatgtgaaaacgcacggctcaaggcgcagcaaattaaagaggaaatagacaaagacatttaccaggacgagaagacgatcgaggcctacaagagggagatttaccagctcaacagtctattcgatcactacagttcatccgtgataaacgttaatacgaacattgaagaaaaagaggaggaagtgacggaggccattcgagagacgaagagtagcaaaaacgaactgcactctctgtctaagatgctggaggacctcaggcgcgtttacgatcagctgacatggaaacaaaaatcacacgaaaatcagtatctggaggccgtgaacgatttttatgcagctaaaaaaacctgggatattgaactttccgacgttgcaaaagacttttccgctattagccttgcctgcactaagctcaccgaggataacaagaagctggagattgatattaataagataacggtgaaaactaacgagtcaatcagaaaaaagagtaagtatgagtcagaaatcaaatacctgacaatcatgaaactgaaaaacgataagcacctcaagaacatatataaggaagcatataggattggcaccttgtttcacctgaccaagcataaaacagatgaaatggaagataagatcgcagaggtacgtaggaagttcaagggacgggaggaattcctaaaaaagctaacacagggagaggttgccgccggcatggtgcttcaaaagaaactgtatagcatttatgaggtccaggccttggaacgcaaggaactgatcaagaatagggccatctgtgcaatgtccctcgctgaattacaggagcctctgctgcagttggaagatgaggcagagcggattcgctcactggacaaagaacactccgttatgctcaacaatattatcgatcagaaagacctcattcgcaggaaggtggggaaggtcaagaagaaactgcgcaagaagggcaaaaagaccctggatgccctgattgaaaccgagagcaagcggagcgctatcttcaaggatcttgaggccacgaaatccaagacaatgatattctatgcaaaaatcaacgaactgaatgaagagctcaaggccaaggaggaagaaaaaaagtctttcgatcagaccctggagattctcaaaaataagtttattactatgaggtttaaaagagaacatgctcagactgtgtttgatcactatatgcaagaaaagaaggattgcgaggaaaggatttttgaagaagaccaaaggttccgcgtgcttctcgctgtgaggcagaaaactctgcaggacacacagaaaattattgctgatagcttagaggagaacttgcgtttggctcaagagtaccagcagctgcaaatcacatttctcaaagaaaaggacaattactttaatatctatgacaaacaactgtccttagatacatcgatcagggataaaaaacagctttgccagctacaaaggcgaatgcacacattatggcaagaacatttcaagctggtggtgttattctcccaaatgaggcttgcaaacttccagactgatagccaggagagcatccagaagattttggccgtgcaagaggaatccagcaatctaatgcagcatatcttgggattcttccaaaccctgacggatgggacttgcgaaaacgacggctag

SEQ ID NO: 41583 - DNA, 2604 bp, Artificial Sequence
  derived and/or modified sequence
atgacagagaacaagacagtgagcagcagcagcaccagagatgaccagaccaacatcggcctgacctgccaggaggtgaaggccctgcgggagaaggcctggagcaggaccaatgaaggaaatgccatgagccagagcctggtgctgtatggagccagcaaagaaaattctgagggcttccacgagagcaagatgaccaacacagagggcgtgaacaagggcatctacttctcctacccctgccgccgccacagctgtgctgtggtgaacatcccagccccctgtgtgaacaagatgatcagccacatccaggatgtggagagcaagatccaggagcacctgaagagatttgagaccagctttgaggagtggagcaggaccagcagcaccaaggacctgaaggaggactggagcgtgaccacccctgtgaaggaggtgaagccaggagagaagagagatgagaagtgcccagagctgaagcaggagatggagaccctgctgtctgaggccatccgcctcatcaagagcctggagacagacagagcagatgctgaggaggccctgaagcagcagaggagcaggaagaacatgatcaacatgaagattgacagctggagcgtgtggaagctgcaggagctgcccctggccgtgcagaaggagcacgaggcctacctgagtgatgtgattgagctgcagtggcacctggaggacaaggccaaccagctgcagcactttgagaagcagaagacagagctggaggaggccaatgccaagatccaggccgacatcgactacatgaatgaacatggccccctgctggacagcaagcagaaccaggagctgcaggacctgaagaaccactacaagaagaagatggaggtgatggacctgcacaggaaggtgaatgaggagctggaggaggccctggaggcctgtgaaaatgcccggctgaaggcccagcagatcaaggaggagattgacaaggacatctaccaggatgagaagaccatcgaggcctacaagcgggagatctaccagctgaacagcctgtttgaccactacagcagcagcgtcatcaacgtgaacaccaacatcgaggagaaggaggaggaggtgacagaggccatccgggagaccaagagcagcaagaatgagctgcacagcctgagcaagatgctggaggacctgcggcgggtgtatgaccagctgacctggaagcagaagagccatgagaaccagtacctggaggccgtgaatgacttctatgctgccaagaagacctgggacatcgagctgagtgatgtggccaaggacttcagcgccatcagcctggcctgcaccaagctgacagaggacaacaagaagctggagattgacatcaacaagatcaccgtgaagaccaatgaaagcatcaggaagaagagcaaatatgaaagtgagatcaagtacctgaccatcatgaagctgaagaatgacaagcacctgaagaacatctacaaggaggcctacagaattggcaccctcttccacctgaccaagcacaagacagatgagatggaggacaagattgctgaggtgcggaggaagttcaagggccgggaggagttcctgaagaagctgacccagggcgaggtggccgccggcatggtgctgcagaagaagctgtacagcatctatgaggtgcaggccctggagaggaaggagctgatcaagaacagagccatctgtgccatgagcctggccgagctgcaggagcccctgctgcagctggaggatgaggccgagcgcatccgcagcctggacaaggagcacagcgtgatgctgaacaacatcatcgaccagaaggacctgatccggaggaaggtgggcaaggtgaagaagaagctgaggaagaagggcaagaagaccctggatgccctgattgaaacagagagcaagaggtctgccatcttcaaggacctggaggccaccaagagcaagaccatgatcttctacgccaagatcaatgagctgaatgaggagctgaaggccaaggaggaggagaagaagagctttgaccagaccctggagatcctgaagaacaagttcatcaccatgaggttcaagcgggagcacgcccagacagtgtttgaccactacatgcaggagaagaaggactgtgaggagcgcatctttgaggaggaccagcgcttccgggtgctgctggccgtgcggcagaagaccctgcaggacacccagaagatcatcgctgacagcctggaggagaacctgcggctggcccaggagtaccagcagctgcagatcaccttcctgaaggagaaggacaactacttcaacatctatgacaagcagctgagcctggacaccagcatccgggacaagaagcagctgtgccagctgcagaggaggatgcacaccctgtggcaggagcacttcaagctggtggtgctcttcagccagatgaggctggccaacttccagacagacagccaggagagcatccagaagatcctggccgtgcaggaggagagcagcaacctgatgcagcacatcctgggcttcttccagaccctgacagatggcacctgtgaaaatgatggatag

SEQ ID NO: 41584 - DNA, 2604 bp, Artificial Sequence
  derived and/or modified sequence
atgaccgagaacaagaccgtgagcagcagcagcacccgggacgaccagaccaacatcggcctcacctgccaggaggtcaaggcactccgcgagaaagcctggtccaggacaaacgaaggcaacgctatgagccagtctctcgtactgtacggggcctcgaaagaaaacagtgaaggtttccacgaaagtaaaatgacgaatacggaaggggtgaacaaagggatttacttcagctatccttgcagaaggcattcctgcgcggtcgtgaacatccctgccccttgcgtcaacaagatgatctcgcacatccaggatgtagagagtaagattcaagagcatttaaagcgtttcgaaacatcatttgaagaatggtcacgtactagtagcaccaaagatcttaaggaagattggagcgttacaacacccgtgaaggaagttaagccaggcgaaaaaagggatgagaaatgtcccgaactgaaacaggagatggagactctgttgagcgaggcgatccggctcatcaaatctctcgagaccgaccgggcggacgctgaagaggcactgaagcagcagcgatctcgtaagaatatgatcaacatgaagattgactcatggagcgtgtggaaacttcaggagctgcctctcgcggtgcagaaggaacatgaagcgtatctttctgacgtgatcgaactgcagtggcacctggaggacaaggcgaaccagctgcagcatttcgagaaacagaagaccgaacttgaagaagcaaatgccaagatccaagcggacatcgattacatgaatgagcacggaccactgctggacagcaagcagaaccaggagctccaggatctcaagaaccactacaagaagaagatggaagtgatggatttacacaggaaagtaaacgaggaattggaggaagccctagaggcatgcgaaaacgctagactcaaggcgcagcaaattaaagaagagatcgataaagacatatatcaggacgagaaaactatagaagcttacaagcgggagatttaccaactaaatagcctcttcgatcactacagctccagtgttattaacgttaataccaacatcgaagagaaggaggaggaagtcaccgaggcgattcgggaaacaaaatcaagtaaaaatgaactgcactccctgtccaagatgctggaggacctacgccgcgtatacgatcagttaacatggaagcagaagtctcacgagaaccagtaccttgaggctgtgaacgacttttacgccgccaaaaaaacttgggacatcgagctgtcggacgtcgccaaggacttcagcgcaatctccctggcatgcaccaagctgaccgaggacaacaagaagttggaaatcgatattaataaaatcaccgtaaagactaatgaatcaatccggaaaaaaagcaaatatgagagtgagatcaagtacctgacgatcatgaagctgaagaatgacaaacacctgaagaacatttataaggaggcataccgaattggtaccctttttcatctgaccaaacacaaaacagacgaaatggaggacaagatagcagaggtgagaagaaagttcaaaggacgggaggagtttcttaagaaactaacacagggagaggtcgctgccggtatggttttacagaagaaactttattctatctacgaagtgcaggcattggagcgaaaggaactgatcaagaacagggctatatgcgccatgtctctggctgagcttcaggaacccttgctgcagctggaagacgaagccgaaaggatccggtccctagataaagagcacagcgtcatgcttaacaatatcatagaccaaaaggatctaattaggagaaaggttggtaaggtcaagaaaaaactcaggaaaaagggaaagaaaacactcgacgcccttatcgaaactgaaagcaaacgctccgcaatatttaaggacctcgaagccaccaaatcaaaaacaatgattttctacgccaaaattaacgaattgaacgaagagctcaaggccaaagaggaggagaaaaaaagcttcgaccagacccttgaaatcctcaagaataaatttataactatgcgctttaagcgggagcacgcgcagactgtgttcgaccactacatgcaagagaaaaaggattgcgaagaaaggattttcgaagaagatcagcgctttagggtgcttctggcagtaaggcagaaaactctgcaggatactcaaaaaatcatcgccgattcactagaagagaacctacgacttgcgcaagagtaccagcaactgcagatcacattcttaaaagaaaaagataattattttaacatctacgacaagcagctgtccctggacaccagcattagggacaaaaagcagttgtgtcagttgcaaagacgcatgcacaccttgtggcaggagcactttaaactcgtagtgctgttctctcagatgcgtctggcaaatttccagaccgacagccaggagtcaattcagaaaattctggcagtccaggaggagagttcgaacctgatgcagcatatattgggcttctttcagacactgacagacgggacttgtgagaacgacggttag

SEQ ID NO: 41585 - DNA, 2604 bp, Artificial Sequence
  derived and/or modified sequence
atgaccgagaacaagaccgtgagcagcagcagcacccgggacgaccagactaacataggactgacatgtcaggaagtaaaggccttacgggagaaggcttggagcagaactaatgaggggaacgccatgagccagagcctcgtattgtatggggctagcaaagagaatagcgaagggtttcacgagagcaagatgactaatactgagggggtgaataagggtatctattttagttatccatgtcgacgtcacagctgtgcagttgtgaatatcccggcaccttgtgttaacaaaatgatctcacatatacaggacgtggagagcaaaatccaggagcaccttaagcgcttcgagacatccttcgaggaatggagccgcacgtcatcgacaaaagatttgaaggaggactggtccgtgacgacacccgtgaaggaggttaaacctggggagaaaagagatgagaagtgtcccgagctgaagcaagagatggaaacactgctgtccgaggccattagactcattaagagcctggagacggatagagccgatgcagaggaagcgctgaagcagcagcgctcccggaaaaacatgatcaatatgaaaatagacagctggtcagtttggaagctccaggaattaccactggctgtgcagaaggagcatgaggcgtacctgtcggatgttattgagctccagtggcacctggaagacaaggccaatcaactgcaacattttgagaagcaaaaaacagaactggaagaagctaacgccaagatccaggccgacattgattatatgaacgagcacggcccactcctggactcgaagcagaaccaggagctccaagatctgaagaaccattataagaagaaaatggaagtgatggacttgcatagaaaagttaatgaggaactggaggaggcactcgaggcatgcgaaaatgctcgacttaaggcccagcagattaaggaggaaattgataaagacatctaccaggacgagaaaaccattgaagcttataaaagggaaatttaccaattaaattccctctttgaccactattcttcgagcgtgataaatgtaaataccaacatcgaagaaaaagaagaagaagtgacagaggccatccgggaaactaaatcctcaaagaacgagctgcattccttgagtaagatgctagaggacctgcgtagagtgtacgaccaactcacatggaaacaaaagtcccacgagaatcagtacctcgaggcagtaaacgatttctatgcggccaagaagacctgggatattgaactgagcgacgtggccaaggactttagtgctatctcacttgcctgcacaaagctgaccgaggacaacaagaagctcgagatagacatcaataaaataacggtgaaaactaatgagtctatcaggaaaaagtccaagtacgagtccgagatcaagtatctcacaattatgaaattaaagaacgacaaacatctcaaaaacatctataaagaggcctaccgaatcgggactctcttccatttaaccaagcataagacggatgaaatggaagataaaattgctgaggtgcggaggaagttcaagggccgagaagagttcttaaagaaactgactcagggggaagtcgctgcgggcatggtgctgcaaaaaaagctgtattcaatctacgaagtacaagctttagagcgtaaagagctcatcaagaacagagctatatgcgcaatgagtctagcagagctgcaggaacccctgctgcagctagaagatgaggcggaacgaatcaggagtctagataaagagcactctgtcatgctgaataatatcatcgatcagaaagatctcatcaggaggaaggttggcaaagtgaaaaaaaagctccgtaaaaagggaaaaaaaactctggatgcattaattgagaccgagagcaagcggtccgccattttcaaggacctggaagctacaaagtcaaaaaccatgattttctacgccaagattaacgaattgaacgaagagctgaaggccaaggaagaggaaaaaaagtccttcgatcagactctggaaatactcaagaacaagtttattactatgaggtttaaaagagaacatgcgcaaactgttttcgatcattacatgcaggagaagaaggactgtgaagaacgcatcttcgaggaagatcaaagattccgagtcctgctggcagtgagacagaagacactacaagatacccagaagattatcgccgattctctcgaagagaacctgaggttggcccaggaatatcaacagctgcagatcacgttcctcaaagaaaaagataactacttcaacatctacgacaaacagctctccctggacacctctatacgcgacaagaagcagctgtgccagttgcagaggaggatgcacaccttgtggcaagaacacttcaaattggtggtgctgttctctcaaatgcggctggccaattttcagacagatagccaggaatccattcaaaagatcctggccgtacaagaagaaagctcaaatttgatgcagcatatcctgggttttttccagaccctgacagacggcacgtgcgaaaacgatggctag

SEQ ID NO: 41586 - DNA, 2604 bp, Artificial Sequence
  derived and/or modified sequence
atgactgagaataaaaccgtgtcttcatcatccacacgcgacgatcagactaatataggtttgacctgtcaggaggtgaaagccctgagggagaaagcctggtctcggacaaatgagggtaacgccatgagccagagcctcgtcctgtacggtgcgtcaaaagagaattctgaagggttccatgagagcaagatgacaaatacagaaggggtgaacaaggggatctattttagttatccatgccgaagacatagttgcgcagtggttaacatcccagccccatgcgtgaataaaatgatttcccatatacaagacgtggagtccaagatccaggaacaccttaaaagatttgagactagctttgaggaatggtccagaacatcaagcacaaaggacctgaaggaagactggtctgtgaccactcctgtgaaggaggtcaaaccaggcgagaagcgggatgaaaaatgcccagagctgaagcaggaaatggagacactcctgtctgaggcaattagactcattaagtctctggaaactgatagagctgacgccgaagaggcattgaagcagcagaggagtagaaagaacatgataaacatgaaaatcgattcctggtccgtgtggaagctccaggaactgccgcttgccgtgcaaaaagagcacgaagcttacttgtccgatgtgattgaactgcagtggcacctcgaagacaaggctaatcagctccagcactttgaaaagcaaaaaaccgaactcgaggaggccaacgcaaaaattcaggcagacatagattacatgaatgagcacgggcctctgctcgattccaagcagaaccaggagctgcaggatctgaagaaccattacaagaagaaaatggaggtgatggacttacaccggaaggtgaatgaggagctggaagaggctctggaggcctgtgaaaacgcccgactcaaggctcagcaaataaaagaagagattgacaaggacatataccaggacgagaagacgatcgaggcatacaagcgagaaatttaccagctcaattccctgttcgatcattacagtagctctgtgattaacgtgaataccaatatcgaggaaaaggaagaggaggtgacagaggcgatacgagagacgaaatccagtaaaaacgagctgcactctctctctaagatgctggaagatttacggagagtttacgaccagttgacctggaagcagaagtcacacgagaaccagtatctcgaggctgtgaacgacttttacgcagcaaagaaaacgtgggacattgagctcagcgatgtcgccaaagactttagcgcaatctccctggcttgtacaaagctaacggaagacaacaaaaagttagaaatagatattaacaagatcacagtgaagactaacgagagtatccgtaaaaaaagtaagtacgaatccgagattaaatacttgaccatcatgaagctgaaaaatgacaaacacctgaagaatatttacaaggaggcctatcgaataggaacgctcttccaccttacaaagcacaaaaccgacgagatggaggataagattgccgaggtgcgcagaaaatttaaaggcagagaggaattcctgaaaaaactgactcagggggaggtggccgcaggaatggtgcttcaaaaaaaactctactccatctatgaagttcaggccctcgagcgtaaagagctgataaagaaccgggcaatctgcgctatgtcgcttgctgagctgcaggaacctctcttacagctggaagacgaggcggaaaggattagatcactggacaaggagcacagcgtcatgcttaataatatcattgaccaaaaggacttgatacgtcgaaaggtggggaaagtgaaaaaaaagttgcgaaaaaagggcaaaaaaacactggatgcactaatcgaaacagagtcaaaaaggtctgccatctttaaagacttggaagctaccaaatctaaaacaatgatcttctacgctaagataaacgagttgaatgaagagctgaaggccaaagaggaggaaaaaaagtccttcgatcagacactcgaaattctgaaaaataagttcatcactatgaggtttaaacgagagcatgctcagacggtatttgatcactacatgcaagaaaagaaggattgcgaagagagaatttttgaagaggaccagagatttagggtcctgctggccgtccgacagaagaccctgcaagatactcagaagatcatcgcggacagtctggaggagaatctccgtcttgctcaggagtatcagcaactccaaatcacatttctgaaggagaaggataattatttcaacatctacgataagcaactgagtctggatacgagtatccgagacaaaaagcagctttgccagttacagcggaggatgcacaccttgtggcaggagcacttcaagttggttgtgctgtttagtcagatgagactagctaactttcaaaccgactctcaagagagtattcaaaagatactcgcggtgcaggaggagagttcaaatttgatgcaacacatcttggggtttttccagaccctgaccgacggcacatgtgagaacgacgggtag

SEQ ID NO: 41587 - DNA, 2604 bp, Artificial Sequence
  derived and/or modified sequence
atgaccgaaaacaagacagtgtctagttcaagcaccagggacgatcagacaaacattggcctcacctgtcaagaggtgaaagcactgagagaaaaggcgtggagcagaaccaacgagggcaacgctatgagtcagtccctcgtgctctatggcgcatcaaaggaaaattctgagggctttcatgagtcgaagatgaccaatacagagggcgtaaacaaggggatctacttttcttacccctgcaggaggcatagctgtgccgtggtcaacattccagcgccttgtgtgaacaagatgatcagtcacatccaagatgtcgagagtaaaatccaagagcatctgaaacgatttgaaacctcttttgaagagtggagtagaacaagcagcactaaagatcttaaggaggattggagtgttaccactcccgttaaggaagttaaacccggagaaaaacgagacgagaaatgccctgaactgaagcaggaaatggaaacactgctgtcggaggcaatccggttaatcaagagtctagagacagatcgagccgatgctgaggaggccctgaaacagcagagaagccggaaaaatatgattaacatgaagatagattcatggtctgtttggaagctccaagagctgcctctagctgtccagaaagaacacgaagcgtatctgtccgacgtgattgaacttcagtggcatctcgaggacaaggctaaccagctgcagcattttgagaagcagaagacggagttggaggaagctaatgcaaaaattcaggctgatatcgactacatgaatgaacatggcccacttctcgactccaaacagaaccaggagctgcaggacttgaagaatcactacaaaaagaagatggaggttatggaccttcataggaaagtgaacgaagaattggaggaggcactcgaggcatgtgagaacgccaggctgaaggctcagcagataaaagaagagatcgacaaagacatctaccaggatgagaagaccattgaagcctacaaaagagaaatttatcagctgaactctctttttgatcattattcttcaagcgtgataaacgtgaacactaacatcgaggagaaagaggaggaggtcacagaggctatcagggagacaaagtcctccaagaatgaattgcattccttgtcgaagatgctggaggatctgcgaagagtttatgatcaactgacctggaagcagaagtctcatgagaatcaatacttggaggcagttaatgacttttatgcagccaagaagacctgggatatagaattatctgatgttgctaaagacttctccgccatatcacttgcgtgtaccaagttgactgaagataacaaaaagctggagatcgacattaataagataactgtaaagaccaacgagtctattcgaaaaaagtcaaaatacgagtctgaaatcaagtatctgaccataatgaagctcaagaatgacaagcatttgaaaaacatctataaggaggcttaccgaatcggaaccctgttccacctgacgaagcacaagactgatgagatggaggacaaaatagctgaagtgagacgtaagttcaaaggaagagaggaattcctgaagaagctaacgcagggggaggtcgcagctgggatggtgttacagaaaaaactgtattctatctatgaggtccaggcactggagcgcaaagaactgattaaaaatcgcgctatctgtgccatgtcccttgctgaactgcaggaacctctgttacaactggaagatgaggctgagagaatccggtcactcgataaagagcattccgtaatgttgaacaacattattgaccaaaaagatctgattcggagaaaggttgggaaggtgaaaaaaaagctgaggaagaaagggaagaagaccctggatgccctaatagagacagagtccaagcggagcgcaatttttaaggacctagaagcaactaaatcaaagacgatgatcttttatgcaaaaatcaatgaacttaatgaagaactcaaggccaaggaagaagagaagaagagcttcgatcagacactggagatcttaaagaacaagtttattaccatgaggttcaagagggaacatgcacagacggtgttcgaccactacatgcaggagaagaaggactgcgaggagagaatttttgaagaggatcagcgctttcgcgtgctactggccgtccgccagaagaccttgcaggacacccaaaagataatcgcagacagcctggaagagaacctcagattggcacaggagtaccagcaactgcaaatcacctttctcaaagagaaggataactactttaatatctatgataagcagctgtctcttgatacaagtataagggacaaaaaacagctctgccagcttcagcgacgaatgcatactttgtggcaagagcatttcaagctcgtagtgcttttctctcagatgcggctggcaaatttccaaaccgactcacaggagtcaatccagaaaattctcgccgttcaggaagagagctcgaatttgatgcagcacatcctcgggttttttcagactcttaccgatggcacatgcgaaaatgatggatag

SEQ ID NO: 41588 - protein, 1149 aa, Artificial Sequence
  derived and/or modified sequence
MPTMRRTVSEIRSRAEGYEKTDDVSEKTSLADQEEVRTIFINQPQLTKFCNNHVSTAKYNIITFLPRFLYSQFRRAANSFFLFIALLQQIPDVSPTGRYTTLVPLLFILAVAAIKEIIEDIKRHKADNAVNKKQTQVLRNGAWEIVHWEKVNVGDIVIIKGKEYIPADTVLLSSSEPQAMCYIETSNLDGETNLKIRQGLPATSDIKDVDSLMRISGRIECESPNRHLYDFVGNIRLDGHGTVPLGADQILLRGAQLRNTQWVHGIVVYTGHDTKLMQNSTSPPLKLSNVERITNVQILILFCILIAMSLVCSVGSAIWNRRHSGKDWYLNLNYGGASNFGLNFLTFIILFNNLIPISLLVTLEVVKFTQAYFINWDLDMHYEPTDTAAMARTSNLNEELGQVKYIFSDKTGTLTCNVMQFKKCTIAGVAYGQNSQFGDEKTFSDSSLLENLQNNHPTAPIICEFLTMMAVCHTAVPEREGDKIIYQAASPDEGALVRAAKQLNFVFTGRTPDSVIIDSLGQEERYELLNVLEFTSARKRMSVIVRTPSGKLRLYCKGADTVIYDRLAETSKYKEITLKHLEQFATEGLRTLCFAVAEISESDFQEWRAVYQRASTSVQNRLLKLEESYELIEKNLQLLGATAIEDKLQDQVPETIETLMKADIKIWILTGDKQETAINIGHSCKLLKKNMGMIVINEGSLDGTRETLSRHCTTLGDALRKENDFALIIDGKTLKYALTFGVRQYFLDLALSCKAVICCRVSPLQKSEVVEMVKKQVKVVTLAIGDGANDVSMIQTAHVGVGISGNEGLQAANSSDYSIAQFKYLKNLLMIHGAWNYNRVSKCILYCFYKNIVLYIIEIWFAFVNGFSGQILFERWCIGLYNVMFTAMPPLTLGIFERSCRKENMLKYPELYKTSQNALDFNTKVFWVHCLNGLFHSVILFWFPLKALQYGTAFGNGKTSDYLLLGNFVYTFVVITVCLKAGLETSYWTWFSHIAIWGSIALWVVFFGIYSSLWPAIPMAPDMSGEAAMLFSSGVFWMGLLFIPVASLLLDVVYKVIKRTAFKTLVDEVQELEAKSQDPGAVVLGKSLTERAQLLKNVFKKNHVNLYRSESLQQNLLHGYAFSQDENGIVSQSEVIRAYDTTKQRPDEW

SEQ ID NO: 41589 - DNA, 3450 bp, Artificial Sequence
  derived and/or modified sequence
atgcccaccatgagaagaaccgtgagcgagatcagaagcagagccgagggctacgagaagaccgacgacgtgagcgagaagaccagcctggccgaccaggaggaggtgagaaccatcttcatcaaccagccccagctgaccaagttctgcaacaaccacgtgagcaccgccaagtacaacatcatcaccttcctgcccagattcctgtacagccagttcagaagagccgccaacagcttcttcctgttcatcgccctgctgcagcagatccccgacgtgagccccaccggcagatacaccaccctggtgcccctgctgttcatcctggccgtggccgccatcaaggagatcatcgaggacatcaagagacacaaggccgacaacgccgtgaacaagaagcagacccaggtgctgagaaacggcgcctgggagatcgtgcactgggagaaggtgaacgtgggcgacatcgtgatcatcaagggcaaggagtacatccccgccgacaccgtgctgctgagcagcagcgagccccaggccatgtgctacatcgagaccagcaacctggacggcgagaccaacctgaagatcagacagggcctgcccgccaccagcgacatcaaggacgtggacagcctgatgagaatcagcggcagaatcgagtgcgagagccccaacagacacctgtacgacttcgtgggcaacatcagactggacggccacggcaccgtgcccctgggcgccgaccagatcctgctgagaggcgcccagctgagaaacacccagtgggtgcacggcatcgtggtgtacaccggccacgacaccaagctgatgcagaacagcaccagcccccccctgaagctgagcaacgtggagagaatcaccaacgtgcagatcctgatcctgttctgcatcctgatcgccatgagcctggtgtgcagcgtgggcagcgccatctggaacagaagacacagcggcaaggactggtacctgaacctgaactacggcggcgccagcaacttcggcctgaacttcctgaccttcatcatcctgttcaacaacctgatccccatcagcctgctggtgaccctggaggtggtgaagttcacccaggcctacttcatcaactgggacctggacatgcactacgagcccaccgacaccgccgccatggccagaaccagcaacctgaacgaggagctgggccaggtgaagtacatcttcagcgacaagaccggcaccctgacctgcaacgtgatgcagttcaagaagtgcaccatcgccggcgtggcctacggccagaacagccagttcggcgacgagaagaccttcagcgacagcagcctgctggagaacctgcagaacaaccaccccaccgcccccatcatctgcgagttcctgaccatgatggccgtgtgccacaccgccgtgcccgagagagagggcgacaagatcatctaccaggccgccagccccgacgagggcgccctggtgagagccgccaagcagctgaacttcgtgttcaccggcagaacccccgacagcgtgatcatcgacagcctgggccaggaggagagatacgagctgctgaacgtgctggagttcaccagcgccagaaagagaatgagcgtgatcgtgagaacccccagcggcaagctgagactgtactgcaagggcgccgacaccgtgatctacgacagactggccgagaccagcaagtacaaggagatcaccctgaagcacctggagcagttcgccaccgagggcctgagaaccctgtgcttcgccgtggccgagatcagcgagagcgacttccaggagtggagagccgtgtaccagagagccagcaccagcgtgcagaacagactgctgaagctggaggagagctacgagctgatcgagaagaacctgcagctgctgggcgccaccgccatcgaggacaagctgcaggaccaggtgcccgagaccatcgagaccctgatgaaggccgacatcaagatctggatcctgaccggcgacaagcaggagaccgccatcaacatcggccacagctgcaagctgctgaagaagaacatgggcatgatcgtgatcaacgagggcagcctggacggcaccagagagaccctgagcagacactgcaccaccctgggcgacgccctgagaaaggagaacgacttcgccctgatcatcgacggcaagaccctgaagtacgccctgaccttcggcgtgagacagtacttcctggacctggccctgagctgcaaggccgtgatctgctgcagagtgagccccctgcagaagagcgaggtggtggagatggtgaagaagcaggtgaaggtggtgaccctggccatcggcgacggcgccaacgacgtgagcatgatccagaccgcccacgtgggcgtgggcatcagcggcaacgagggcctgcaggccgccaacagcagcgactacagcatcgcccagttcaagtacctgaagaacctgctgatgatccacggcgcctggaactacaacagagtgagcaagtgcatcctgtactgcttctacaagaacatcgtgctgtacatcatcgagatctggttcgccttcgtgaacggcttcagcggccagatcctgttcgagagatggtgcatcggcctgtacaacgtgatgttcaccgccatgccccccctgaccctgggcatcttcgagagaagctgcagaaaggagaacatgctgaagtaccccgagctgtacaagaccagccagaacgccctggacttcaacaccaaggtgttctgggtgcactgcctgaacggcctgttccacagcgtgatcctgttctggttccccctgaaggccctgcagtacggcaccgccttcggcaacggcaagaccagcgactacctgctgctgggcaacttcgtgtacaccttcgtggtgatcaccgtgtgcctgaaggccggcctggagaccagctactggacctggttcagccacatcgccatctggggcagcatcgccctgtgggtggtgttcttcggcatctacagcagcctgtggcccgccatccccatggcccccgacatgagcggcgaggccgccatgctgttcagcagcggcgtgttctggatgggcctgctgttcatccccgtggccagcctgctgctggacgtggtgtacaaggtgatcaagagaaccgccttcaagaccctggtggacgaggtgcaggagctggaggccaagagccaggaccccggcgccgtggtgctgggcaagagcctgaccgagagagcccagctgctgaagaacgtgttcaagaagaaccacgtgaacctgtacagaagcgagagcctgcagcagaacctgctgcacggctacgccttcagccaggacgagaacggcatcgtgagccagagcgaggtgatcagagcctacgacaccaccaagcagagacccgacgagtggtag

SEQ ID NO: 41590 - DNA, 3450 bp, Artificial Sequence
  derived and/or modified sequence
atgccgacaatgaggcgcactgtttctgagatccgctccagagccgaaggttacgaaaaaactgacgacgttagcgaaaaaacctccctcgcggaccaggaagaagtccgtaccatcttcatcaatcagccccaactgactaaattctgcaataaccacgtatccaccgcaaagtacaacatcataacttttttgcccagatttctctatagtcagttcagacgagccgccaatagtttctttctttttatcgcgctgttgcagcagatccccgatgtgtcgcccacaggtcgatatactaccttggtgccgctcctgtttatcctcgcggtggctgccattaaggaaatcatcgaagatataaaaaggcacaaggcagataatgcggttaacaagaagcagactcaagtgctgaggaatggcgcatgggagattgtgcactgggagaaggttaacgtaggggacatcgtcattatcaaaggcaaagagtacataccagccgatacggtacttttgagctcaagtgagccacaagccatgtgctacattgagacctctaacctcgatggcgaaacaaatctcaaaattagacaggggctgccagccacctcagatatcaaggatgtggacagcctgatgaggatttccggccgaattgagtgtgagtcacccaatcgccatctgtacgattttgtgggtaacattagactggacggacatggcacagtgcccctgggcgctgatcagatcttgcttagaggcgcccaactgcgtaacactcagtgggtgcatgggatcgtggtgtacaccggccacgacactaagctcatgcagaacagcacctccccccccttgaaactatctaatgtagagcggattaccaacgtgcagatcctcatcctcttctgcatactgattgctatgtcattagtctgctcagttggttcagccatctggaaccgacgccactcaggcaaagattggtacctcaacttgaactacggcggtgctagcaactttggccttaatttcttgacattcataattctgttcaacaatctgattcccatctcattactggtcactttagaggttgtaaaattcacacaggcctactttattaactgggatctggatatgcactatgagcctactgacactgccgctatggccagaaccagcaacttgaacgaggaactagggcaggtgaaatacatcttctcagataaaacaggcaccctgacatgtaacgtaatgcagtttaagaagtgcaccatcgccggtgtggcctacggccagaatagccaattcggcgatgaaaaaaccttctccgacagtagtctgctcgagaacctgcaaaacaaccacccaaccgctcctatcatttgtgaattccttactatgatggctgtgtgccacactgctgttccagagcgtgagggtgacaaaatcatctaccaggctgcgagccccgacgagggcgctctggtgagggctgcaaagcaactaaatttcgtattcacggggaggacgcccgattccgtcattatcgacagcctgggtcaggaggaacgatacgagctacttaatgtgttagagtttactagtgcaaggaaaagaatgtcagtgattgtgcgaaccccctccggaaagctcaggctctattgcaagggggctgacacagtgatctacgataggctcgcggaaacttccaaatacaaagaaatcactttaaagcacctcgaacagttcgccacagagggattgcgaactctgtgctttgctgtggccgagattagcgagagcgacttccaagagtggagagctgtttaccagcgagcctcaacctccgtgcaaaataggctgctgaagctcgaagaaagttatgaattgatcgagaaaaacctgcagcttctgggggcaacagcaatcgaagacaaactacaggaccaggttcccgaaaccattgagactctgatgaaggcagatatcaagatctggattctgacaggcgacaaacaggagaccgcgatcaacattggccacagctgcaaattgctcaaaaagaacatgggtatgatcgtgattaatgaaggctcgctcgatggaaccagggaaacactttcacgacactgcacaactctaggtgacgccttgaggaaagagaacgatttcgcacttatcatagatggtaaaaccttaaaatacgcactcacgtttggcgtgcggcaatactttttggacctggcgttgtcatgcaaggccgtcatctgctgtcgagtctctccgctacagaagtcagaagtggtcgaaatggtaaaaaaacaggtgaaagtcgtaacattggctatcggagatggggcgaacgatgtctctatgattcagacggcccacgtgggagtcggcatttccggtaacgaagggttgcaggctgctaactcgagcgattattctattgcccagttcaagtatctgaagaatctgttgatgatccatggtgcatggaattacaatcgagtttcaaagtgcatcctttactgcttctataagaatatcgtgttatacataatcgagatctggttcgcgttcgtgaatgggttctctggccaaatcctatttgagcggtggtgtattggcttgtacaatgttatgttcacagccatgcccccgctcacactgggaatttttgaaaggagctgtagaaaagagaacatgctgaagtaccctgagctgtacaaaacttcccaaaatgccctggatttcaatactaaggtgttctgggtacactgcttgaatggactgtttcacagcgtcattctgttttggtttccgctcaaggctctccagtatggcacggccttcggcaacggtaagacttcagattatttactcctgggtaattttgtatatacgtttgtggtaatcactgtgtgtctcaaagccggtctggagacctcatactggacctggttctcccacatcgccatatggggctccatagcgctgtgggtagtgttctttggtatttattcatcattgtggcctgcaattcctatggccccggacatgagcggagaggcagccatgcttttcagttccggagtattctggatgggtcttttgttcatccctgtggcctccctgctgttggacgttgtttacaaggtgatcaagcggacagcctttaaaacattagttgacgaggtccaagaactggaggccaagtctcaggatcccggggctgtcgtactcggcaagagcctcaccgaacgtgcccagctgctcaagaatgtattcaaaaaaaaccatgtgaacctgtacagatcagaaagtctgcagcaaaatttattgcatgggtacgccttctcacaggacgaaaacggaatcgtgagccagagtgaggtcattagagcatatgacaccacgaaacagcgcccagatgagtggtag

SEQ ID NO: 41591 - DNA, 3450 bp, Artificial Sequence
  derived and/or modified sequence
atgcccaccatgagaagaacagtgtctgagatccgcagcagagctgagggctatgagaagacagatgatgtgtctgagaagaccagcctggccgaccaggaggaggtgaggaccatcttcatcaaccagccccagctgaccaagttctgcaacaaccacgtgtccacagccaagtacaacatcatcaccttcctgccccgcttcctgtacagccagttccggcgggccgccaacagcttcttcctgttcatcgccctgctgcagcagatcccagatgtgagccccaccggccgctacaccaccctggtgcccctgctcttcatcctggccgtggccgccatcaaggagatcatcgaggacatcaagaggcacaaggctgacaatgctgtgaacaagaagcagacccaggtgctgagaaatggagcctgggagatcgtgcactgggagaaggtgaatgtgggggacatcgtcatcatcaagggcaaggagtacatcccagctgacacagtgctgctgagcagcagcgagccccaggccatgtgctacatcgagaccagcaacctggatggagagaccaacctgaagatccggcagggcctgcctgccaccagtgacatcaaggatgtggacagcctgatgaggatcagcggcagaattgaatgtgagagccccaacagacacctgtatgactttgtgggcaacatccggctggatggccacggcaccgtgcccctgggcgctgaccagatcctgctgcggggggcccagctgaggaacacccagtgggtgcacggcatcgtggtgtacacaggccatgacaccaagctgatgcagaacagcaccagcccccccctgaagctgagcaatgtggagcgcatcaccaacgtgcagatcctgatcctcttctgcatcctgattgccatgagcctggtgtgcagcgtgggcagcgccatctggaacagaagacacagcggcaaggactggtacctgaacctgaactacggcggggccagcaactttggcctgaacttcctgaccttcatcatcctcttcaacaacctgatccccatcagcctgctggtgaccctggaggtggtgaagttcacccaggcctacttcatcaactgggacctggacatgcactatgagcccacagacacagctgccatggcccggaccagcaacctgaatgaggagctgggccaggtgaagtacatcttcagtgacaagacaggcaccctgacctgcaatgtgatgcagttcaagaagtgcaccatcgccggcgtggcctacggccagaacagccagtttggagatgagaagaccttcagtgacagcagcctgctggagaacctgcagaacaaccaccccacagcccccatcatctgtgagttcctgaccatgatggctgtgtgccacacagctgtgcctgagcgggagggggacaagatcatctaccaggccgccagcccagatgagggcgccctggtgcgggccgccaagcagctgaactttgtgttcaccggccgcaccccagacagcgtcatcatcgacagcctgggccaggaggagagatatgagctgctgaatgtgctggagttcaccagcgccaggaagaggatgtctgtcatcgtgaggaccccatctgggaagctgcggctgtactgcaagggagctgacaccgtcatctatgaccggctggccgagaccagcaagtacaaggagatcaccctgaagcacctggagcagtttgccacagagggcctgcggaccctgtgctttgctgtggccgagatcagcgagagtgacttccaggagtggagggctgtgtaccagagggccagcacctctgtgcagaaccggctgctgaagctggaggagagctatgagctgattgagaagaacctgcagctgctgggcgccacagccatcgaggacaagctgcaggaccaggtgcctgagaccatcgagaccctgatgaaggctgacatcaagatctggatcctgaccggggacaagcaggagacagccatcaacatcggccacagctgcaagctgctgaagaagaacatgggcatgatcgtcatcaatgaaggcagcctggatggcacccgggagaccctgagccgccactgcaccaccctgggagatgccctgaggaaagaaaatgactttgccctgatcattgatggcaagaccctgaagtatgccctgaccttcggcgtgcggcagtacttcctggacctggccctgagctgcaaggctgtgatctgctgccgggtgagccccctgcagaagtctgaggtggtggagatggtgaagaagcaggtgaaggtggtgaccctggccatcggagatggagccaatgatgtgtccatgatccagacagcccacgtgggcgtgggcatctctggaaatgaaggcctgcaggccgccaacagcagtgactacagcatcgcccagttcaagtacctgaagaacctgctgatgatccacggggcctggaactacaacagagtgtccaagtgcatcctgtactgcttctacaagaacatcgtgctgtacatcatcgagatctggtttgcctttgtgaatggcttcagcggccagatcctgtttgagcgctggtgcatcggcctgtacaacgtgatgttcaccgccatgccacccctgaccctgggcatctttgagaggagctgcaggaaagaaaacatgctgaagtacccagagctgtacaagaccagccagaatgccctggacttcaacaccaaggtgttctgggtgcactgcctgaatggcctcttccacagcgtcatcctcttctggttccccctgaaggccctgcagtatggaacagcctttggaaatggcaagaccagtgactacctgctgctgggcaactttgtgtacacctttgtggtgatcaccgtgtgcctgaaggccggcctggagaccagctactggacctggttcagccacatcgccatctggggcagcatcgccctgtgggtggtgttcttcggcatctacagcagcctgtggccagccatccccatggccccagacatgtctggagaggccgccatgctgttcagcagtggagtcttctggatgggcctgctcttcatccctgtggccagcctgctgctggatgtggtgtacaaggtgatcaagaggacagccttcaagaccctggtggatgaggtgcaggagctggaggccaagagccaggaccctggagctgtggtgctgggcaagagcctgacagagcgggcccagctgctgaagaatgtgttcaagaagaaccacgtgaacctgtacagaagtgagagcctgcagcagaacctgctgcacggctacgccttcagccaggatgaaaatggaattgtgtcccagagcgaggtgatccgggcctatgacaccaccaagcagaggccagatgagtggtag

SEQ ID NO: 41592 - DNA, 3450 bp, Artificial Sequence
  derived and/or modified sequence
atgcccaccatgcggcggaccgtgagcgagatccggagccgggccgagggctacgaaaagacagacgacgtttccgaaaagacctcactcgctgaccaggaggaggtcagaaccatcttcataaatcaaccacaacttactaagttttgtaataatcacgtctcgaccgcgaaatataatatcatcacattcctgccccgctttttgtacagccagtttcgtagagccgcaaacagcttcttcctgtttattgccttactgcaacagattccagatgtctctcccacagggcgctacacaaccctcgtgccactccttttcatccttgccgttgcagcaatcaaagagattattgaagacatcaaacggcacaaggcagacaacgccgtgaacaaaaaacagacacaggtgctgagaaatggagcgtgggaaattgtgcattgggaaaaagttaacgtgggggatatcgtcattattaaggggaaagaatatatccctgctgataccgtgctcctctccagctcggagcctcaagcaatgtgttatatcgagacctcaaacctcgatggcgaaacaaacctcaagattagacaggggttgcccgccacctctgacattaaagatgttgattccttgatgagaataagcggccgtattgagtgtgagtctcccaaccgccacctgtatgacttcgtgggtaatatccgcctggacggtcacgggactgtccccctgggagctgaccagatccttctgcgtggggcccagttgcggaatacccagtgggtgcacggaatcgtggtgtacacagggcatgacaccaagctaatgcagaattcaacgtctccgcctctgaagttaagcaacgtcgagaggataaccaatgtgcagatcctgatcctgttttgcatcctcattgctatgagcctagtgtgctctgtgggctctgcaatttggaatagacgccatagcggaaaggattggtacctgaacctgaattatggaggcgcaagtaatttcgggttaaattttctgacattcattatcttgttcaacaacctgatccccataagcttacttgtgactctggaggtggttaaattcacccaggcatactttatcaattgggatctggacatgcactatgagccaacagatactgccgccatggctcggacttcaaacttgaatgaggagctcggccaggtgaagtacatcttctctgataagaccggaaccctcacgtgcaatgtgatgcaatttaaaaagtgtacgatagccggagttgcctacgggcagaacagtcaattcggagacgagaaaacctttagtgatagctctttactggagaacttacagaacaatcatcctacagcacccatcatttgtgaatttttaacaatgatggcagtttgccatactgctgtgcctgagagggaaggggacaagatcatataccaagccgctagtccagacgaaggcgcccttgtccgtgctgcaaaacagctcaactttgtgttcactgggcgaacgccagactccgtcattattgacagcttgggacaggaagaacgctatgagctgttgaacgtgctggaatttaccagtgcccggaagcgcatgtcggtgatcgtgcgcaccccctccggaaagttgcggttgtactgtaaaggggctgatactgttatctacgatcgcctggctgagacatccaaatacaaggagatcacactgaagcatctggaacaatttgccacagagggcttacgcacactctgcttcgccgtggcagaaatcagtgaatctgactttcaggagtggcgcgcagtctatcagcgagctagcacatcagtgcagaatcgcctgctcaagctcgaagagtcctatgagcttatcgagaaaaacctccagctactgggtgccacagccatagaagataaacttcaggatcaggttccagaaacgattgagacgctcatgaaagcagatatcaagatctggatcctgaccggggacaaacaggaaaccgccattaatataggtcatagctgcaaactcttaaagaaaaatatgggcatgatcgtgatcaacgagggatccttagacggcactcgggagaccctgtctcgccattgcacaacgctaggggatgccttgcggaaagagaatgatttcgctctgatcatcgacggcaagacactcaagtacgctctgaccttcggagtccggcagtattttttagacctggcactgagctgcaaggcagtgatctgctgcagagtgtcacccctgcagaagtccgaggtggtggagatggttaagaaacaagtcaaggtggtcacattggcgatcggggatggggcaaacgacgtatctatgatccagaccgctcacgtgggcgtcgggatttctggcaatgagggcttacaagcagctaactcttccgattatagtattgcacagttcaaatatctaaagaacctgcttatgattcatggagcttggaattacaaccgggtctccaaatgcatcctgtattgcttttacaagaacatagtcttatatatcattgaaatttggtttgcattcgtcaacgggttctccggacagatcctattcgagcggtggtgcataggtctgtacaacgtgatgttcactgctatgcccccacttacactgggtatctttgagagatcttgtcggaaggaaaatatgctgaagtaccctgagctgtataaaacctcgcaaaatgcattggactttaacactaaagtcttctgggtgcattgtctgaacgggcttttccattccgtgatcctgttttggtttcctctgaaggctctccagtatggcaccgctttcggcaatggcaagacatccgactacctactcctgggtaattttgtttatacctttgtagtaattacagtgtgcctgaaagccggattagagaccagttactggacttggttttctcatatcgctatctgggggagcattgctctttgggtggtgttttttggcatatatagctccttgtggcccgccataccgatggccccagacatgagtggagaggccgccatgctctttagttctggagtgttttggatggggcttcttttcatccccgtggcgtccctgctcttggacgtcgtttataaagtgattaagaggacagcgttcaagacactggttgatgaggttcaggaactggaggccaagtcccaggacccaggggcggtagtgctgggcaaaagccttaccgagcgggcccaactcttgaaaaatgtttttaaaaagaaccatgtgaacctgtacagaagtgagtctctgcagcagaacctgctacacggctatgcttttagtcaggatgagaacggaattgtgtcccagagtgaggttatcagggcctatgatacaaccaaacagcggccggatgaatggtag

SEQ ID NO: 41593 - DNA, 3450 bp, Artificial Sequence
  derived and/or modified sequence
atgcctacaatgcggaggacagttagcgaaatccggtctagagccgaagggtacgagaagacagatgacgtttcagaaaagacctctctcgcggatcaggaagaagttagaaccatcttcattaaccagccacagttaacaaagttctgcaacaaccacgtgtctaccgcgaagtataacatcattacattcctgccacgtttcctctacagccagtttcggcgtgccgcaaactctttcttcctattcattgccctactgcaacaaataccagatgtgtcgcccaccggcaggtatactaccttggttcctttgctgtttatcctcgccgtggcagctattaaagaaattatagaggatatcaagaggcataaagccgacaacgccgttaataaaaagcaaacacaagtgctgagaaatggcgcatgggagatcgtgcactgggaaaaggtgaacgtgggcgacattgttatcattaagggcaaagagtacatccccgcagatacagtgttgttgtcgagcagcgagccacaggctatgtgttacatcgagacatccaacctcgatggcgagactaacttgaaaatacgacagggtctaccagccactagcgacattaaggacgtggactctctgatgagaatctccggtcgtatcgaatgcgaaagtcccaaccgtcacctgtacgacttcgttggaaatattagactagatgggcacggaactgttcccctcggggcagaccagatcctcctgcgaggtgcccaactgaggaacacacaatgggttcatggtattgtcgtttacactggacacgacacaaaactgatgcagaactcaacgtccccgccacttaaactgtctaatgtggagagaatcacaaatgtgcagatactgatcctgttctgcattctcattgccatgtcactagtctgttccgtgggatcagcaatctggaaccgcagacactccggcaaggattggtacctgaacttgaattacgggggagcatctaattttggccttaactttctaacctttatcatcctgtttaacaatctcatccccattagcctgctggtgactctggaggtcgttaaattcacacaggcctactttatcaactgggacctcgatatgcattacgagccaactgacacggctgccatggcaagaacttcaaatctgaacgaggaacttggtcaggtcaagtacatcttcagcgacaagacaggcaccctgacttgtaatgttatgcaatttaagaaatgtaccatagcgggtgtcgcctacggacagaactcccagttcggggatgaaaagaccttttccgattccagcctcctggaaaatctgcaaaacaaccaccccacagcgcctatcatttgtgaattcttaacgatgatggcagtgtgtcatacagccgtcccagagcgggaaggggataagatcatttatcaggcagcctctcccgatgaaggggctctcgtccgggcagcgaagcagcttaacttcgtattcactggcaggactcccgattcagtgattatcgacagcttagggcaggaagaacgttatgagctgctgaacgtgctggaatttacttcggcccgtaaacgaatgtctgtgattgtcagaaccccatccgggaagctgcgcttgtactgcaaaggagcggataccgtcatctatgaccggctcgccgaaacctcaaaatacaaggagattaccctgaaacatttagagcagttcgccacagaggggttgcgtaccctttgcttcgccgtggctgaaatctctgagagcgactttcaggaatggagggcggtgtatcagagggcttccacaagtgtgcagaaccggttactcaagctggaggagtcatacgaactgatcgaaaaaaacctccagctgctcggcgctaccgccatcgaagataaattacaagatcaggtgcccgagactatagagacacttatgaaggcggacattaagatctggatcctcacaggggataagcaggagactgctatcaacatcggtcacagttgcaaactgctcaagaagaacatgggcatgatcgtgataaatgagggctctctcgatgggactcgggaaaccctttcacgacactgtactaccttgggggatgcccttagaaaagagaatgactttgctctcataatcgacgggaaaacattaaaatacgccctgaccttcggggtgagacaatatttcttagacctcgcgctctcctgcaaggccgtgatctgctgcagggttagcccgctccagaagtccgaagttgtggagatggtcaagaagcaggtgaaagtggtcaccctggccattggagatggagccaatgacgttagtatgatccagaccgcccacgttggagtcggaatatccgggaacgagggcctccaggccgctaactcaagtgattactcaattgcacagtttaagtatctgaaaaacctgctcatgatccacggcgcttggaactacaatagagtgagcaagtgcatactgtattgcttctataagaacatcgttttgtacataatcgagatttggtttgctttcgtcaatggattctcgggacaaattcttttcgaaagatggtgcattggactgtacaatgtgatgtttaccgccatgccccctctgactttgggaatattcgaaaggagttgcagaaaagagaacatgttgaagtaccctgaactttacaagaccagccaaaacgccctagattttaacacaaaagtgttttgggtgcattgcctgaatggcctgttccacagcgtgatcttattttggtttccgctcaaagctttgcagtatggcacagcattcggaaacggcaagacttccgattaccttttgttgggcaacttcgtgtacacattcgtagtaatcacagtatgtctgaaggctggcctggaaaccagctactggacctggttcagccatattgccatctggggttctatcgcactgtgggtggtctttttcggcatctactcatcattgtggccagctatccccatggccccagacatgtcaggggaagccgcaatgctcttctctagcggtgtcttttggatgggccttttgtttattccggtagcctcactactgctggatgtggtgtacaaagtaataaaacgcaccgcatttaagacgctggtagatgaggtgcaggagttggaagccaaaagtcaggaccccggtgctgtggtcttgggaaaatctttaaccgaaagagctcagctcctgaaaaatgtgttcaagaaaaaccatgtgaacctttacaggagcgagtctctccagcagaatttgttacatggatacgcattttctcaggatgaaaacggcatcgtttcccagtccgaagtcatccgagcctacgataccaccaagcagcgccctgacgaatggtag

SEQ ID NO: 41594 - DNA, 8209 bp, Artificial Sequence
  derived and/or modified sequence
agctctgcgggcgccgccaccttcgccgccaccgctgcctttctcctcctcctgtcggcgtgcgggggccgcgcccggcggcagctctgccctaggtgggcggcggcgcggcccaggctgcagctgagcgctctgcgcggcgcagccgggtctcccgcgtgtaccacgccgtgacaggtgcagagtccgggctgaggacccacctgcagccgccgccgcgatgcccaccatgcggaggaccgtgtcggagatccgctcgcgcgccgaaggttatgagaagacagatgatgtttcagagaagacctcactggctgaccaggaggaagtaaggactattttcatcaaccagccccagctgacaaaattctgcaataaccatgtcagcactgcaaaatacaacataatcacattccttccaagatttctctactctcagttcagaagagctgctaattcattttttctctttattgcactgctgcagcaaatacctgatgtgtcaccaacaggtcgttatacaacactggttcctctcttatttattttagctgtggcagctatcaaagagataatagaagatattaaacgacataaagctgataatgcagtgaacaagaaacaaacgcaagttttgagaaatggtgcttgggaaattgtccactgggaaaaggtaaatgttggagatatagttataataaaaggcaaagagtatatacctgctgacactgtacttctctcatcaagtgagccccaagccatgtgctacattgaaacatccaacttagatggtgaaacaaacttgaaaattagacagggcttaccagcaacatcagatatcaaagacgttgacagtttgatgaggatttctggcagaattgagtgtgaaagtccaaacagacatctctacgattttgttggaaacataaggcttgatggacatggcaccgttccactgggagcagatcagattcttcttcgaggagctcagttgagaaatacacagtgggttcatggaatagttgtctacactggacatgacaccaagctgatgcagaattcaacaagtccaccacttaagctctcaaatgtggaacggattacaaatgtacaaattttgattttattttgtatcttaattgccatgtctcttgtctgttctgtgggctcagccatttggaatcgaaggcattctggaaaagactggtatctcaatctaaactatggtggcgctagtaattttggactgaatttcttgaccttcatcatccttttcaacaatctcattcctatcagcttattggttacattagaagttgtgaaatttacccaggcatacttcataaattgggatcttgacatgcactatgaacccacagacactgctgctatggctcgaacatctaatctgaatgaggaacttggccaggttaaatacatattttctgacaaaactggtactctgacatgcaatgtaatgcagtttaagaagtgcaccatagcgggagttgcttatgggcagaactcacagtttggagatgaaaaaacatttagtgattcatcattgctggaaaatctccaaaataatcatccaactgcacctataatatgtgaatttcttacaatgatggcagtctgtcacacagcagtgccagagcgagaaggtgacaagattatttatcaagcagcatctccagatgagggagcattggtcagagcagccaagcaattgaattttgttttcactggaagaacacccgactcggtgattatagattcactggggcaggaagaaagatatgaattgctcaatgtcttggagtttaccagtgctaggaaaagaatgtcagtgattgttcgcactccatctggaaagttacgactctactgcaaaggagctgacactgtaatttatgatcgactggcagagacgtcaaaatacaaagaaattaccctaaaacatttagagcagtttgctacagaagggttaagaactttatgttttgctgtggctgagatttcagagagcgactttcaggagtggcgagcagtctatcagcgagcatctacatctgtgcagaacaggctactcaaactcgaagagagttatgagttgattgaaaagaatcttcagctacttggagcaacagccattgaggataaattacaagatcaagtgcctgaaaccatagaaacgctaatgaaagcagacatcaaaatctggatccttacaggggacaagcaagaaactgccattaacatcggacactcctgcaaactgttgaagaagaacatgggaatgattgttataaatgaaggctctcttgatggaacaagggaaactctcagtcgtcactgtactacccttggtgatgctctccggaaagagaatgattttgctcttataattgatgggaaaaccctcaaatatgccttaacctttggagtacgacagtatttcctggacttagctttgtcatgcaaagctgtcatttgctgtcgggtttctcctcttcaaaaatctgaagttgttgagatggttaagaaacaagtcaaagtcgtaacgcttgcaatcggtgatggagcaaatgatgtcagcatgatacagacagcgcacgttggtgttggtatcagtggcaatgaaggcctgcaggcagctaattcctctgactactccatagctcagttcaaatatttgaagaatttactgatgattcatggtgcctggaactataacagagtctccaagtgcatcttatactgcttctacaagaatatagtgctctatattatcgagatctggtttgcctttgttaatggcttttctggacagatcctctttgaaagatggtgtataggtctctataacgtgatgtttacagcaatgcctcctttaactcttggaatatttgagagatcatgcagaaaagagaacatgttgaagtaccctgaattatacaaaacatctcagaatgccctggacttcaacaccaaggttttctgggttcattgtttaaatggcctcttccactcagttattctgttttggtttccactaaaagcccttcagtatggtactgcatttggaaatgggaaaacctcggattatctgctactgggaaactttgtgtacacttttgtggtgataactgtgtgtttgaaagctggattggagacatcatattggacatggttcagccacatagcgatatgggggagcatcgcactctgggtggtgttttttggaatctactcatctctgtggcctgccattccgatggcccctgatatgtcaggagaggcagccatgttgttcagttctggagtcttttggatgggcttgttattcatccctgtggcatctctgctccttgatgtggtgtacaaggttatcaagaggactgcttttaaaacattggtcgatgaagttcaggagctggaggcaaaatctcaagacccaggagcagttgtacttggaaaaagcctgaccgagagggcgcaactgctcaagaacgtctttaagaagaaccacgtgaacttgtaccgctctgaatccttgcaacaaaatctgctccatgggtatgcgttctctcaagatgaaaatggaatcgtttcacagtctgaagtgataagagcatatgataccacgaaacagaggcccgacgaatggtgatggggagagcctgaaaggcaggctctgttacctctctaaggagagctaccaggttgtcaccgcagtctgctaaccaattccagtctggtccatgaagaggaaaggtagatctgagctcatctcgctgatggacattcagattcatgtatattatagacataagcactgtgcaactgtactgtaacaccatctcttttggatttttttaaggtatttgctaagtctttgtaaacggaaattgaaaatgacctggtatcttgccagagggctttcttaaacggagaataagtcagtattcttatgccattactgtggggctgtaactgactgtcagtttattggctgtaccacaaggtaaccaaccattaaaaaactctaaatgatatttagttaaagggactcttggtatccagacttagatttcaggatatgctgaaacaaaccagcattcttaaggaactgactcaccttcctgagcaaaatttctaaacaagcatttgtgtccaaaattgtcttgataaatgtttgccaaagaggttcagtaagtgtttttctagttcagtagtcatatgcccagaaatgtaagagaaagtttacttccagttccgctgtaagatctgcatgcctgactttccaaatgtaagagtgatttacaaaaatgaatatttcaaggcatttgctactaaaatcggtgatgttgcacctttggccttacaaatgcttctttgttgtttgtcgtgtttatttgttagaggacacacgtgttaatgtgactctgttgttatgacactgatttttcaaactatgtatgtttcaggtatttctgatgaagtttcatcatcatttagatttttctaaaaatctggctaatgcagtagattgagtgatgtcattttgtcttaaagtttttcctcttaagaaacatatgctacgtatttacgtgggatttccaaagcttctgttgcaatatttggaataacatgtcagataaatgcatgggcttttgtcctgtgttccagttcccactagagatgcctgtgtcttgtgtagcacacccagtgttatggtgactgccccctatactgaagactgaaaattatttcacagttcactcatcaaatagttcccaaaattcgtcacatgctgcttattgggacaaataggtagtacattttccccatttaaaaaatgcggattttactcaggccggtaactttacagtcagaggacacgttcatcatgagtagcttttgttagtatgttttaaaatgtatcttcagttcaattattttcagcatttacaagacatctgaaaatggctattttgctaccaacagtaaatgaaggggctgtttaaaaaccacaaccagttttctacactattttttaaataatactttcatttgaaaaaaaggaattagttttcagatacacttcagagattgaagcaaactatttgccttttactcaaaagcctgcttgcctttacatggacttaccagcaaaataggtagaactttctcttttaaaaaaagtcaactagaattgagaagaggtgattttttttcagatcgcttctcgagtttaatattttcacattcttttcaccctttttctcaatctagatttaaaattaggatatatgtcatttccttgtctgtatttgtagctccttagttaccagtatgcctctccattttctacaaataagaggttataacacatatacataattctaaccttaagggaacacacgtttacatactttacttcccaagcccttcctgtttggggtacagattgagagagtcatgaatcaacacatctagcaagaccacaggtgtaagagtctaagatcgtcttcaaaattctgaagtcccagtctttacctgtccagtgaatgaatattcagagcagcttttcctgggcttcccagtggtgatagctgaggtcaaaccacaaaaaataagaaagcaagagtgaaatgcacccctccagagaaacactttgtagtgtttaattctgttaatagagaagagctgcttctgtttgcgctcacttcatcagtggcacccttctgcagaattttaatataaaaacattatggatataatagaactggattttctgacttaaaaatgtaagttttattttaatcttgaaacgtggattgtttctgtggagctcttaaacatgagaagaatacttacggttgataatgtgtaacatgatctgaaatgtgactaatttgagcctctttgtcccatcgtcctgtttttgaattattgacattgtcagtctctttgcttcctgggtgagacttggggtttgagggacagggaatgaccttcttggtgaaacttaaaatataacattgcaattgcagtgactttacagtgttaaattagagaaaatagtctgattttttaaaccttccttaactggaaaaaagtcacatggttttaccaggattgaaataaacagtcaatgtgacttttaacatgtgtttttttgaaataaagggcacgtactcttcaattaaaaagttccttatagggactctggcaaatgctaacacagttgctttacaatgtttacaattcagacaatacgacttataatagaaaatcctcattcatttagcattgaaaagctggaagttgcttctttaatgttgaatagtatacagtggtattgagcatggactttctaaatgttttatatatacatataaaaatatattggtgtctcacacccagaaagatgttatattgtagatattattaggaaaacagtgtttctcaggaacgttgtaaattttaaatgatatatgtacttcccgtcctcccacctccactctgtgctctaatgtgagactgcttcagcagtgttgctaagttaatggaaaactttttctaatcaagtcaggtgaatgtgtattctgctaaataatgttagccatttacatgaattgtatggtcattaaatggaatcagtgattcctctttaatttccagaggggaaatgaattatggaaatcagtcagcattctgatcattaaattttatactttaattttgccgttcagcattctaaatatccaatgtgaaagtcacatgataatttgttttgcattgcgtgcactgtacaacacttacaacttgtcatttaaaatgttttctcgggaaatgaatgctagtcagaaagtaatagattgtattattcatagttttaaaattatgacaatgtcataattactacaaagctaaataatcgtgtttatttttgtgcagttgccctttgatagttcctggttttaaaacctattaagtgtataatcttacaaatagtcatctacaaaatttatggagaaagtgcccagcccattcacatcacatggaccaggaattcttttgtaaatgacttaaggtaacatcatgcagttcagtgcctaataaatgctttttaatgatgaacatttctataatgactcgtaagataccatagtctgatttttctcacattaaaataactgaagtcacttgtgtaacgtagttatactttgctgcattttaattaaccttcaacagctattaaagtggaatgtaagttaaattttgaaggaaaggaaataaatgttttccatatttcgtcttgatttactttctgtatgagaacagctgtgtttttgataggtttatggtttgcatgagttcatatttaaagtgatccaggccaatgcatggctattgctgtaaatcttgatgtttatttctgccttgtaaagttctatcacggcctacctggaatttaaaattcagtagacaaattaattggtcctctgcacaacttttttaataagtagattattttacaaagaaatttgaacaaatttaattgaatcttttgtttagcttgcctctaagaacttttcttaataaagctcccaaaacttctcagcaaataaatctcccttaagtaggaaagctagatttcatatttgcttactttgaattaacagcaactttccacaggtaaatctgttcttgcaaagatgtgagcagaatagttaaaaataatatttttatgtttcatggttctaaatggaagccataaatgcagtaaatactatctgttgtttaactactttaatcgtcattttttacattttcaagtttattaggttaagaaaaacagggcagccttggaaggcagctactacagaaaactgcagttttgcgttaaagataaagtagtattttcagctccctgaaaaaccattcctgctgaaactgctgtagaaattgtgaagctgcatgagtggagagtattgaatctgtggttatagtagttttctcaggtttgtttatcttgatgtttgatgcactgtgttttatagttattaaaattgagtaatattatttctatgcagtgttatgtgtcattggccttttgtgaatgtgcatgttttaaactgcaaattttaaacattttgtcctctaattgttattaaaaatgaaataaactttaccattactt

SEQ ID NO: 41595 - DNA, 369 bp, Artificial Sequence
  derived and/or modified sequence
atgaaggtggccctgctgcggttcttcagcccccccaacatgagcgtgacccataaggaggcccacgagcgaaagtgtccagagaagcctgagctctggaaagccggttctacggtgccactgaccgcacctgaaaagaccgaccctttcccactgtgcccaccactatccctgacatgcccgcagcagcagagttgcattccaagttcgtcgcaggacgtgttaaactccttatgggtgagcagtcactgcctgcagctgaagatttcaaagacaaagacccactgcttgcctacccagaacgttttgcctttccttctcccaacccccgtatctatcgtttgtcggttgccaggcctggatccttag

SEQ ID NO: 41596 - protein, 1319 aa, Artificial Sequence
  derived and/or modified sequence
MTEVQAMVEFSVELNKFYNVDLFQRGFYQIRASMKIPSRIPHRVEASLLHATGMTLAFPASVHDSLICSKTFQILYKNEEVVLNDVMIFKVKMLLDERKIEETLEEMNFLLSLDLHFTDGDYSADDLNALQLISSRTLKLHFSPHRGLHHHVNVMFDYFHLSVVSVTVHASLVALHQPLISFPRPVKTTWLNRNAPAQNKDSVIPTLESVVFGINYTKQLSPDGCSFIIADSFLHHAYRFHYTLCATLLLAFKGLHSYFITVTEEIPSCQKLELEEMDVEARLTELCEEVKKIENPDELAELINMNLAQLCSLLMALWGQFLEVITLHEELRILLAQEHHTLRVRRFSEAFFCFEHPREAAIAYQELHAQSHLQMCTAIKNTSFCSSLPPLPIECSELDGDLNSLPIIFEDRYLDSVTEGKLDISQDDSEITQMEHNLASRRSSDDCHDHQTTPSLGVRTIEIKPSNKDPFSGENITVKLGPWTELRQEEILVDNLLPNFESLESNGKSKSIEITFEKEALQEAKCLSIGESLTKLRSNLPAPSTKEYHVVVSGDTIKLPDISATYASSRFSDSGVESEPSSFATHPNTDLVFETVQGQGPCNSERLFPQLLMKPDYNVKFSLGNHCTESTSAISEIQSSLTSINSLPSDDELSPDENSKKSVVPECHLNDSKTVLNLGTTDLPKCDDTKKSSITLQQQSVVFSGNLDNETVAIHSLNSSIKDPLQFVFSDEETSSDVKSSCSSKPNLDTMCKGFQSPDKSNNSTGTAITLNSKLICLGTPCVISGSISSNTDVSEDRTMKKNSDVLNLTQMYSEIPTVESETHLGTSDPFSASTDIVKQGLVENYFGSQSSTDISDTCAVSYSNALSPQKETSEKEISNLQQEQDKEDEEEEQDQQMVQNGYYEETDYSALDGTINAHYTSRDELMEERLTKSEKINSDYLRDGINMPTVCTSGCLSFPSAPRESPCNVKYSSKSKFDAITKQPSSTSYNFTSSISWYESSPKPQIQAFLQAKEELKLLKLPGFMYSEVPLLASSVPYFSVEEEDGSEDGVHLIVCVHGLDGNSADLRLVKTYIELGLPGGRIDFLMSERNQNDTFADFDSMTDRLLDEIIQYIQIYSLTVSKISFIGHSLGNLIIRSVLTRPRFKYYLNKLHTFLSLSGPHLGTLYNSSALVNTGLWFMQKWKKSGSLLQLTCRDHSDPRQTFLYKLSNKAGLHYFKNVVLVGSLQDRYVPYHSARIEMCKTALKDKQSGQIYSEMIHNLLRPVLQSKDCNLVRYNVINALPNTADSLIGRAAHIAVLDSEIFLEKFFLVAALKYFQ

SEQ ID NO: 41597 - DNA, 3960 bp, Artificial Sequence
  derived and/or modified sequence
atgaccgaggtgcaggccatggtggagttcagcgtggagctgaacaagttctacaacgtggacctgttccagagaggcttctaccagatcagagccagcatgaagatccccagcagaatcccccacagagtggaggccagcctgctgcacgccaccggcatgaccctggccttccccgccagcgtgcacgacagcctgatctgcagcaagaccttccagatcctgtacaagaacgaggaggtggtgctgaacgacgtgatgatcttcaaggtgaagatgctgctggacgagagaaagatcgaggagaccctggaggagatgaacttcctgctgagcctggacctgcacttcaccgacggcgactacagcgccgacgacctgaacgccctgcagctgatcagcagcagaaccctgaagctgcacttcagcccccacagaggcctgcaccaccacgtgaacgtgatgttcgactacttccacctgagcgtggtgagcgtgaccgtgcacgccagcctggtggccctgcaccagcccctgatcagcttccccagacccgtgaagaccacctggctgaacagaaacgcccccgcccagaacaaggacagcgtgatccccaccctggagagcgtggtgttcggcatcaactacaccaagcagctgagccccgacggctgcagcttcatcatcgccgacagcttcctgcaccacgcctacagattccactacaccctgtgcgccaccctgctgctggccttcaagggcctgcacagctacttcatcaccgtgaccgaggagatccccagctgccagaagctggagctggaggagatggacgtggaggccagactgaccgagctgtgcgaggaggtgaagaagatcgagaaccccgacgagctggccgagctgatcaacatgaacctggcccagctgtgcagcctgctgatggccctgtggggccagttcctggaggtgatcaccctgcacgaggagctgagaatcctgctggcccaggagcaccacaccctgagagtgagaagattcagcgaggccttcttctgcttcgagcaccccagagaggccgccatcgcctaccaggagctgcacgcccagagccacctgcagatgtgcaccgccatcaagaacaccagcttctgcagcagcctgccccccctgcccatcgagtgcagcgagctggacggcgacctgaacagcctgcccatcatcttcgaggacagatacctggacagcgtgaccgagggcaagctggacatcagccaggacgacagcgagatcacccagatggagcacaacctggccagcagaagaagcagcgacgactgccacgaccaccagaccacccccagcctgggcgtgagaaccatcgagatcaagcccagcaacaaggaccccttcagcggcgagaacatcaccgtgaagctgggcccctggaccgagctgagacaggaggagatcctggtggacaacctgctgcccaacttcgagagcctggagagcaacggcaagagcaagagcatcgagatcaccttcgagaaggaggccctgcaggaggccaagtgcctgagcatcggcgagagcctgaccaagctgagaagcaacctgcccgcccccagcaccaaggagtaccacgtggtggtgagcggcgacaccatcaagctgcccgacatcagcgccacctacgccagcagcagattcagcgacagcggcgtggagagcgagcccagcagcttcgccacccaccccaacaccgacctggtgttcgagaccgtgcagggccagggcccctgcaacagcgagagactgttcccccagctgctgatgaagcccgactacaacgtgaagttcagcctgggcaaccactgcaccgagagcaccagcgccatcagcgagatccagagcagcctgaccagcatcaacagcctgcccagcgacgacgagctgagccccgacgagaacagcaagaagagcgtggtgcccgagtgccacctgaacgacagcaagaccgtgctgaacctgggcaccaccgacctgcccaagtgcgacgacaccaagaagagcagcatcaccctgcagcagcagagcgtggtgttcagcggcaacctggacaacgagaccgtggccatccacagcctgaacagcagcatcaaggaccccctgcagttcgtgttcagcgacgaggagaccagcagcgacgtgaagagcagctgcagcagcaagcccaacctggacaccatgtgcaagggcttccagagccccgacaagagcaacaacagcaccggcaccgccatcaccctgaacagcaagctgatctgcctgggcaccccctgcgtgatcagcggcagcatcagcagcaacaccgacgtgagcgaggacagaaccatgaagaagaacagcgacgtgctgaacctgacccagatgtacagcgagatccccaccgtggagagcgagacccacctgggcaccagcgaccccttcagcgccagcaccgacatcgtgaagcagggcctggtggagaactacttcggcagccagagcagcaccgacatcagcgacacctgcgccgtgagctacagcaacgccctgagcccccagaaggagaccagcgagaaggagatcagcaacctgcagcaggagcaggacaaggaggacgaggaggaggagcaggaccagcagatggtgcagaacggctactacgaggagaccgactacagcgccctggacggcaccatcaacgcccactacaccagcagagacgagctgatggaggagagactgaccaagagcgagaagatcaacagcgactacctgagagacggcatcaacatgcccaccgtgtgcaccagcggctgcctgagcttccccagcgcccccagagagagcccctgcaacgtgaagtacagcagcaagagcaagttcgacgccatcaccaagcagcccagcagcaccagctacaacttcaccagcagcatcagctggtacgagagcagccccaagccccagatccaggccttcctgcaggccaaggaggagctgaagctgctgaagctgcccggcttcatgtacagcgaggtgcccctgctggccagcagcgtgccctacttcagcgtggaggaggaggacggcagcgaggacggcgtgcacctgatcgtgtgcgtgcacggcctggacggcaacagcgccgacctgagactggtgaagacctacatcgagctgggcctgcccggcggcagaatcgacttcctgatgagcgagagaaaccagaacgacaccttcgccgacttcgacagcatgaccgacagactgctggacgagatcatccagtacatccagatctacagcctgaccgtgagcaagatcagcttcatcggccacagcctgggcaacctgatcatcagaagcgtgctgaccagacccagattcaagtactacctgaacaagctgcacaccttcctgagcctgagcggcccccacctgggcaccctgtacaacagcagcgccctggtgaacaccggcctgtggttcatgcagaagtggaagaagagcggcagcctgctgcagctgacctgcagagaccacagcgaccccagacagaccttcctgtacaagctgagcaacaaggccggcctgcactacttcaagaacgtggtgctggtgggcagcctgcaggacagatacgtgccctaccacagcgccagaatcgagatgtgcaagaccgccctgaaggacaagcagagcggccagatctacagcgagatgatccacaacctgctgagacccgtgctgcagagcaaggactgcaacctggtgagatacaacgtgatcaacgccctgcccaacaccgccgacagcctgatcggcagagccgcccacatcgccgtgctggacagcgagatcttcctggagaagttcttcctggtggccgccctgaagtacttccagtag

SEQ ID NO: 41598 - DNA, 5042 bp, Artificial Sequence
  derived and/or modified sequence
ctgtgatggcgatgtgagggggcccggggcgggatggtgctgacccgggtcgggccgtcttcttgcagctggacaacgagctcctccgttcgacaggcgggggaagaggccgagccgggcgagagggttgaagatcaactggattatgtatttggttctggaatctcaaagcagtccacaaacaaattcttccttatgttgtctgtgtcagggggaacggtgtatttttaacaacgggaatcagtaactggaagtacaagattggttatttaataatgttaaaaatgaggctttgaaaagcagaggtgctgttatcagaatagtcttctgggtataaattaaaaatgactgaagttcaagcaatggtagaattctctgtggagctaaacaagttctacaatgtggatttgtttcagagaggtttttaccagattcgtgcttctatgaaaattccatcaagaattccccacagagtagaagctagtttgttgcatgcaacaggtatgactttagcctttccagcctcagttcatgattctctaatttgcagtaaaacatttcaaattttgtacaaaaatgaagaggttgttttaaatgatgttatgatcttcaaagtaaaaatgctattggatgaaagaaagattgaagaaacccttgaggaaatgaattttctattatccttggatctacacttcacagatggagattattcggcagatgatctgaatgccttgcaactaataagtagccgaacattgaagctgcactttagcccccatagaggccttcatcatcatgttaatgttatgtttgattacttccacctttctgttgtgtctgttacagttcatgcatcattggttgcactacaccagccactaataagctttcctcgccctgtgaagacaacttggttaaatagaaatgcaccagcacaaaacaaagattccgtgattcctactcttgaaagtgtggtctttggtattaactacacaaaacagttatcaccagatggttgtagcttcatcattgcagactccttcctacatcatgcgtatcgttttcattatacactttgtgccactttgctgctagccttcaagggattgcacagctacttcattacagtaacagaagagattccttcttgtcagaaactagaactggaggaaatggatgtagaagctcgacttactgaactatgtgaagaagttaagaaaatagagaatcctgatgaactggcagaacttataaatatgaatcttgcgcaactttgctcacttttgatggctttatggggacagtttctggaagttataacgctacacgaagaactaagaatattattagcacaagagcaccatactttgagggtacgcagattttctgaggcattcttttgttttgagcatccaagagaagctgccattgcataccaggaacttcatgctcagagtcatctacagatgtgcaccgctatcaaaaatacttccttctgcagttctcttccacccttacctattgaatgtagtgaattagatggagatctcaattcattacctataatctttgaagataggtatttagattcagttactgaaggtaaacttgatatctcccaggacgatagtgaaattacacaaatggaacacaatctggcatccagaaggtcatcagacgattgccatgatcatcaaacaaccccatctttgggagttagaacaattgaaataaagcccagtaataaagatcctttcagtggagagaatataactgtcaaactaggaccttggacagagcttcgacaagaggaaatacttgtggataatttactacccaactttgagtccttagaatctaatggtaaatctaaatctatagaaataacatttgaaaaggaagctttgcaagaagcaaagtgtctttctattggagaatcattaactaaattacgaagtaatctacctgccccttctacaaaagaatatcatgttgtagtaagtggagatacaattaagttaccagatattagtgccacatatgcctcatctagattttcagattcaggtgttgaaagtgaaccgagttcttttgcgacacatccaaacactgatttagtctttgaaactgtgcaagggcaaggtccttgcaatagtgaaagattatttcctcagcttttgatgaaacctgattataatgtaaaattttcattaggaaatcattgtactgagagtacaagtgctataagtgaaatacagtcatctttgacatccataaactctctaccctccgatgatgaactgtcacctgatgaaaattctaagaaatctgttgtacctgaatgccatctaaatgatagcaaaactgtattaaatctaggaacgactgatttgccaaaatgtgatgatactaaaaagtcaagtatcactttgcaacagcagagtgttgtattttcagggaacttggacaatgaaactgtagcaatacattccttaaattcaagcattaaagaccctttacaatttgttttttcagatgaagagacttccagtgatgtgaaaagtagttgcagctccaaacctaacttggatactatgtgtaaaggcttccagagtcctgataaatctaataactctacagggacagcaattacattaaattcaaaactgatttgtttaggcactccttgtgtcatttcaggttccatttctagtaatacagatgttagtgaagatagaactatgaaaaaaaatagtgatgtattaaatctcacacagatgtattcagaaatccctacagttgaaagtgaaactcatctgggtacaagtgatcctttttcagccagtactgatatagtaaagcaagggcttgtggaaaattattttggttctcaaagcagtacggatatttctgacacatgtgctgttagctacagcaatgcacttagccctcagaaggaaacttctgaaaaagaaattagtaatcttcagcaggaacaggataaagaggatgaggaggaagagcaggatcaacaaatggttcaaaatgggtactatgaagaaacagattattcagctttggatggaacaataaatgctcactatacaagcagagatgaactaatggaagaaagacttacaaaatctgaaaaaataaacagtgactatctgagagatggtataaacatgcctactgtctgtacttctggttgtttgtccttcccgtctgcaccacgagagtctccttgtaatgttaaatattcttccaaaagtaaatttgatgccattacaaagcagccaagcagtacttcttacaacttcacttcttcgatttcctggtatgaaagttcaccaaaacctcaaatacaagccttccttcaggcaaaagaagaactgaagctactaaaacttcctgggttcatgtacagtgaagttcctctgctggcatcctcagtaccttattttagtgtagaagaagaggatggttctgaagatggagtacatctgattgtctgtgtgcacggtttagatggaaacagtgcagatctccgattagtaaaaacttacattgaacttggattgcctgggggaagaattgattttcttatgtctgagagaaatcagaatgatacttttgctgattttgatagcatgactgatcgtcttttggatgagataatacagtatattcagatatatagtctaacagtctcaaaaataagctttattggacattcgttgggcaatttaataattcgttcagtgcttacaaggccaaggtttaaatattacctcaacaaacttcatacctttctgtctctttctggacctcaccttggtacactctacaacagcagtgctcttgttaatacaggtctctggtttatgcagaaatggaaaaaatcaggttcgcttttgcagctgacatgtcgagatcactcagaccctcgccaaacttttttatataagcttagtaacaaagcagggcttcattatttcaaaaatgttgtgctagtgggatccctacaggatcgctatgttccttatcactctgcccgcattgaaatgtgtaaaacagctttaaaggacaaacagtcaggacagatctattcagaaatgatccacaacttgcttcgacccgttctgcaaagcaaggactgtaatttggttcgctataatgtcatcaatgcattgcccaatacagctgattcactcattgggagagctgcacatatagctgttcttgattcggaaatatttttagagaaattctttctggttgctgccctcaaatatttccaatagtataaaagcattgttagcgactggacaattacctcattcaacaatgtttcaaataatgtattatattaaaatgtagatgctgataagttctaagaaatatttatacctttttatatggaagataatttatatcatccatgtttagtgctttttaaacatcaactttactttctaggtaatgtggctgtgcaatatttttttaattttatctttttacttttctattactttttcatatattttgctacctaagtatttcagtgaaactttaagcccatacctgtgtctgattgtttattattggctttccacaattcttacatcagactacattatattagagaccattattgctagaatagcatgggatttaaaattttctaatactgggggtattatttagttaattataaatttttcttttcacattttactgtgttttaactggaaataaaattatggctgctacaatatattttttgaaatcaacttctgtagttctaaaatacaactttatcatacaatcaaaccaggtagttcatataaaacagtgtaatacaagttttctataaagtcattactgttgcttaaacatatttcatgcctattaaaatatattttctactggtgatttcaacattatttctcatactgacttttattactggaaatgttcctgtacatgttggcagcagataaagatttttgaatgtttgaatgccctctgccttgatttgg

SEQ ID NO: 41599 - DNA, 3960 bp, Artificial Sequence
  derived and/or modified sequence
atgaccgaggtgcaagccatggtcgagttctccgtggagttaaacaagttttataacgtggatctattccaaaggggattctatcagatccgagcatccatgaaaatcccatctcgaatcccgcacagggttgaggcgagccttctccacgccacggggatgacactcgcattcccagcgagcgtacacgatagtcttatctgcagtaaaacgtttcaaatcctgtacaagaatgaagaagtcgtcttaaatgatgtaatgatcttcaaggtgaaaatgcttctcgacgaacgaaagatagaagagactctcgaagagatgaatttcctgttatccctagatctacactttaccgatggagattattctgctgacgaccttaacgctctgcagcttatatcatctagaaccttgaaactgcatttctcaccacatcggggattgcatcaccatgtgaacgtcatgtttgactatttccacctgtctgtcgtatctgtaacagtgcatgcctcccttgttgcattacatcagccattaatatcctttcctagacccgtgaagaccacatggctgaaccgcaacgcgcctgcacaaaacaaggattcggtgattccaaccctggagtctgtcgtgtttggtattaattatacaaagcagttatcacctgatggctgctctttcattatcgccgactctttcctccatcacgcctatcgcttccactacaccctgtgcgcaaccctgctgttagcgttcaaaggcttacatagctatttcattaccgttactgaagagattccctcctgtcagaaactggaactcgaagaaatggatgtcgaagccagattgacggaactgtgtgaggaagtcaagaaaatcgagaatcccgatgagctagctgaactgatcaatatgaacctcgcacagctctgctcattactgatggccctgtggggccagtttcttgaagtgattacacttcacgaggagttaaggatcctgctggcccaggagcaccacacgctcagagtgagacgtttttcagaagcatttttctgtttcgagcatcctcgtgaggcggctatcgcataccaagagctgcatgctcagtctcacctccaaatgtgtaccgccattaaaaatacgtcattctgtagttcactcccccctcttcccatcgaatgctccgagctcgacggtgacctgaattccctccctattatttttgaggataggtacctggacagcgtaacggagggcaagctcgacatctcccaagacgatagtgagattactcagatggaacacaacctggctagtcggaggagcagtgatgactgtcacgaccatcagactactcctagccttggggtgcggaccattgaaataaagccctcaaacaaggaccccttttctggggaaaatataaccgtgaaactcgggccttggactgagcttcgacaagaagagatactagtcgacaatctcttgcccaacttcgagtcactcgaatcaaatggcaaatccaaatcaatagagattacgttcgaaaaggaagcactccaagaagcgaaatgtctgtccatcggggaatctctgacaaagctgaggtccaacttgcctgctcccagcaccaaggaatatcacgtggtggtgtctggagatacaattaaactccccgatatcagcgcaacatacgccagctcacgcttttcagacagcggggttgagagtgaaccctcttcttttgcaacacacccaaacactgacctggtgttcgagacagtccaggggcagggcccctgcaacagtgagcgattgtttccacagctgctcatgaaacctgactacaacgttaaattcagcctcggaaaccattgtaccgaatctacctctgctatctctgagattcaatctagcctcacctcgatcaactccctaccttctgacgatgaattatccccagacgagaactcaaagaagtccgtcgtacctgaatgtcacctgaatgattccaagactgtgctaaaccttggcaccaccgatttgcctaagtgcgacgacactaaaaagagctccattactcttcaacagcagtcagttgtgttcagcggaaacctggacaacgagactgtggccatccatagcctgaacagcagcatcaaggatcctctacagtttgtgttcagcgacgaagagacctctagtgatgtgaagtcatcatgttcctcaaaacctaacttggacaccatgtgcaaaggctttcagtcacctgataaatccaataactcgacgggcaccgccattaccctgaattccaagctgatctgcctcggcacaccctgtgtcattagcggctctatttcaagcaacacagacgtctccgaggatcggactatgaaaaaaaattccgacgtgttaaatttaactcaaatgtattcagagatccccactgtggaatcagagacacacctgggaactagtgaccctttctcagccagcactgacattgtaaaacagggattagtagagaattattttggctcacagagttctactgatatctcagacacatgtgcagtgagctattccaatgctctcagtccccagaaagagacgtcagagaaggagatcagtaatctccagcaggaacaggacaaggaggacgaagaagaggagcaggaccagcaaatggtgcagaacgggtattacgaagagacggactactccgcactggacggcactataaatgcacattacacctcccgcgatgaattaatggaagaacgccttaccaaaagtgagaagatcaattccgattacttaagagacggtatcaatatgcctacagtgtgtaccagcgggtgtttgtctttcccaagtgcgccccgggaatccccctgcaacgtgaaatactcaagtaagagtaaattcgacgcaattactaaacagcctagctctacatcctacaactttacgagctccatttcctggtatgaatctagtccaaaaccccagatccaggcctttctgcaggcaaaagaagaactgaaattactaaagctaccaggtttcatgtatagcgaggtgcccctattggcctctagcgttccatatttctccgtggaggaggaagatgggagcgaggacggggtgcatcttattgtctgcgttcacggtctcgatgggaattcagccgatctgaggcttgtcaaaacatacatagaactgggcctgccaggtggccggattgactttctcatgtcagaacgcaaccagaacgatacattcgccgacttcgattcaatgacagatagactcttagatgagattatccagtacatccagatctactccctgacggtatcaaagatctccttcattggccactccttaggaaaccttatcatccgtagcgtcctgacaaggccccgatttaaatactacctaaacaaattgcacaccttcctatcactgtcggggcctcacctgggcaccctgtataattccagtgccctcgtgaacacagggctgtggtttatgcagaaatggaagaagagtgggagcctcctgcaattgacctgccgggaccactccgatccccgccagacattcctgtataagttgtcaaataaggccggactgcactattttaaaaatgtggtcttggtgggcagcttgcaggaccgttacgtgccctatcattcggcccgaatagagatgtgtaagaccgcattgaaagacaagcagagcggccagatctacagtgagatgattcacaatttgctgcggccggtgctccagtccaaggactgcaaccttgtgagatataacgtaattaacgcacttcctaacactgctgactccttgatcgggagggcagctcacatcgcagttctggacagtgagatcttcctggagaagttttttctagtcgctgccttgaagtattttcagtag

SEQ ID NO: 41600 - DNA, 3960 bp, Artificial Sequence
  derived and/or modified sequence
atgacagaggtgcaggccatggtggagttctctgtggagctgaacaagttctacaacgtggacctcttccagaggggcttctaccagatccgggcctccatgaagatccccagccgcatcccccaccgggtggaggccagcctgctgcacgccaccggcatgaccctggccttccctgcctctgtgcatgacagcctcatctgcagcaagaccttccagatcctgtacaagaatgaggaggtggtgctgaatgatgtgatgatcttcaaggtgaagatgctgctggatgagaggaagattgaggagaccctggaggagatgaacttcctgctgagcctggacctgcacttcacagatggagactacagcgcagatgacctgaatgccctgcagctgatcagcagcaggaccctgaagctgcacttcagcccccaccggggcctgcaccaccacgtgaatgtgatgtttgactacttccacctgtctgtggtgtctgtgacagtgcacgccagcctggtggccctgcaccagcccctcatctccttccccaggcctgtgaagaccacctggctgaacagaaatgccccagcccagaacaaggacagcgtcatccccaccctggagagcgtggtgtttggcatcaactacaccaagcagctgagcccagatggctgcagcttcatcatcgctgacagcttcctgcaccacgcctaccgcttccactacaccctgtgtgccaccctgctgctggccttcaagggcctgcacagctacttcatcaccgtgacagaggagatccccagctgccagaagctggagctggaggagatggatgtggaggcccggctgacagagctgtgtgaggaggtgaagaagattgagaacccagatgagctggccgagctgatcaacatgaacctggcccagctgtgcagcctgctgatggccctgtggggccagttcctggaggtgatcaccctgcacgaggagctgcgcatcctgctggcccaggagcaccacaccctgcgggtgcggcgcttcagcgaggccttcttctgctttgagcacccccgggaggccgccatcgcctaccaggagctgcacgcccagagccacctgcagatgtgcacagccatcaagaacaccagcttctgcagcagcctgccccccctgcccatcgagtgcagcgagctggatggagacctgaacagcctgcccatcatctttgaggaccgctacctggacagcgtgacagagggcaagctggacatcagccaggatgattctgagatcacccagatggagcacaacctggccagcagaagaagcagtgatgactgccacgaccaccagaccacccccagcctgggcgtgaggaccatcgagatcaagcccagcaacaaggaccccttcagcggggagaacatcaccgtgaagctgggcccctggacagagctgcggcaggaggagatcctggtggacaacctgctgcccaactttgagagcctggagagcaatggcaagagcaagagcattgagatcacctttgagaaggaggccctgcaggaggccaagtgcctgagcattggagagagcctgaccaagctgcggagcaacctgcctgcccccagcaccaaggagtaccacgtggtggtgtctggggacaccatcaagctgcctgacatcagcgccacctacgccagcagccgcttcagtgacagcggcgtggagagcgagcccagcagctttgccacccaccccaacacagacctggtgtttgaaacagtgcagggccagggcccctgcaacagcgagcggctcttcccccagctgctgatgaagccagactacaacgtgaagttcagcctgggcaaccactgcacagagagcaccagcgccatcagcgagatccagagcagcctgaccagcatcaacagcctgcccagtgatgatgagctgagcccagatgagaacagcaagaagtctgtggtgcctgagtgccacctgaatgacagcaagacagtgctgaacctgggcaccacagacctgcccaagtgtgatgacaccaagaagagcagcatcaccctgcagcagcagagcgtggtgttcagcggcaacctggacaatgaaacagtggccatccacagcctgaacagcagcatcaaggaccccctgcagtttgtgttcagtgatgaggagaccagcagtgatgtgaagagcagctgcagcagcaagcccaacctggacaccatgtgcaagggcttccagagcccagacaagagcaacaacagcactggaacagccatcaccctgaacagcaagctgatctgcctgggcaccccctgcgtcatcagcggcagcatcagcagcaacacagatgtgtctgaggacaggaccatgaagaagaacagtgatgtgctgaacctgacccagatgtacagcgagatccccaccgtggagagcgagacccacctgggcaccagtgaccccttcagcgccagcacagacatcgtgaagcagggcctggtggagaactacttcggcagccagagcagcacagacatcagtgacacctgtgctgtgtcctacagcaatgccctgagcccccagaaggagaccagcgagaaggagatcagcaacctgcagcaggagcaggacaaggaggatgaggaggaggagcaggaccagcagatggtgcagaatggctactatgaggagacagactacagcgccctggatggcaccatcaatgcccactacaccagcagagatgagctgatggaggagcggctgaccaagtctgagaagatcaacagcgactacctgagagatggcatcaacatgcccaccgtgtgcaccagcggctgcctgtccttccccagcgccccccgggagagcccctgcaatgtgaagtacagcagcaagagcaagtttgatgccatcaccaagcagcccagcagcaccagctacaacttcaccagcagcatctcctggtatgagagcagccccaagccccagatccaggccttcctgcaggccaaggaggagctgaagctgctgaagctgcccggcttcatgtacagcgaggtgcccctgctggccagctctgtgccctacttctctgtggaggaggaggatggctctgaagatggagtgcacctgattgtgtgtgtgcacggcctggatggcaacagcgctgacctgcggctggtgaagacctacatcgagctgggcctgcccggcggcagaattgacttcctgatgtctgaaagaaaccagaatgacacctttgctgactttgacagcatgacagaccggctgctggatgagatcatccagtacatccagatctacagcctgactgtgtccaagatctccttcatcggccacagcctgggcaacctgatcatccgctctgtgctgacccggccccgcttcaagtactacctgaacaagctgcacaccttcctgagcctgagcggcccccacctgggcaccctgtacaacagcagcgccctggtgaacacaggcctgtggttcatgcagaagtggaagaagagcggcagcctgctgcagctgacctgccgggaccacagcgacccccggcagaccttcctgtacaagctgagcaacaaggccggcctgcactacttcaagaatgtggtgctggtgggcagcctgcaggacagatatgtgccctaccacagcgccagaattgagatgtgcaagacagccctgaaggacaagcagagcggccagatctacagcgagatgatccacaacctgctgcggcctgtgctgcagagcaaggactgcaacctggtgcgctacaacgtcatcaatgccctgcccaacacagctgacagcctgattggccgggccgcccacatcgctgtgctggacagcgagatcttcctggagaagttcttcctggtggccgccctgaagtacttccagtag

SEQ ID NO: 41601 - DNA, 3960 bp, Artificial Sequence
  derived and/or modified sequence
atgaccgaggtgcaggccatggtggagttcagcgtggagctgaacaagttctacaatgtggatctcttccagagagggttctaccagatcagagccagcatgaaaatacccagcaggattccacaccgagttgaggcctccctcctgcacgctaccggtatgaccctggccttccctgccagcgtccacgactccctgatttgttccaaaacctttcagatactgtataaaaacgaagaggtcgtgttgaacgatgtcatgatatttaaagtgaagatgctcctcgatgagcgtaagattgaagaaaccctggaggaaatgaactttttgttgtccctcgatttacactttaccgatggagactattcggccgacgacttgaatgccctccagcttatatccagcaggaccctgaagcttcacttttctccacatagaggtcttcaccaccacgtaaatgtcatgtttgattattttcacctgtccgttgtctctgtgactgtgcatgccagtcttgtcgctttacaccaaccgttgatcagcttccccaggccagtaaagacaacctggctgaatcgcaatgcaccggcccagaataaagactccgtaattcccactctcgagtctgttgtgttcggaatcaactataccaaacagctgagccccgacggatgtagttttatcatagccgattcattccttcaccacgcgtacagattccactacaccctctgcgctactctgctcctcgcgttcaaggggctgcatagctacttcatcacagtcaccgaagagattccaagttgccagaagcttgagcttgaggagatggatgtggaagctcgtctgactgagctgtgcgaagaagtgaaaaagatagagaacccagatgagctggcagaactcatcaacatgaatttagcacagctgtgcagtctactgatggccctgtggggtcaattcctcgaagtaatcactcttcatgaggagctgaggattctgttggctcaggagcatcacaccctacgcgttcggcgattttccgaagcttttttttgctttgaacatccaagggaggcagcaatagcatatcaggaactgcatgcgcagtcccacctccagatgtgtacagcgatcaaaaatacgagcttctgcagctctctgccccccctgccgatcgagtgtagtgagctggatggcgatctcaacagtctacccataatatttgaagaccgctacctggacagcgtgacagaggggaagttagatattagtcaagacgacagtgagattacccagatggagcataacctggccagccgcaggtcgtcagatgattgtcatgatcatcagaccacacccagcctcggcgtgagaacaatagagattaagcccagtaataaggaccccttctccggagagaacatcactgtgaagctggggccttggactgagctgaggcaagaggagatcctggtcgataatctgcttcccaactttgagtctctggaaagcaacggaaagtctaaaagcattgagattacattcgaaaaggaggcactgcaagaggcaaaatgtcttagcatcggtgaaagccttaccaagctgaggtcaaatctccctgccccaagtacaaaggaataccacgttgtggtgagcggcgatacaatcaaactcccagacatttcagctacctacgcatcctccagattcagcgattcaggcgtggagtcagagcccagcagcttcgctacgcaccctaatacagatctggtgttcgagaccgtgcaggggcaaggcccttgtaactctgaacgcttgttcccccagctgctcatgaaaccagattacaatgttaaattctccctgggaaaccactgcaccgagagtacaagtgccatctcagagattcagtcatcactcacttccatcaatagcctgccatcggacgatgagttgtcccccgacgagaattctaaaaaaagtgtggtaccagagtgtcatctgaatgactctaagactgttctaaatctgggaacgaccgacctcccaaagtgcgacgacactaagaagagcagcataactttacagcagcagagtgtagtcttcagcggcaatcttgataacgagaccgttgccatccacagccttaatagctcaattaaggaccccctgcagttcgtattttccgatgaagagacaagcagcgatgtcaagtcatcctgtagcagtaagcctaatctggacaccatgtgtaagggcttccagtctccagataagtctaacaactcaacaggaaccgctatcacactgaacagcaagttgatctgtctcggtacaccttgcgtgatttccgggtcgatatcctccaataccgatgtgtcagaggatcgcactatgaaaaaaaattcagacgtccttaatttgacacagatgtattctgaaattccaacagtagagagcgagacacatctcggcacttctgacccgttttccgcaagtactgatatagtgaagcaaggcctggtggaaaattacttcggttcccagagcagtactgacatctccgatacttgcgcagtgagttacagtaacgccctgagtccgcaaaaggagactagcgaaaaggagatttccaatttgcagcaggagcaggataaagaagacgaagaggaagaacaggaccaacagatggtccagaacgggtactatgaagagacagactactccgctctggatggcaccatcaatgctcattacacttctcgcgacgagttgatggaagagcgcttaaccaagtcagaaaagattaactctgattacctcagagacggtattaacatgcccacagtttgtaccagcggctgtctctcctttccctcggctccgcgggaatcgccttgcaacgtgaagtactcctccaaatcaaaatttgacgccatcactaaacagccgagtagcacatcgtataactttaccagcagcataagctggtacgaatcgtctcccaagccacagattcaggcatttctgcaggcaaaggaagagttaaagctcctgaagcttccaggtttcatgtactccgaggtgcctctcctcgccagtagcgtgccctatttttccgtggaggaagaggacggctcagaagatggcgtccatctgatagtctgtgttcatggactggacggaaattctgccgacctaagactggtgaagacctacatcgagttaggtttacccggcggcagaattgactttctgatgtcggagcgcaaccagaatgatacattcgcagattttgattccatgacggataggttgttggacgaaattattcagtatatccaaatctactccctgacagtgagcaaaatatcgtttattggtcacagtctgggaaatctgatcattaggtctgttcttacccgtccacggttcaaatattacctgaataagctgcacactttcctctcactgagcggccctcatcttggcactctctataactcctcagccctggtgaatacaggcctttggttcatgcagaaatggaaaaaaagtggaagcctcctccaacttacctgtagagatcacagcgaccctcggcagacattcctctacaagctaagcaacaaggccgggctacactatttcaagaacgtagtccttgtcggatctttgcaggatagatatgttccttatcacagcgctagaatagagatgtgcaagaccgcccttaaggataaacagtctggccaaatctacagcgagatgatccataaccttctgagacccgtgctgcaaagtaaggactgtaacttggtccggtacaacgtgattaacgcactccccaacaccgctgacagcctgatcggacgcgcggctcacattgccgtcctggattcggagatcttcctcgagaagtttttcttggtggccgcattgaaatactttcagtag

SEQ ID NO: 41602 - DNA, 3960 bp, Artificial Sequence
  derived and/or modified sequence
atgaccgaggtccaggcaatggtggagttcagtgtagaactcaacaagttctacaatgtggatttatttcagcggggattctaccagatccgggctagtatgaaaatcccaagccggatcccccatcgcgtggaagcttcactcttgcacgcgactggcatgactctagcatttccagcttctgtacacgattccctcatctgctcgaagacattccagattttgtacaagaatgaggaggttgtgctgaacgacgtcatgatcttcaaagtcaaaatgctgctggacgaacggaagatagaggaaacgctggaggaaatgaatttcttgctgtcccttgacctgcatttcaccgatggtgactattcagcagatgatctgaacgccttgcagctgatctctagcagaacgcttaaattgcacttctctccacaccggggtttgcatcaccatgtgaacgtgatgttcgattacttccacttatcagttgtctcagtgacagttcacgcgtctctggtcgctcttcatcagcctcttatctcattccctagacccgtgaagaccacatggctaaatagaaacgcacctgcacagaataaggacagcgtgattcccacactggaatccgtggttttcggcataaactataccaagcagctctctccggacgggtgctcctttattatagcagattctttcttgcaccatgcatatagatttcactacacactctgtgccaccctcttactcgcctttaaagggctgcatagttacttcattaccgtgaccgaagaaatacccagctgccagaaattagagttagaggaaatggatgtcgaggccaggctgacagagctctgcgaggaagtaaaaaagattgagaacccagacgaactggccgaactcataaatatgaacttagcccagctgtgctccttacttatggccctttggggacaattcctcgaggtcatcactctgcatgaagagctgcgaattctcctggcccaggagcaccacacactgcgggtgaggcggtttagcgaagcttttttttgcttcgaacatcccagagaggccgctatcgcttaccaggagctgcacgcgcagtctcacctccaaatgtgcacagccattaagaatacgagcttctgtagctcactgcctccactgcctatcgagtgcagtgaacttgatggagaccttaatagtttgccaatcatcttcgaggacagatatctggactccgttacggagggcaagctcgatatcagtcaagacgatagcgagattacccaaatggaacacaatctggctagccggagatctagcgacgactgccacgatcatcagactacaccaagccttggggtccggaccattgaaattaaaccctccaacaaggatccattttctggcgagaatatcaccgtaaagttggggccttggaccgaattacgccaggaggagatccttgtcgacaatctgttgcctaacttcgagtccctagagagcaatggcaagtctaagtcaatcgagatcaccttcgagaaagaagctctgcaagaggccaagtgcctttccattggtgagagtctgaccaagttgaggagcaacctccccgcaccatccactaaagaataccacgtcgtagtgtccggcgatactataaaactaccggatattagtgctacttatgcctcctctaggttttctgactccggagtggagagcgagccttcaagctttgctacacatccaaacacagatctggtgttcgagaccgtgcaaggacagggcccatgtaattccgaacgcctattccctcaactgctgatgaaacccgattataacgttaaattcagtctgggaaaccattgcaccgaatccacttctgccatatctgaaatccagagttctttaacttcgatcaattcccttccttcagatgatgagctgtctcccgatgagaactcaaagaagtctgttgtcccagagtgtcatcttaatgattccaagaccgttctcaaccttggaacaactgacctgcctaagtgcgatgatacgaaaaaaagttctatcactctgcaacaacagagtgttgtgttctctggcaatctcgacaacgaaacagtggcaattcacagtcttaatagctcgattaaggacccccttcaattcgtctttagcgatgaggagactagcagcgatgtcaagtcgtcatgctcctctaaaccgaacctggacacgatgtgcaaaggattccaatccccggacaagagcaataattcaacggggactgcaataactttgaactctaaattaatttgccttgggacaccatgcgtgatcagcggctctatatcatctaataccgacgtgtccgaggaccgcactatgaagaagaattccgatgtactgaaccttacccagatgtatagtgagattcctacagttgaatcagagacccacctcggcacatcagaccctttttctgctagcacagatattgtgaagcagggtctcgtcgaaaattatttcgggtctcagtcgtctactgatatttctgatacatgcgccgtctcgtactcaaacgctttgagtccccaaaaggagactagcgaaaaggagatttcgaatctacagcaagagcaggataaggaagatgaggaggaggagcaggaccaacagatggtccagaatgggtattatgaggaaacagactacagcgccctcgacgggacaatcaacgcacattacacctctcgtgatgagctaatggaggaacgcctgactaagtctgaaaaaatcaacagcgattacttaagagatggaatcaacatgcccacagtctgcacatctggctgcctgtccttcccctcggccccaagagaaagcccatgcaacgtcaagtattcttctaaaagcaaatttgatgctatcacaaaacagccgagttccacctcctacaacttcaccagcagtatctcctggtacgaaagctccccaaaaccgcagattcaagcattcttgcaagccaaggaggagttaaagttgctcaagttaccagggtttatgtattcagaagtaccgctgctcgctagttcagtgccctacttttctgttgaagaagaagacggatctgaggatggagttcacctgatagtgtgcgtgcatggtctcgacggtaacagtgccgacctgcggctggttaagacatacatcgagctgggtctccctggcggtagaatcgatttcttgatgtcggagagaaaccagaatgacacctttgcggatttcgactccatgaccgatcgtctcctagacgagatcatacagtatatccagatttattcactgaccgtgtcaaagattagctttattgggcactctctcggaaacctcatcatacggagcgtgttaaccaggcctagattcaagtactatctaaataaactccatacctttctatcactatcgggccctcatctcggaactctatataattcttccgccctcgtgaacaccggcctctggttcatgcaaaaatggaagaagagcggcagcctgctacagctgacctgtcgggatcacagcgacccccgtcagacatttctctacaaactcagcaacaaggctggtctccactacttcaagaatgtagtcctggtgggttctcttcaggacaggtacgttccgtaccactctgctcgcatcgaaatgtgcaaaaccgccctcaaggataagcagtccggccaaatctatagcgaaatgattcataatctgctgcgacctgtgttgcaaagtaaggactgcaatttggtgagatacaacgtaattaatgcactgccaaacacagccgattcgctgattgggagggccgctcacatcgccgttttggactccgagatctttctggagaagttttttttggtcgctgctctgaaatactttcagtag

SEQ ID NO: 41603 - protein, 783 aa, Artificial Sequence
  derived and/or modified sequence
MVCRPVFPCRRRFCPRPFLVGLVVAICLFYQTLTLRGSRKLTAAAPGAVPHTSTETQASRCKKGFSQDKQCFLLSGNAQETRKVKESMETHFGSHGRRAILYRPPFYSKTELQLHQHILTQHGYTVVIAEERLNAGLGPGLLEQGDLGSWDLLICLSSKKAEGTPCISKEVMCQLGLHQKANRLPEIQQPLCRKEGLCQIVRRFPELQLPVSPSVCLDQGMQLKPSTSSHLLKTVKPRVWKPGDWSREQLNETTVLAPHETIFRAEDLSVILKAYVLVTSLTPLRAFIHSTGTVWNPPKKKRFTVKLQTFFETFLRASSPQQAFDIMKEAIGKLLLAAEVFSETSTLGPKTFHRCRFCFQLLTFDIGYGSFMYPVVLQVHEHLNFQDYDNMDFEDQNTEEFLLNDTFNFLFPNESSLSIFSEIFQRLYRSDVFKGENYQKELNQCLSLEEINSIMTFIKELGSLGQFQLLFPSTTPGIQSLMHEFYDVANPVGNPGSVLTQYWSLLNVFEQFQFMNKKTQPHPLEWNSFTEDKNIEKPQVPFDAIENKKAAVPQIKNENKEIHCSDDENTPCHIKQIFTHPHLELNPDFHPKIKDYYCEVPFDVVTVTIGVETPKCLCKVHLYEQAGPSFASYPLGLGMNKISIFVVDESPAHGETLITYKLTIYREDRPSLPLFEAFTACGFVQDCGLLIHPEETCGLQPISSDYIEAILQSELKRCPSGDMKGQWIVPCLSCSDNRTCDWREITWQPHNCQYGVLTKPQLQQCLGGRKLGVDVQRVPRSRN

SEQ ID NO: 41604 - DNA, 609 bp, Artificial Sequence
  derived and/or modified sequence
atggtctgtcgcccagtgttcccttgtcgtcggcgattttgcccccgacccttcttggtgggcttagtggtggcaatctgtctcttctaccagactctgaccctccgagggtcgaggaagctcacagccgctgcccctggggctgtcccacacacatccactgaaacccaggcaagcagatgcaagaaaggattctctcaggacaaacagtgcttccttctctctggtaatgcccaggaaaccagaaaggtcaaagaatcaatggagacacactttggcagccatggccgaagggccatactctacaggcctcctttctacagcaaaacagagcttcagctacaccagcacattctgactcaacatggctatacggttgtcatcgctgaagaaaggctcaatgctggcctagggccggggctactagaacaaggtgatctgggctcttgggatctgctcatttgcctgtcttctaagaaagcagaaggaacaccctgtatatccaaggaagtcatgtgccagttaggtttacatcaaaagcagctcaggcggcgggaggagcggcagcggccaggcagcccagcttcgcgaaggctctcggtacgatga

SEQ ID NO: 41605 - DNA, 2501 bp, Artificial Sequence
  derived and/or modified sequence
ggccaagtgaagctgaactggtcatggtctgtcgcccagtgttcccttgtcgtcggcgattttgcccccgacccttcttggtgggcttagtggtggcaatctgtctcttctaccagactctgaccctccgagggtcgaggaagctcacagccgctgcccctggggctgtcccacacacatccactgaaacccaggcaagcagatgcaagaaaggattctctcaggacaaacagtgcttccttctctctggtaatgcccaggaaaccagaaaggtcaaagaatcaatggagacacactttggcagccatggccgaagggccatactctacaggcctcctttctacagcaaaacagagcttcagctacaccagcacattctgactcaacatggctatacggttgtcatcgctgaagaaaggctcaatgctggcctagggccggggctactagaacaaggtgatctgggctcttgggatctgctcatttgcctgtcttctaagaaagcagaaggaacaccctgtatatccaaggaagtcatgtgccagttaggtttacatcaaaaggcaaacagattaccagaaatacagcagccactttgcagaaaggaaggattatgtcaaatagttagaagattcccagaactgcaacttccagtgagtccctctgtgtgtctggatcagggaatgcaattaaagccgagtacttcgagtcaccttttaaaaacagtgaagccacgtgtgtggaaaccaggggactggagtcgtgaacagctgaatgaaacgacagtccttgctccacatgaaacaatctttcgagccgaagatctatctgtgattcttaaagcgtatgtgttggtgacgtccttaacccctttgcgtgcattcattcattcgacgggcacagtttggaatccaccaaagaaaaaacgcttcactgtcaagctgcaaacattttttgagacattcctgagagccagttcacctcaacaggcttttgacattatgaaggaagcaattggcaaactactgctagcggctgaagtattcagtgaaacatctactctgggaccaaagaccttccatagatgcagattctgctttcaacttctaacttttgatattggttatggcagtttcatgtaccctgtagtgctccaggtacacgagcatttaaattttcaagattatgataatatggattttgaggaccaaaatacagaagaattccttttaaatgacactttcaattttctcttccctaatgaatcatcactttccatattttctgagatatttcagagactttatagatcagatgttttcaagggtgaaaactatcaaaaggaactaaatcagtgtctgtccttagaagaaattaactcaattatgactttcataaaggaacttggaagtctgggacaattccaactgctcttcccatctactactcctgggattcagtcactgatgcatgaattttatgatgtggcaaatcctgtgggaaatcctggctcagtcctgacccaatactggtctcttttaaatgtatttgaacaatttcagttcatgaataaaaagacacagccacatccactggaatggaattctttcacagaagataagaacattgaaaaaccacaagtgccatttgatgcaatagaaaataaaaaagctgcagttccacaaattaaaaatgaaaataaagaaatacattgcagtgatgatgaaaacacaccatgtcatatcaagcagatcttcacacatccacatttggaactaaatcctgactttcatccaaagatcaaagattattactgtgaagtcccatttgatgtggtaacagtgacaattggagtggaaactcctaagtgtctgtgcaaggtgcacctgtacgagcaggcagggccaagctttgccagctaccctctgggcttaggaatgaacaaaatctcaatatttgttgtggatgaatctccagcacacggtgagactctgatcacgtacaaactcaccatctatagagaagaccgcccaagtctgcccttgtttgaggccttcacagcatgtggttttgtgcaggattgtggtttgctgattcatccagaggaaacctgtgggttacagcctatttcttctgactacattgaagccattttacagtctgaactaaaaagatgtccatctggggacatgaaaggccagtggattgtgccttgccttagttgttcggacaacaggacgtgtgactggagagaaataacctggcagccccacaactgccaatatggtgtcctaactaagcctcaactccagcagtgcctgggaggaaggaagttgggtgtcgatgtccagagagttcctagaagccgtaattgaagacacaatccagtcatcctgggaccctaaatgacctccctgccccacccctgcacataaacctgacttgaatcacctggactatttttctgagagagtaataaactttaattgggtttgacctat

SEQ ID NO: 41606 - DNA, 609 bp, Artificial Sequence
  derived and/or modified sequence
atggtgtgcagacccgtgttcccctgcagaagaagattctgccccagacccttcctggtgggcctggtggtggccatctgcctgttctaccagaccctgaccctgagaggcagcagaaagctgaccgccgccgcccccggcgccgtgccccacaccagcaccgagacccaggccagcagatgcaagaagggcttcagccaggacaagcagtgcttcctgctgagcggcaacgcccaggagaccagaaaggtgaaggagagcatggagacccacttcggcagccacggcagaagagccatcctgtacagaccccccttctacagcaagaccgagctgcagctgcaccagcacatcctgacccagcacggctacaccgtggtgatcgccgaggagagactgaacgccggcctgggccccggcctgctggagcagggcgacctgggcagctgggacctgctgatctgcctgagcagcaagaaggccgagggcaccccctgcatcagcaaggaggtgatgtgccagctgggcctgcaccagaagcagctgagaagaagagaggagagacagagacccggcagccccgccagcagaagactgagcgtgagatag

SEQ ID NO: 41607 - DNA, 2352 bp, Artificial Sequence
  derived and/or modified sequence
atggtgtgcagacccgtgttcccctgcagaagaagattctgccccagacccttcctggtgggcctggtggtggccatctgcctgttctaccagaccctgaccctgagaggcagcagaaagctgaccgccgccgcccccggcgccgtgccccacaccagcaccgagacccaggccagcagatgcaagaagggcttcagccaggacaagcagtgcttcctgctgagcggcaacgcccaggagaccagaaaggtgaaggagagcatggagacccacttcggcagccacggcagaagagccatcctgtacagaccccccttctacagcaagaccgagctgcagctgcaccagcacatcctgacccagcacggctacaccgtggtgatcgccgaggagagactgaacgccggcctgggccccggcctgctggagcagggcgacctgggcagctgggacctgctgatctgcctgagcagcaagaaggccgagggcaccccctgcatcagcaaggaggtgatgtgccagctgggcctgcaccagaaggccaacagactgcccgagatccagcagcccctgtgcagaaaggagggcctgtgccagatcgtgagaagattccccgagctgcagctgcccgtgagccccagcgtgtgcctggaccagggcatgcagctgaagcccagcaccagcagccacctgctgaagaccgtgaagcccagagtgtggaagcccggcgactggagcagagagcagctgaacgagaccaccgtgctggccccccacgagaccatcttcagagccgaggacctgagcgtgatcctgaaggcctacgtgctggtgaccagcctgacccccctgagagccttcatccacagcaccggcaccgtgtggaacccccccaagaagaagagattcaccgtgaagctgcagaccttcttcgagaccttcctgagagccagcagcccccagcaggccttcgacatcatgaaggaggccatcggcaagctgctgctggccgccgaggtgttcagcgagaccagcaccctgggccccaagaccttccacagatgcagattctgcttccagctgctgaccttcgacatcggctacggcagcttcatgtaccccgtggtgctgcaggtgcacgagcacctgaacttccaggactacgacaacatggacttcgaggaccagaacaccgaggagttcctgctgaacgacaccttcaacttcctgttccccaacgagagcagcctgagcatcttcagcgagatcttccagagactgtacagaagcgacgtgttcaagggcgagaactaccagaaggagctgaaccagtgcctgagcctggaggagatcaacagcatcatgaccttcatcaaggagctgggcagcctgggccagttccagctgctgttccccagcaccacccccggcatccagagcctgatgcacgagttctacgacgtggccaaccccgtgggcaaccccggcagcgtgctgacccagtactggagcctgctgaacgtgttcgagcagttccagttcatgaacaagaagacccagccccaccccctggagtggaacagcttcaccgaggacaagaacatcgagaagccccaggtgcccttcgacgccatcgagaacaagaaggccgccgtgccccagatcaagaacgagaacaaggagatccactgcagcgacgacgagaacaccccctgccacatcaagcagatcttcacccacccccacctggagctgaaccccgacttccaccccaagatcaaggactactactgcgaggtgcccttcgacgtggtgaccgtgaccatcggcgtggagacccccaagtgcctgtgcaaggtgcacctgtacgagcaggccggccccagcttcgccagctaccccctgggcctgggcatgaacaagatcagcatcttcgtggtggacgagagccccgcccacggcgagaccctgatcacctacaagctgaccatctacagagaggacagacccagcctgcccctgttcgaggccttcaccgcctgcggcttcgtgcaggactgcggcctgctgatccaccccgaggagacctgcggcctgcagcccatcagcagcgactacatcgaggccatcctgcagagcgagctgaagagatgccccagcggcgacatgaagggccagtggatcgtgccctgcctgagctgcagcgacaacagaacctgcgactggagagagatcacctggcagccccacaactgccagtacggcgtgctgaccaagccccagctgcagcagtgcctgggcggcagaaagctgggcgtggacgtgcagagagtgcccagaagcagaaactag

SEQ ID NO: 41608 - DNA, 609 bp, Artificial Sequence
  derived and/or modified sequence
atggtgtgcagaccagtctttccctgtagacgccgtttctgtcctcgcccatttctggtgggcctcgtcgtggccatctgcttattctaccagacccttacactcagaggtagccgtaagttgaccgctgctgcccccggagcggtccctcacacatccactgaaacgcaggccagccgatgcaagaaagggttttcacaagacaagcagtgtttcttgctcagtgggaacgcacaggaaacccgaaaggttaaggagtctatggaaacccattttggttcgcatggacgtagggccatcctgtacaggccacctttctactctaagaccgaactgcaattacatcaacacatactcacacagcatggatacacagtggtaattgctgaggagaggttgaatgcaggactcgggccgggattgcttgagcagggggacctgggcagctgggacttactaatttgcctatccagtaagaaggcggaagggaccccatgtataagtaaggaggtgatgtgccagttgggactacatcaaaagcagctgcgaaggagagaggagcgacagcggccaggctctcctgcaagtaggagactctccgtccgctag

SEQ ID NO: 41609 - DNA, 2352 bp, Artificial Sequence
  derived and/or modified sequence
atggtctgtcggcctgtctttccttgtaggagacgattctgccccagacctttcctggtcgggctagtggtggctatctgccttttttaccagactctgactttgaggggctcccgcaagctgactgccgcagcacccggcgccgtgccacatacaagcaccgagactcaggcctccaggtgtaagaaggggttttctcaagataagcagtgttttctcctgtcaggtaatgcccaggagactcggaaagtgaaagaaagcatggaaacccacttcggatcccacggacggcgggctatactgtatcgacctcccttctattccaaaactgaactgcaattgcatcagcacatattgacacaacatgggtacacagtagtcattgctgaggagaggttaaatgctgggctcggaccaggcctgttagaacagggcgatttaggaagctgggacctgttgatttgtttgtcctccaaaaaagccgaggggacgccatgcatctccaaggaagtcatgtgccagctggggctgcatcagaaggctaatcgcctcccggagatccagcagcctctttgtcgcaaagaaggcttatgtcaaatagttcggagatttccagagctgcagttacccgtgtctccctccgtgtgcctggatcaagggatgcagctgaagccctcgacaagttctcatctgttgaaaaccgttaagccccgcgtctggaagcccggcgattggagtcgcgagcagcttaacgaaaccactgtgttagcgccacatgagacgatcttcagagccgaagacttgtccgtgattcttaaggcctatgttcttgttacctccttgacgccattgcgagcgttcattcattctaccggcactgtctggaatccacctaagaagaaacgattcaccgtaaagttacagacatttttcgagaccttcctaagggctagcagtccccagcaggcttttgatatcatgaaagaagcaattggcaagctgctgctggcggccgaagtcttcagcgagacgagcaccctgggcccgaagactttccaccgctgcagattttgtttccagctgctaactttcgacattgggtacgggagcttcatgtaccccgtcgtgctgcaggtccacgaacacctgaatttccaggattatgataacatggatttcgaagatcagaatactgaagaatttcttctaaatgatacctttaactttttgtttcccaatgaatcttctctgtccattttcagcgagatcttccagcgtctatataggagcgacgtattcaagggagaaaactatcagaaagaattgaatcagtgcttaagtttagaggaaatcaatagtatcatgacatttatcaaggaattaggatctctcggtcaatttcagcttctctttccctccactacaccaggaatacagagtctgatgcacgaattctacgacgtggccaacccagtcggcaatcctggctctgtgcttacacagtattggagcctgctcaatgtgttcgaacagtttcagttcatgaataagaagacccagccacatcccttagagtggaacagctttacagaggataaaaacatagaaaaacctcaggtaccttttgacgctattgagaataagaaagcggccgtgccgcaaatcaagaacgaaaacaaagaaattcactgcagcgacgacgaaaataccccctgccatataaagcaaatatttacccatccacacttggagcttaaccccgactttcaccctaaaattaaagactattactgtgaggtgcctttcgacgtagtgaccgtgacaattggcgtggagacaccaaagtgtctgtgtaaggtgcacctgtatgagcaggccggcccctccttcgcctcctatcccctgggattggggatgaataagattagtatttttgttgtggacgaatctccagctcatggcgagacattgatcacttacaaactgaccatctacagagaggaccggccgagcctgccgctcttcgaggccttcacagcatgcggttttgtacaggactgcggcctcctcatccacccagaagagacgtgcggccttcagcccataagtagcgactacattgaggctattttgcagagcgagctgaagcgatgcccaagcggggacatgaagggccagtggatagtaccttgcctaagctgcagcgataacaggacctgcgattggagagagattacctggcaaccccataattgtcaatacggtgtgctcactaagccacagctccagcagtgtctcggagggaggaagcttggggtggacgtacagcgagtcccacgatcacggaactag

SEQ ID NO: 41610 - DNA, 609 bp, Artificial Sequence
  derived and/or modified sequence
atggtgtgcaggcctgtgttcccctgcagaagacgcttctgcccccggcccttcctggtgggcctggtggtggccatctgcctcttctaccagaccctgaccctgcggggcagcaggaagctgacagctgctgcccctggagctgtgccccacaccagcacagagacccaggccagccgctgcaagaagggcttcagccaggacaagcagtgcttcctgctgtctggaaatgcccaggagaccaggaaggtgaaggagagcatggagacccacttcggcagccatggaagaagagccatcctgtaccggccccccttctacagcaagacagagctgcagctgcaccagcacatcctgacccagcacggctacacagtggtgattgctgaggagcggctgaatgccggcctgggccctggcctgctggagcagggcgacctgggctcctgggacctgctgatctgcctgagcagcaagaaggccgagggcaccccctgcatcagcaaggaggtgatgtgccagctgggcctgcaccagaagcagctgcggcggcgggaggagcggcagaggcctggcagccctgccagccggcggctgtctgtgaggtag

SEQ ID NO: 41611 - DNA, 2352 bp, Artificial Sequence
  derived and/or modified sequence
atggtgtgcaggcctgtgttcccctgcagaagacgcttctgcccccggcccttcctggtgggcctggtggtggccatctgcctcttctaccagaccctgaccctgcggggcagcaggaagctgacagctgctgcccctggagctgtgccccacaccagcacagagacccaggccagccgctgcaagaagggcttcagccaggacaagcagtgcttcctgctgtctggaaatgcccaggagaccaggaaggtgaaggagagcatggagacccacttcggcagccatggaagaagagccatcctgtaccggccccccttctacagcaagacagagctgcagctgcaccagcacatcctgacccagcacggctacacagtggtgattgctgaggagcggctgaatgccggcctgggccctggcctgctggagcagggcgacctgggctcctgggacctgctgatctgcctgagcagcaagaaggccgagggcaccccctgcatcagcaaggaggtgatgtgccagctgggcctgcaccagaaggccaaccggctgcctgagatccagcagcccctgtgcaggaaggagggcctgtgccagatcgtgcggcgcttccctgagctgcagctgcctgtgagccccagcgtgtgcctggaccagggcatgcagctgaagcccagcaccagcagccacctgctgaagacagtgaagccccgggtgtggaagccaggggactggagccgggagcagctgaatgagaccaccgtgctggcccctcatgagaccatcttccgggcagaggacctgagcgtcatcctgaaggcctacgtgctggtgaccagcctgacccccctgcgggccttcatccacagcactggaacagtgtggaacccccccaagaagaagcgcttcaccgtgaagctgcagaccttctttgagaccttcctgcgggccagcagcccccagcaggcctttgacatcatgaaggaggccatcggcaagctgctgctggccgctgaggtgttcagcgagaccagcaccctgggccccaagaccttccaccgctgccgcttctgcttccagctgctgacctttgacatcggctacggcagcttcatgtaccctgtggtgctgcaggtgcatgagcacctgaacttccaggactatgacaacatggactttgaggaccagaacacagaggagttcctgctgaatgacaccttcaacttcctgttccccaatgaaagcagcctgagcatcttcagcgagatcttccagaggctgtacagaagtgatgtgttcaagggggagaactaccagaaggagctgaaccagtgcctgagcctggaggagatcaacagcatcatgaccttcatcaaggagctgggcagcctgggccagttccagctgctcttccccagcaccaccccaggcatccagagcctgatgcatgagttctatgatgtggccaaccctgtgggcaaccctggctctgtgctgacccagtactggagcctgctgaatgtgtttgagcagttccagttcatgaacaagaagacccagccccaccccctggagtggaacagcttcacagaggacaagaacatcgagaagccccaggtgccctttgatgccatcgagaacaagaaggctgctgtgccccagatcaagaatgaaaacaaggagatccactgcagtgatgatgagaacaccccctgccacatcaagcagatcttcacccacccccacctggagctgaacccagacttccaccccaagatcaaggactactactgtgaggtgccctttgatgtggtgacagtgaccatcggcgtggagacccccaagtgcctgtgcaaggtgcacctgtatgagcaggccggccccagctttgccagctaccccctgggcctgggcatgaacaagatcagcatctttgtggtggatgagagccctgcccatggagagaccctcatcacctacaagctgaccatctacagagaagatcggcccagcctgcccctgtttgaggccttcaccgcctgtggctttgtgcaggactgtggcctgctgatccaccctgaggagacctgtggcctgcagcccatcagcagtgactacatcgaggccatcctgcagagcgagctgaagcgctgccccagcggggacatgaagggccagtggatcgtgccctgcctgagctgcagcgacaacagaacctgtgactggagggagatcacctggcagccccacaactgccagtatggagtgctgaccaagccccagctgcagcagtgcctgggcggcaggaagctgggcgtggatgtgcagagggtgcccaggagcaggaactag

SEQ ID NO: 41612 - DNA, 609 bp, Artificial Sequence
  derived and/or modified sequence
atggtgtgccggcccgtgttcccctgccggcggcggttctgcccccgccctttcctggtgggtctcgttgtcgcaatttgcctgttttaccagactctcacactgaggggatctaggaaactgacagctgctgctcctggggcagtgccacacacttcaacagaaacacaagcttccagatgcaagaaggggttctcacaagacaaacagtgcttcttgctgtctggcaacgctcaagagacacggaaggtgaaagaaagcatggagacacattttggctcccatggaaggcgtgctatcctgtatcggccgccattctatagtaagactgaacttcagttacaccagcacattctgactcagcatggctacacagttgtgatagcagaagaacgattaaacgcaggattgggccccgggctgctggaacagggcgatctaggttcttgggatttgcttatctgcctatcttcaaagaaggctgagggtactccctgcatttccaaggaagtcatgtgccaactgggcctccaccaaaaacagctccgtcgccgcgaggagcggcagagacctggttcacccgcttcccgcagactgtctgtgcggtag

SEQ ID NO: 41613 - DNA, 2352 bp, Artificial Sequence
  derived and/or modified sequence
atggtgtgccggcccgtgttcccctgccggcggcggttctgcccccggcccttcctcgtggggctcgtcgtggctatttgcttgttttaccagacattgaccctgcgggggtctaggaaacttacagcagctgcaccaggagcggtgccacacacatcaacagagacgcaggccagtagatgcaaaaaggggttcagccaggacaagcagtgctttctgctaagtggcaacgcccaggaaacacgcaaggtgaaagaaagtatggagactcacttcgggtcacacggcagaagagccatcttgtatagacccccattttactcgaagacagagctccagcttcaccaacacatacttacgcaacatggttacaccgtggtgatcgccgaggaacgactaaacgccggcctgggaccaggcctgctggagcaaggagatctcggttcttgggacctactaatctgcctttcctccaaaaaagccgagggtactccctgcatctctaaggaggtgatgtgtcagctcggactgcaccaaaaggctaacagactgccagaaattcaacagcctctgtgcaggaaggaaggactgtgtcagattgtgagaagattcccagaactgcagctccctgtgtcaccatccgtgtgcctggatcagggcatgcagttgaagccatccacaagtagccacttgctgaagacagtgaagccccgagtgtggaaacccggagactggtcccgcgagcagctcaatgagacaaccgtgctggcacctcatgaaaccatattcagggccgaagatctgtctgtgatactgaaagcatatgtgctcgtaactagcctcacacccctgagggcattcattcactcaacaggcactgtctggaatccacccaagaagaagcgattcaccgtaaaacttcaaacgttctttgaaacattcttaagagcatctagtccgcagcaggccttcgatataatgaaggaggcgatagggaagctgctgcttgctgccgaagtattctcagagactagtaccctcgggcccaagactttccaccggtgtaggttttgttttcagctgctgacattcgatataggatacgggagttttatgtatcccgttgtcctgcaagtgcacgaacatctcaacttccaggattacgacaacatggactttgaggatcagaacactgaagagttcctgctgaacgacacgtttaattttctgttccctaacgagtcttcgctcagcatattttccgaaatcttccagcgactgtatagaagcgacgtctttaaaggtgagaactaccagaaggagttgaatcagtgtctgtccctcgaagaaatcaactccatcatgacctttataaaggaattgggctccctggggcagttccagctgctgttcccatccacaacgccaggaatacagtccctgatgcacgaattctatgacgtggcaaatccagtcggcaacccaggttcagtcctcacccaatattggtcactgttgaatgtttttgaacagttccaatttatgaataagaaaactcaaccacatccgcttgagtggaacagtttcaccgaggacaaaaacatcgaaaagccgcaagttcccttcgacgccatcgaaaacaaaaaagccgccgtgccccaaataaaaaatgagaacaaggaaattcactgctctgacgatgaaaataccccttgccatataaagcaaattttcacccatccacatctggaactgaatccagattttcaccccaagatcaaggattattattgcgaggtgcccttcgacgtggtgaccgtgaccattggtgtagaaactccaaagtgcttgtgcaaagttcacctttacgaacaggccggtccgagtttcgcttcatacccccttggactgggcatgaacaaaatttcaatattcgttgtcgacgagagcccggctcacggggagacattgataacctataagcttacaatctatcgtgaggaccggccttcattgccgctatttgaagcttttaccgcttgcggattcgtgcaggactgcggcctgctgattcaccccgaagagacttgcgggttgcagcctatctcctcggactacatcgaagccattctgcaaagcgagcttaaaagatgtccatcaggcgatatgaaaggacagtggattgttccatgcctgtcttgcagcgataatcgcacatgcgattggagagaaatcacctggcagcctcataactgtcagtatggtgtgctgacaaaaccacagctgcagcagtgtttaggtggacgcaagttgggcgtagatgtgcagagggtgcctagatcacgcaactag

SEQ ID NO: 41614 - DNA, 609 bp, Artificial Sequence
  derived and/or modified sequence
atggtttgcagacccgtctttccatgccgtagaagattctgtcctcgcccattcctggtcggcctcgtggtggccatttgcctgttttaccaaactctgaccctgcggggtagccggaaactgacagccgctgcgcctggcgcagttccccatacaagcaccgaaacacaggcatcccgatgcaagaaaggtttctctcaggataagcagtgcttcctgctatcaggaaacgcccaagaaactagaaaggttaaggaatctatggagacacacttcggcagtcacggcaggagagctatcctgtacagaccgccattctattcaaaaacagagctacagcttcaccagcacatcctcacacagcatggttatacagtcgtaatcgcagaggagagactgaacgctgggttgggccctggattacttgagcagggcgatttgggtagttgggatcttctgatctgcctaagctctaaaaaagccgagggcactccctgcatctctaaagaagtgatgtgccagctgggccttcaccagaagcaactacggagacgggaggagagacaacgtccaggttcccccgctagtagacgcctgtctgtgagatag

SEQ ID NO: 41615 - DNA, 2352 bp, Artificial Sequence
  derived and/or modified sequence
atggtgtgtaggcccgtgttcccctgtaggaggagattttgccccaggccgttcctggtgggtctcgtggtggcaatctgccttttttatcagacactgacactccgagggtcgcgcaaacttacagctgctgctcctggcgctgttcctcatacaagcaccgaaacccaggcgtctcgctgcaagaagggatttagccaggacaaacagtgctttctgctctccgggaacgcacaagagactcgcaaggtgaaggagagcatggaaacacacttcggtagtcatgggcgaagggccatcctgtatcggcctccattctactcaaaaacagagctccaactccaccagcatattttaacccagcatgggtatacagtagttatcgccgaggaacggcttaacgcagggctcgggccaggcttactcgagcagggcgatctgggctcctgggaccttttgatatgcttatcatcaaaaaaggcggaaggcacaccttgtatttccaaagaagtgatgtgccaacttggcctgcaccaaaaagccaaccgacttcctgaaatccagcaacccctgtgtcggaaagaaggcctctgtcagattgtcagaaggttccctgagcttcagctccccgtgtcaccctctgtctgcctcgatcagggcatgcagcttaaaccatccacttccagtcacctactgaagacagtcaaacctcgtgtctggaaacctggagactggagtagggagcagctgaacgagactaccgtcctggccccacacgagacaatcttcagggccgaagatctgtcagtgattttgaaggcctacgtgttggtcacttcactcactccactaagggcctttatccactctacgggaaccgtgtggaatcctccaaaaaagaagagattcactgtaaaacttcagacatttttcgaaaccttcctgagagcctcctccccacaacaagcatttgatattatgaaagaagctatcggaaagttgcttttggcggctgaggtttttagtgaaacgtccacccttggacccaaaacgtttcatcgatgccgtttttgtttccagctccttactttcgatataggttatggatcgtttatgtatcccgtagtgttacaagtgcatgagcaccttaatttccaggactatgataacatggattttgaagaccaaaataccgaggagtttctgctgaacgatacttttaattttctgtttcctaatgagagttccctgagcatatttagcgagatatttcagagactgtacagatcagatgtcttcaagggggaaaactaccagaaagagctgaaccaatgtttatccctggaggaaatcaattctattatgacgtttataaaggaattggggtccctggggcagttccagctgctgtttccttcaactactcccggaatccaaagcttaatgcacgaattttacgatgtggccaatccagttggtaaccctggtagcgtccttactcagtactggtcattactcaatgtctttgagcagttccagtttatgaacaagaagacccaaccacaccccctcgaatggaacagcttcacagaagataaaaatatagagaaaccacaggtcccattcgacgccatagagaataagaaggcagctgtcccccaaattaaaaatgagaacaaggagattcattgctcagatgatgaaaatactccatgccatatcaagcagatcttcacacacccacacttggagcttaaccctgatttccatcccaagattaaggactattactgcgaggttccctttgatgttgtgactgtgacaatcggcgtagaaactcctaaatgcctatgtaaagttcacctgtacgaacaggccggtccttcttttgcctcttacccgctgggactggggatgaacaaaatcagcatttttgtggttgacgagtccccagctcacggggagaccttaatcacctacaagctcacaatatatcgcgaagataggcccagtctacccttgttcgaagcttttactgcgtgcggctttgtgcaggattgcggcctgcttatccaccccgaagaaacgtgcggccttcagccgatttcctcggactatatcgaagcaattctccaaagcgaactgaagaggtgtccctctggtgacatgaagggccagtggatcgtgccttgcctgagctgcagcgacaaccgcacctgtgattggagagaaattacctggcaacctcacaattgtcaatatggagtgctcacaaagccacagctgcaacagtgccttgggggtcggaaactcggcgttgacgtgcagcgggttccccgatcccgcaattag

SEQ ID NO: 41616 - protein, 1332 aa, Artificial Sequence
  derived and/or modified sequence
MESRDPAQPMSPGEATQSGARPADRYGLLKHSREFLDFFWDIAKPEQETRLAATEKLLEYLRGRPKGSEMKYALKRLITGLGVGRETARPCYSLALAQLLQSFEDLPLCSILQQIQEKYDLHQVKKAMLRPALFANLFGVLALFQSGRLVKDQEALMKSVKLLQALAQYQNHLQEQPRKALVDILSEVSKATLQEILPEVLKADLNIILSSPEQLELFLLAQQKVPSKLKKLVGSVNLFSDENVPRLVNVLKMAASSVKKDRKLPAIALDLLRLALKEDKFPRFWKEVVEQGLLKMQFWPASYLCFRLLGAALPLLTKEQLHLVMQGDVIRHYGEHVCTAKLPKQFKFAPEMDDYVGTFLEGCQDDPERQLAVLVAFSSVTNQGLPVTPTFWRVVRFLSPPALQGYVAWLRAMFLQPDLDSLVDFSTNNQKKAQDSSLHMPERAVFRLRKWIIFRLVSIVDSLHLEMEEALTEQVARFCLFHSFFVTKKPTSQIPETKHPFSFPLENQAREAVSSAFFSLLQTLSTQFKQAPGQTQGGQPWTYHLVQFADLLLNHSHNVTTVTPFTAQQRQAWDRMLQTLKELEAHSAEARAAAFQHLLLLVGIHLLKSPAESCDLLGDIQTCIRKSLGEKPRRSRTKTIDPQEPPWVEVLVEILLALLAQPSHLMRQVARSVFGHICSHLTPRALQLILDVLNPETSEDENDRVVVTDDSDERRLKGAEDKSEEGEDNRSSESEEESEGEESEEEERDGDVDQGFREQLMTVLQAGKALGGEDSENEEELGDEAMMALDQSLASLFAEQKLRIQARRDEKNKLQKEKALRRDFQIRVLDLVEVLVTKQPENALVLELLEPLLSIIRRSLRSSSSKQEQDLLHKTARIFTHHLCRARRYCHDLGERAGALHAQVERLVQQAGRQPDSPTALYHFNASLYLLRVLKGNTAEGCVHETQEKQKAGTDPSHMPTGPQAASCLDLNLVTRVYSTALSSFLTKRNSPLTVPMFLSLFSRHPVLCQSLLPILVQHITGPVRPRHQACLLLQKTLSMREVRSCFEDPEWKQLMGQVLAKVTENLRVLGEAQTKAQHQQALSSLELLNVLFRTCKHEKLTLDLTVLLGVLQGQQQSLQQGAHSTGSSRLHDLYWQAMKTLGVQRPKLEKKDAKEIPSATQSPISKKRKKKGFLPETKKRKKRKSEDGTPAEDGTPAATGGSQPPSMGRKKRNRTKAKVPAQANGTPTTKSPAPGAPTRSPSTPAKSPKLQKKNQKPSQVNGAPGSPTEPAGQKQHQKALPKKGVLGKSPLSALARKKARLSLVIRSPSLLQSGAKKKAQTLRFTISSSKK

SEQ ID NO: 41617 - protein, 603 aa, Artificial Sequence
  derived and/or modified sequence
MESRDPAQPMSPGEATQSGARPADRYGLLKHSREFLDFFWDIAKPEQETRLAATEKLLEYLRGRPKGSEMKYALKRLITGLGVGRETARPCYSLALAQLLQSFEDLPLCSILQQIQEKYDLHQVKKAMLRPALFANLFGVLALFQSGRLVKDQEALMKSVKLLQALAQYQNHLQEQPRKALVDILSEVSKATLQEILPEVLKADLNIILSSPEQLELFLLAQQKVPSKLKKLVGSVNLFSDENVPRLVNVLKMAASSVKKDRKLPAIALDLLRLALKEDKFPRFWKEVVEQGLLKMQFWPASYLCFRLLGAALPLLTKEQLHLVMQGDVIRHYGEHVCTAKLPKQFKFAPEMDDYVGTFLEGCQDDPERQLAVLVAFSSVTNQGLPVTPTFWRVVRFLSPPALQGYVAWLRAMFLQPDLDSLVDFSTNNQKKAQDSSLHMPERAVFRLRKWIIFRLVSIVDSLHLEMEEALTEQVARFCLFHSFFVTKKPTSQIPETKPQERSEGPAQPPHAPGGPERPKLEKKDAKEIPSAEDGTPAATGGSQPPSMGRKKRNRTKAKVPAQANGTPTTKSPAPGAPTRSPSTPAKSPKLQKKAQVRKAGKP

SEQ ID NO: 41618 - DNA, 3999 bp, Artificial Sequence
  derived and/or modified sequence
atggagtcacgggatcctgcacagccaatgtctcccggagaagccactcagtcgggggctcgacccgcggatagatacggactcttgaagcactcccgggaatttctagacttcttctgggacattgcaaaaccagagcaagagactagactcgccgccaccgagaagctgctggagtacctcaggggtagaccgaagggatcagagatgaagtatgccttgaaacggttaatcacaggtctgggggtgggtcgcgagactgcaaggccatgttattcactggcactggcccagcttctacagtccttcgaggatttaccactctgttctatcctccagcagatccaggagaaatatgatcttcaccaggtaaaaaaggccatgctcagacctgccttatttgcaaatcttttcggagttttagcccttttccagtcagggcgcctggtgaaagaccaggaagctctcatgaagtctgtgaaactactccaggccttggcccagtaccagaaccacctgcaggagcagcctagaaaggccctggtcgatattcttagcgaggtgtcaaaagctacgctgcaggaaatcttgcccgaggtgctaaaggctgacctgaacataatcctgagcagccccgagcagctggagctcttcctgttggcccagcaaaaggtacccagcaaactgaaaaaactcgtggggagtgtgaatctcttttcagacgagaacgttcctcgtcttgtcaacgtcctgaagatggccgcctcttcagtaaagaaggatcgcaagctccctgctattgctttagacctgctccggctagccctcaaagaggacaagtttcctcgcttttggaaggaagtagttgagcaaggcttgctgaaaatgcagttctggccagccagctacctttgctttaggctgctcggagccgccctccctttgttgaccaaagaacagctgcacctcgttatgcagggcgacgtgattagacactacggcgagcacgtctgcaccgccaagctcccaaagcagtttaaattcgcgcctgaaatggatgactatgtgggcactttcctcgagggatgccaagatgacccagaacgccagctggctgtgctagtggcattcagtagtgtcacgaatcagggcttgcctgtcaccccaacattttggcgcgtggtgaggttcctctcccctcccgccctgcagggctacgtcgcctggctcagggctatgtttttacagcctgatctggactcattggtggatttctccacaaataaccagaaaaaggcccaagacagctctctccacatgcccgagagagccgtctttcgcctgcgcaagtggatcatattcaggcttgtgtctatcgtcgactcgcttcacctagaaatggaagaggcattgaccgaacaggtagcacggttctgtctctttcattcattcttcgttactaaaaagccaacctcccagattcccgagaccaagcacccgtttagcttcccactcgaaaaccaggctagggaggctgtctcctcggcattttttagtctcttgcagacactctccacacagttcaaacaggccccagggcagactcaaggggggcagccttggacctaccacttggtccagttcgccgatctgttgcttaaccattctcacaacgtgactaccgtcaccccttttaccgcccagcagcgacaggcatgggaccgcatgctccagactctcaaagagctcgaggcacacagtgccgaagccagggccgccgctttccaacacctattactcctggtcggaatccacctgctgaagagcccagctgagagctgcgatctgctgggtgacatccagacttgcataagaaaatcgctcggcgaaaagcctcggcgcagccggactaagacaatcgacccacaagagcctccctgggttgaagtcctggtggaaatcctgttggccctgctagcacagccaagccacttgatgagacaagtggcaaggtccgtgtttggccacatctgctctcacctaacacccagggcactccagttgatcctcgatgtgctcaaccccgagacgtcggaagatgaaaatgacagggtggtcgtgaccgatgacagcgatgagcgacggctcaagggggcggaagacaaatcagaggaaggtgaggacaatcggagtagcgagagcgaggaggagtctgagggcgaagagagcgaagaagaagaacgtgacggagatgttgaccaaggattccgtgagcaactcatgaccgtcttacaggccggcaaggcccttgggggagaggatagcgaaaacgaagaagaacttggggacgaggctatgatggccttggaccagagcctggctagtctgtttgctgaacagaaactgagaatacaggcccgtcgagacgaaaaaaataagctccagaaggagaaagcgcttcggcgcgactttcagatacgggtccttgatctcgtggaggttctggtcactaaacaacccgaaaatgcattagtgttagagctactggagcccctcttatctattatccgccgcagcctgcgtagtagttctagcaagcaagagcaggatctgcttcataaaactgccaggatattcacacaccatctgtgtcgcgctcgccgctactgccacgacttaggagaacgggccggagcactgcacgcacaggtcgaacggttggtacaacaagctggccgacaacccgattctcctactgccctctatcactttaatgcttcactgtacctgctgagggttctgaagggaaatactgctgagggatgcgtgcatgagactcaggaaaagcaaaaggctgggactgacccttcccatatgcccactgggcctcaggccgcctcctgcttggatcttaacttggtcacccgtgtgtatagcaccgctttgagcagctttcttactaagcggaacagcccactcacggtacctatgtttttgtctctgttctcacgtcacccagtgctctgccagtccctgttgcctatcctcgtccagcatatcacaggcccggtgcgacctcgccatcaagcgtgcctgttgctccagaagaccttaagtatgcgcgaggtgaggtcttgtttcgaggatcctgaatggaaacagctgatgggacaggtgctagccaaagtgacagagaatcttagagtcttgggggaggcccaaactaaggcccagcaccagcaagccctgtcgtcactggaacttctgaacgttctgtttcgcacttgtaagcatgaaaaattgacactcgacctaaccgtcttgcttggcgtattacaggggcagcagcaatcgctgcagcagggggctcatagtaccggcagctcccggctgcacgatttgtattggcaggcaatgaagactctcggtgtccagaggcccaagctcgagaaaaaagacgccaaggagatcccttctgccacccagtcgcctatatccaagaagcgcaagaagaaaggattccttcccgagacaaagaagcgtaagaagcggaagtccgaagacggcacgccagccgaggatggcacccccgctgctaccggcggcagtcagccacctagtatggggagaaagaagcgtaataggactaaagctaaggttcctgctcaagctaacggtacacctaccactaaaagtccagccccaggagcccctacacgaagcccatcgacacctgctaaatctccgaaactgcagaaaaagaatcagaagccgagccaagtcaatggagctcctggctcaccgacggagccggcaggccagaagcagcatcagaaggccttgcccaaaaagggtgtactgggcaagagtccgctttctgccctagctaggaagaaggctcgactctccctggtgatcaggtccccctccctcttgcaatcaggcgctaagaagaaggctcagacattgcgctttaccatcagctcctcaaagaaatag

SEQ ID NO: 41619 - DNA, 1812 bp, Artificial Sequence
  derived and/or modified sequence
atggagtctcgtgaccccgcgcagcccatgtctcctggggaagccacacaaagtggggccagacccgcagacagatatggcctgctaaagcacagccgtgaatttttagacttcttctgggacattgcaaagcccgaacaggaaacccgcttggcggctacggaaaagcttcttgaatacctgaggggtagaccgaaaggatccgaaatgaaatatgcactgaaacgactaataacaggtctgggggtcgggcgggagactgcacggccttgttactccctggccctggcacagcttcttcagagctttgaggatttaccactctgttccatcctccagcagatccaagaaaagtatgatctacatcaggttaagaaagcgatgctgcggccggcactgtttgcgaacctgtttggtgttctggcactcttccaaagcgggaggcttgtgaaggaccaggaggccctcatgaagtcagttaaactcttacaggcccttgcccagtaccaaaatcacctgcaagaacagccccggaaagctctggtcgatatcctctccgaagtatctaaggctactttacaggaaatcttgcctgaggtcctgaaggccgacctgaatataatcttgtcttcgccggaacagcttgagctcttcttgctggcccaacagaaggttccatcaaagctgaaaaagctggtaggaagcgtaaatctcttctcagatgaaaacgtgcctcgactggtgaatgtgctgaagatggcggcttcgtctgtgaaaaaagatcgaaaactgccggccatcgccttagatctactccggctggccttgaaggaagacaagttcccaagattttggaaagaggttgtagaacaggggttgctcaaaatgcaattctggcccgcaagctatctatgctttaggctgctcggcgccgcactgccactgcttacaaaagaacaactgcacctggttatgcagggggatgtgatacgtcattacggagaacacgtctgtaccgccaagttacctaagcagttcaaatttgcacccgagatggacgactacgtaggaacctttctcgaaggctgccaggatgaccctgagaggcagctcgccgtcctggttgctttcagtagtgtcacaaatcagggactcccggtaacccccaccttttggagagtggtgcgtttcctgtctccacccgccctgcagggatacgtggcctggcttcgagccatgttccttcaacctgacttagacagcctggtcgactttagtaccaataaccagaaaaaggcacaggactcctccctgcacatgccggagagggccgtgttcaggctccgcaaatggataatctttcggttggtttccatcgttgacagtttgcacctcgagatggaagaggccctcactgaacaagttgcacgcttctgcctatttcattcttttttcgtgaccaagaaaccaaccagccagattcccgagactaagccgcaggagagatctgaagggcctgctcagccaccacacgctcctggagggccagaaaggccaaaattagaaaaaaaagacgcaaaagagatcccaagcgctgaagacggcaccccagcagcaactggcgggtcacagcccccttccatgggtagaaaaaagcggaatcgcaccaaggctaaggtcccagcccaggcgaacggtactcccaccaccaagtccccggcacccggcgctcctactcggtcccccagtactccggctaaaagccccaagttgcagaagaaggctcaggtgcggaaagcaggaaagccctag

SEQ ID NO: 41620 - DNA, 3999 bp, Artificial Sequence
  derived and/or modified sequence
atggagagccgggaccctgcccagcccatgagccctggagaggccacccagagcggggcccggcctgctgacagatatggcctgctgaagcacagccgggagttcctggacttcttctgggacatcgccaagccagagcaggagacccggctggccgccacagagaagctgctggagtacctgcggggccggcccaagggcagcgagatgaagtatgccctgaagaggctcatcaccggcctgggcgtgggccgggagacagcccggccctgctacagcctggccctggcccagctgctgcagagctttgaggacctgcccctgtgcagcatcctgcagcagatccaggagaagtatgacctgcaccaggtgaagaaggccatgctgcggcctgccctgtttgccaacctgtttggagtgctggccctcttccagagcggccgcctggtgaaggaccaggaggccctgatgaagtctgtgaagctgctgcaggccctggcccagtaccagaaccacctgcaggagcagcccaggaaggccctggtggacatcctgtctgaggtgtccaaggccaccctgcaggagatcctgcctgaggtgctgaaggctgacctgaacatcatcctgagcagccctgagcagctggagctgttcctgctggcccagcagaaggtgcccagcaagctgaagaagctggtgggctctgtgaacctcttcagtgatgaaaatgtgccccggctggtgaatgtgctgaagatggccgccagctctgtgaagaaggacaggaagctgcctgccatcgccctggacctgctgcggctggccctgaaggaggacaagttcccccgcttctggaaggaggtggtggagcagggcctgctgaagatgcagttctggccagccagctacctgtgcttccggctgctgggcgccgccctgcccctgctgaccaaggagcagctgcacctggtgatgcagggagatgtgatccgccactatggagagcacgtgtgcacagccaagctgcccaagcagttcaagtttgcccctgagatggatgattatgtgggcaccttcctggagggctgccaggatgatcctgagcggcagctggccgtgctggtggccttcagctctgtgaccaaccagggcctgcctgtgacccccaccttctggagggtggtgcgcttcctgagccccccagccctgcagggctacgtggcctggctgcgggccatgttcctgcagcctgacctggacagcctggtggacttcagcaccaacaaccagaagaaggcccaggacagcagcctgcacatgcctgagagagctgtgttccggctgaggaagtggatcatcttccggctggtgtccatcgtggacagcctgcacctggagatggaggaggccctgacagagcaggtggcccgcttctgcctcttccacagcttctttgtgaccaagaagcccaccagccagatccctgagaccaagcaccccttctccttccccctggagaaccaggcccgggaggccgtgtcctctgccttcttcagcctgctgcagaccctgagcacccagttcaagcaggcccctggccagacccagggcggccagccctggacctaccacctggtgcagtttgctgacctgctgctgaaccacagccacaacgtgaccaccgtgacccccttcaccgcccagcagaggcaggcctgggacaggatgctgcagaccctgaaggagctggaggcccacagcgctgaggcccgggctgctgccttccagcacctgctgctgctggtgggcatccacctgctgaagagccctgctgagagctgtgacctgctgggggacatccagacctgcatcaggaagagcctgggggagaagcccaggaggagcaggaccaagaccatcgacccccaggagcccccctgggtggaggtgctggtggagatcctgctggccctgctggcccagcccagccacctgatgaggcaggtggcccggtctgtgtttggccacatctgcagccacctgaccccccgggccctgcagctgatcctggatgtgctgaaccctgagaccagtgaagatgaaaatgacagagtggtggtgacagatgacagtgatgagcggcggctgaagggagctgaggacaagtctgaggagggggaggacaacagaagcagcgagagcgaggaggagagcgagggggaggagagcgaggaggaggagagagatggagatgtggaccagggcttccgggagcagctgatgacagtgctgcaggccggcaaggccctgggcggagaagattctgaaaatgaggaggagctgggagatgaggccatgatggccctggaccagagcctggccagcctgtttgctgagcagaagctgcgcatccaggccaggagagatgagaagaacaagctgcagaaggagaaggccctgcggcgggacttccagatccgggtgctggacctggtggaggtgctggtgaccaagcagccagaaaatgccctggtgctggagctgctggagcccctgctgagcatcatcagaagaagcctgcggagcagcagcagcaagcaggagcaggacctgctgcacaagacagcccgcatcttcacccaccacctgtgccgggcccggcgctactgccacgacctgggggagagagctggggccctgcacgcccaggtggagcggctggtgcagcaggccggccggcagcctgacagccccacagccctgtaccacttcaatgccagcctgtacctgctgcgggtgctgaagggcaacacagctgagggctgtgtgcatgagacccaggagaagcagaaggccggcacagaccccagccacatgcccaccggcccccaggccgccagctgcctggacctgaacctggtgaccagggtgtacagcacagccctgagcagcttcctgaccaagaggaacagccccctgactgtgcccatgttcctgagcctcttcagccgccaccctgtgctgtgccagagcctgctgcccatcctggtgcagcacatcactggacctgtgcggcccaggcaccaggcctgcctgctgctgcagaagaccctgtccatgagggaggtgcgcagctgctttgaggaccctgagtggaagcagctgatgggccaggtgctggccaaggtgacagagaacctgcgggtgctgggggaggcccagaccaaggcccagcaccagcaggccctgagcagcctggagctgctgaatgtgctcttccgcacctgcaagcatgagaagctgaccctggacctgactgtgctgctgggcgtgctgcagggccagcagcagagcctgcagcagggcgcccacagcacaggcagcagccggctgcatgacctgtactggcaggccatgaagaccctgggcgtgcagaggcccaagctggagaagaaggatgccaaggagatccccagcgccacccagagccccatcagcaagaagaggaagaagaagggcttcctgcctgagaccaagaagaggaagaagaggaagtcagaagatggcaccccagcagaagatggcaccccagctgccaccggcggcagccagcccccatccatgggcaggaagaagaggaacagaaccaaggccaaggtgcctgcccaggccaacggcacccccaccaccaagagccctgcccctggggcccccaccaggagccccagcaccccagccaagagccccaagctgcagaagaagaaccagaagcccagccaggtgaatggagcccctggcagccccacagagcccgccggccagaagcagcaccagaaggccctgcccaagaagggcgtgctgggcaagagccccctgagcgccctggccaggaagaaggcccggctgagcctggtgatccgcagccccagcctgctgcagagcggggccaagaagaaggcccagaccctgcgcttcaccatcagcagcagcaagaagtag

SEQ ID NO: 41621 - DNA, 1812 bp, Artificial Sequence
  derived and/or modified sequence
atggagagccgggaccctgcccagcccatgagccctggagaggccacccagagcggggcccggcctgctgacagatatggcctgctgaagcacagccgggagttcctggacttcttctgggacatcgccaagccagagcaggagacccggctggccgccacagagaagctgctggagtacctgcggggccggcccaagggcagcgagatgaagtatgccctgaagaggctcatcaccggcctgggcgtgggccgggagacagcccggccctgctacagcctggccctggcccagctgctgcagagctttgaggacctgcccctgtgcagcatcctgcagcagatccaggagaagtatgacctgcaccaggtgaagaaggccatgctgcggcctgccctgtttgccaacctgtttggagtgctggccctcttccagagcggccgcctggtgaaggaccaggaggccctgatgaagtctgtgaagctgctgcaggccctggcccagtaccagaaccacctgcaggagcagcccaggaaggccctggtggacatcctgtctgaggtgtccaaggccaccctgcaggagatcctgcctgaggtgctgaaggctgacctgaacatcatcctgagcagccctgagcagctggagctgttcctgctggcccagcagaaggtgcccagcaagctgaagaagctggtgggctctgtgaacctcttcagtgatgaaaatgtgccccggctggtgaatgtgctgaagatggccgccagctctgtgaagaaggacaggaagctgcctgccatcgccctggacctgctgcggctggccctgaaggaggacaagttcccccgcttctggaaggaggtggtggagcagggcctgctgaagatgcagttctggccagccagctacctgtgcttccggctgctgggcgccgccctgcccctgctgaccaaggagcagctgcacctggtgatgcagggagatgtgatccgccactatggagagcacgtgtgcacagccaagctgcccaagcagttcaagtttgcccctgagatggatgattatgtgggcaccttcctggagggctgccaggatgatcctgagcggcagctggccgtgctggtggccttcagctctgtgaccaaccagggcctgcctgtgacccccaccttctggagggtggtgcgcttcctgagccccccagccctgcagggctacgtggcctggctgcgggccatgttcctgcagcctgacctggacagcctggtggacttcagcaccaacaaccagaagaaggcccaggacagcagcctgcacatgcctgagagagctgtgttccggctgaggaagtggatcatcttccggctggtgtccatcgtggacagcctgcacctggagatggaggaggccctgacagagcaggtggcccgcttctgcctcttccacagcttctttgtgaccaagaagcccaccagccagatccctgagaccaagccccaggagaggtctgagggccctgcccagccccctcatgcccctgggggccctgagcggcccaagctggagaagaaggatgccaaggagatccccagcgcagaagatggcaccccagctgccaccggcggcagccagcccccatccatgggcaggaagaagaggaacagaaccaaggccaaggtgcctgcccaggccaacggcacccccaccaccaagagccctgcccctggggcccccaccaggagccccagcaccccagccaagagccccaagctgcagaagaaggcccaggtgaggaaggccggcaagccctag

SEQ ID NO: 41622 - DNA, 4104 bp, Artificial Sequence
  derived and/or modified sequence
ctgacctggaagcggctggggccggagcacacgtgtttcgtgtttcggtgagtgtggcggagatggagagccgggatcccgcccagccgatgtcgcctggagaagcgacgcagagtggcgcccggcctgccgaccgctatggcctattgaagcacagtcgcgagttcttggacttcttctgggacattgcgaagcctgagcaggagacgcgacttgcggccacggagaagctgctggagtatctgcgtggcaggccgaaggggtccgagatgaaatatgccctgaagcgtctaatcacgggactcggggtcgggcgagaaacagcccggccctgctacagtttggccctggcacagctgttacagtcttttgaagacctccccttgtgcagcatcctgcagcagatacaagaaaaatatgacctgcatcaggtgaagaaggcaatgctgagacctgctctctttgcaaacctgtttggagtgctcgccctctttcagtcaggtcggctggtgaaggaccaggaggcactgatgaagtcggtgaagctgctgcaggccctggcccagtaccaaaaccacttgcaggagcagccccggaaggccctggtggacatcctctccgaggtctcgaaggccacattgcaggagatcctgccggaggtcctcaaagccgacttgaatataatactcagctcccctgaacagctagagctcttcctcctggcccagcagaaggtgccctccaagctcaagaagctggtgggatccgtgaacctattctcagatgagaatgtccccaggctggtgaatgtgctgaagatggccgcctcctctgtgaagaaggaccgcaagctgcccgccattgctctggacctgctccgcctggcactcaaggaagacaagttcccacggttctggaaggaggtggtggaacaagggctgctgaagatgcagttctggccagccagctacctgtgtttccgcctgctgggcgcggccctgcccctgctgaccaaggagcagctgcacctggtgatgcagggagacgtgatccgccattacggggagcacgtgtgcactgctaagctcccaaagcagttcaagtttgccccagagatggacgattacgtgggcaccttcctagaggggtgccaggatgaccctgagcggcagctggccgtgctagtggccttctcatctgtcaccaaccaaggcctccctgtcacgcctactttctggcgggtcgtgcggttcctgagccctccggccctgcagggctatgtggcctggctgcgggccatgtttctccagccagacctggactccttggttgacttcagcaccaacaaccagaagaaagcccaggattcatcgctccacatgcctgagcgagctgtgttccggctgaggaaatggatcatctttcgattggtgagcattgtggacagcctgcacctggagatggaggaggccttgactgagcaggtggccaggttttgtttgttccactcgttctttgtcacaaagaagcccacatcccagatccctgagacaaagcacccgttctccttccctttggaaaaccaggcccgagaggctgtcagcagtgccttcttcagtctgttgcagaccctcagcacgcagttcaagcaggcaccgggccagacccagggtgggcagccctggacctaccacctggtgcagttcgcagacctcctgttgaatcacagccacaacgtgaccaccgtgacacccttcactgcgcagcagcgccaggcctgggaccggatgctgcagactctgaaggagctggaggcccactccgcagaggccagggctgctgccttccagcaccttctgctcctcgtgggcatccacctcctcaagtcccctgcagagagctgtgacctgctgggtgacatccagacctgcatcaggaaaagtctgggagagaagccccgccggagccgcaccaagaccatcgacccccaggaacccccgtgggtagaggtgctggtggagatcttgctggccctgttggcccagcccagccacctcatgcgccaggtggcccggagcgtgtttggccacatctgctcccacctgaccccgcgtgccctgcagctaattctggatgtgctgaaccccgagaccagtgaggatgagaatgaccgtgtggtggtgacggacgattctgatgagcggcggctgaagggtgcagaggacaagagcgaggaaggtgaggacaacagaagctcagagagtgaagaggagagcgagggggaggagagcgaggaggaggagcgcgacggggacgtggatcagggcttccgggaacagctgatgaccgtgctgcaggctgggaaggcgctgggtggagaggacagtgagaacgaggaggagctgggggatgaggccatgatggccctggaccagagcctcgccagcctctttgccgagcagaagctgcgtatccaggcccggcgagacgagaagaacaagctgcagaaggagaaggctctgcggcgcgacttccagatccgggtgctggacctggtggaggtgctagtgaccaagcagcccgagaatgccctggtcctggagctgctggagccgctgctgagcatcatccggcgcagcctgcgcagcagcagctccaaacaggagcaggaccttctgcacaagacggcgcgcatcttcacgcaccacctgtgccgtgcccggcgctactgccacgacttgggtgagcgcgcaggggccctgcacgcccaggtggagcggttggtgcagcaggctggccgccagcccgactcccccaccgccctctaccacttcaacgcctctctctacctgctccgggtcttgaagggcaacactgctgagggctgcgtgcatgagacacaggagaagcagaaagctggcactgaccccagccacatgcccacgggcccgcaggctgccagctgcttggacttgaacctggtgacccgggtgtactcgacagcactgagctccttcctgaccaagcgcaacagccccctcacagttcccatgttcctcagcctcttctcccggcacccggtgctctgtcagagcctgctccccatcctggtccagcatatcacgggcccggtgcggccccgtcatcaggcctgcctgctgctccagaagaccctgtccatgcgggaggtgaggtcgtgctttgaggaccccgagtggaagcagctgatgggccaggtcctagcaaaggtcaccgagaacttgcgcgtgctgggggaggcgcagaccaaggcgcagcatcagcaggcactgtcctccctggagctgctcaacgttctcttcaggacctgcaaacatgagaagctgaccttggacctgacggtgctcctgggtgtgctgcaggggcaacagcagagcctacagcagggggcacactccaccggctccagccgcctgcacgacctctactggcaggccatgaaaaccctgggagtccagcgccccaagttggagaagaaggatgccaaggagatccccagtgccacccagagccccatcagtaagaagcggaagaaaaagggattcttgccagagacgaagaagcgcaagaaacgcaagtcagaggatggcacgccagcggaggatggcacacctgcagccaccggcgggagccagccccccagcatgggcaggaagaagaggaacaggacaaaggctaaggtcccagcccaggcaaacgggacgccaaccaccaagagtccagcccctggcgcccccacccggagccccagcacccctgccaaatccccaaaactgcagaagaaaaaccagaagccgtcccaggtgaatggagctcccgggtcccccacggaacctgcaggccaaaagcagcatcagaaggctcttcccaaaaagggggtcttgggcaaatcaccactgtccgcgctggcacggaaaaaggcaaggctgtctttggtcatcaggagtcccagcctgcttcagagtggggccaagaagaaagcacagactctgagattcacaatcagcagctctaaaaaataaaggagcagtttggcttccggaaggaagaggaggcaacactcgg

SEQ ID NO: 41623 - DNA, 1874 bp, Artificial Sequence
  derived and/or modified sequence
ctgacctggaagcggctggggccggagcacacgtgtttcgtgtttcggtgagtgtggcggagatggagagccgggatcccgcccagccgatgtcgcctggagaagcgacgcagagtggcgcccggcctgccgaccgctatggcctattgaagcacagtcgcgagttcttggacttcttctgggacattgcgaagcctgagcaggagacgcgacttgcggccacggagaagctgctggagtatctgcgtggcaggccgaaggggtccgagatgaaatatgccctgaagcgtctaatcacgggactcggggtcgggcgagaaacagcccggccctgctacagtttggccctggcacagctgttacagtcttttgaagacctccccttgtgcagcatcctgcagcagatacaagaaaaatatgacctgcatcaggtgaagaaggcaatgctgagacctgctctctttgcaaacctgtttggagtgctcgccctctttcagtcaggtcggctggtgaaggaccaggaggcactgatgaagtcggtgaagctgctgcaggccctggcccagtaccaaaaccacttgcaggagcagccccggaaggccctggtggacatcctctccgaggtctcgaaggccacattgcaggagatcctgccggaggtcctcaaagccgacttgaatataatactcagctcccctgaacagctagagctcttcctcctggcccagcagaaggtgccctccaagctcaagaagctggtgggatccgtgaacctattctcagatgagaatgtccccaggctggtgaatgtgctgaagatggccgcctcctctgtgaagaaggaccgcaagctgcccgccattgctctggacctgctccgcctggcactcaaggaagacaagttcccacggttctggaaggaggtggtggaacaagggctgctgaagatgcagttctggccagccagctacctgtgtttccgcctgctgggcgcggccctgcccctgctgaccaaggagcagctgcacctggtgatgcagggagacgtgatccgccattacggggagcacgtgtgcactgctaagctcccaaagcagttcaagtttgccccagagatggacgattacgtgggcaccttcctagaggggtgccaggatgaccctgagcggcagctggccgtgctagtggccttctcatctgtcaccaaccaaggcctccctgtcacgcctactttctggcgggtcgtgcggttcctgagccctccggccctgcagggctatgtggcctggctgcgggccatgtttctccagccagacctggactccttggttgacttcagcaccaacaaccagaagaaagcccaggattcatcgctccacatgcctgagcgagctgtgttccggctgaggaaatggatcatctttcgattggtgagcattgtggacagcctgcacctggagatggaggaggccttgactgagcaggtggccaggttttgtttgttccactcgttctttgtcacaaagaagcccacatcccagatccctgagacaaagccccaggagaggtccgaaggcccagcccagccacctcatgcgccaggtggcccggagcgccccaagttggagaagaaggatgccaaggagatccccagtgcggaggatggcacacctgcagccaccggcgggagccagccccccagcatgggcaggaagaagaggaacaggacaaaggctaaggtcccagcccaggcaaacgggacgccaaccaccaagagtccagcccctggcgcccccacccggagccccagcacccctgccaaatccccaaaactgcagaagaaagcacaggtgaggaaggcagggaagccctga

SEQ ID NO: 41624 - DNA, 3999 bp, Artificial Sequence
  derived and/or modified sequence
atggagagccgggaccccgcccagcccatgagccccggcgaggccacccagtccggcgcaagaccagccgatcgctatggtctactaaaacatagccgagaatttctcgacttcttctgggatattgcaaagcccgaacaggaaacacgcttggccgctaccgagaagctattagagtacctgcgcggccggccgaaaggatccgaaatgaagtacgcgcttaagcgcctgatcacaggattgggagttggacgggagaccgctaggccctgttactcccttgctctagcacagttgcttcaatccttcgaggacctcccactctgtagtatactgcaacagatccaggagaagtacgacctgcaccaggttaagaaagcgatgctaagacccgccctgtttgccaacttgttcggagtgctcgctctgttccaatccgggcggctggtgaaagatcaggaagcactgatgaagtcagttaagttgttgcaggccttagcccaataccagaaccatctgcaagagcaacctcgtaaagccttggtggatatcctcagcgaggtatcaaaagctaccttgcaggagatcctgccagaggtgctcaaggcggacttgaacattatcctttctagccccgagcagctggagctctttctgctggcacagcagaaggtgccatcgaagctgaaaaagctggtgggctcagtgaacctgttctccgacgagaacgttcctaggttagtgaacgtgctcaagatggccgccagcagcgtgaaaaaggatagaaagctgcctgccatcgctctggatctgctgcgtttagccctgaaagaggataagttcccccgtttttggaaggaagtcgtggagcaaggactgctcaagatgcagttctggccagctagttacctttgcttcaggctccttggtgctgctctgcctttactcaccaaggaacaactacacctggtcatgcagggcgacgtgattcgccactacggggaacacgtctgtaccgcgaagcttccaaagcagtttaagtttgctcctgagatggacgactatgtgggcacattcttggaggggtgccaggatgatcctgaacgacaactggccgtgcttgtggccttttcaagcgtgacaaatcagggccttccagttacgccgacgttctggcgcgttgtgcgatttctctcccctcccgctctgcagggctatgtggcctggttacgagcaatgtttttacaaccagacctggacagtttggtagatttctcaacgaacaaccaaaaaaaggcccaggactcaagtctccatatgcctgagcgcgccgtcttcaggcttcgcaagtggatcatctttagactggtgtctatcgtagacagcctccacctggagatggaggaagccctgacggagcaggtggccagattttgtctctttcattccttctttgtcaccaaaaagccaactagccagatacctgaaactaagcacccttttagctttccgctggaaaaccaggcccgggaggccgtgagctctgcattcttctcactcctccagactctgtccacccagttcaagcaggccccagggcagacccaggggggccaaccctggacgtatcatttggtccagttcgccgacctgttgctgaaccattcccacaatgtaactacagtgaccccattcactgcccagcagagacaggcgtgggatcggatgcttcagaccctcaaagagttagaagcccactcagcggaggctagggctgctgctttccaacatctgctcctactagtcggaatacatttgttaaagtcgccagcagagtcatgcgacctgttaggcgacatacagacctgtattagaaaaagcttaggggagaagccccgtaggagtcggacgaaaaccatcgatcctcaggagccgccctgggtagaggtgctcgtcgaaatattattggcgctcttggcacagcctagccacctaatgcggcaggtggctcgctcggtgtttggtcacatttgtagccacctgacccccagggcacttcagctgattctcgatgtgctgaatcctgaaacatcagaggatgagaatgatcgagtcgttgtgacagacgactccgatgaaagacgtctaaagggagccgaggacaaatccgaggagggagaggacaatcgttcttccgagtccgaggaggaatcggagggagaggagagtgaggaagaagaaagagacggcgatgttgaccagggctttcgagagcaacttatgacagtcctgcaagcaggcaaggccctggggggggaggacagtgaaaacgaggaggaactaggagatgaggccatgatggccctcgaccagtcactagctagtctattcgctgaacagaagttacgaattcaggcgagaagagacgaaaaaaacaagctccagaaggagaaggcactacggcgtgattttcagattcgagtccttgatctcgtcgaggtgttggtgactaagcagccggaaaacgccctggtgctggagcttctggaacctctgctctcaattatcaggcgctctctcaggtcgagtagcagcaaacaagagcaggatttgctgcacaagacggctaggatcttcactcaccatctctgtcgggcgcggagatattgccacgatcttggggaaagggcgggcgctctccacgcccaagtcgagcgcctggtccagcaggcaggacgtcagcctgattctcctactgccctttaccactttaacgccagcttgtacttactcagggtcctgaaaggtaacacagccgaagggtgtgtgcacgagacccaggaaaagcagaaagctggcaccgacccgagtcacatgcccacaggaccccaagctgcctcctgcctggacctcaacctggtgaccagggtctacagtaccgccctttcctcctttctgaccaagcggaattccccccttactgtaccaatgtttctctccttgttctctaggcaccctgtgctgtgtcagtccctgctgcccatactggtgcagcacatcaccgggccagtgagacctcgccaccaggcatgtctgttgctgcagaaaacattatcaatgcgcgaggtgcgtagctgtttcgaggaccctgaatggaaacagctgatgggccaggtcctggccaaggtcacagaaaacttacgtgtcctgggggaagcccaaaccaaggctcaacaccagcaggccctctcgtcacttgaacttctgaacgtattgtttagaacttgcaagcacgaaaagcttactttggacctaacagtgttgcttggtgtgttgcaaggacagcagcagtcactgcagcagggcgcacactcaaccgggtcttcccggctccatgacctgtattggcaggccatgaagacactgggggtacagcgtcctaagctggaaaagaaagatgccaaagagataccttcagcaactcagtctcccatctccaagaaaagaaaaaagaaaggattcctgcccgagaccaaaaaacgaaaaaaacgcaaaagtgaagatggaactcctgctgaagatgggactccggcagcaacgggaggcagtcaaccaccgagcatgggtcgcaaaaagagaaacaggaccaaggctaaggtgcctgctcaggccaacgggacccctactaccaaatcacctgccccaggggcccccacacgatcgccatccacccccgctaaatccccaaaattacagaaaaagaaccagaaaccttcacaagtaaacggtgcgcccggttctcccactgagcccgctggccagaagcagcaccaaaaagccctacccaagaaaggggtcctgggtaagagcccactaagcgcactagccagaaagaaggcacgtctgtctctggttatcagatcgccttcactgctccagtcgggagcaaagaagaaggctcagacccttcggttcaccatctccagcagtaaaaagtag

SEQ ID NO: 41625 - DNA, 1812 bp, Artificial Sequence
  derived and/or modified sequence
atggagagccgggaccccgcccagcccatgagccccggcgaggccactcagtctggcgcccggcccgctgaccgttatggcttgctaaaacatagtcgggaattcctggatttcttctgggatatcgccaaacctgaacaggagaccaggttagccgcaacggagaaactcctggaatacctgcgcggcaggccaaaggggtctgagatgaaatacgctctcaagcgactcatcaccggactgggggtggggcgcgagacggcccgaccctgttactccctcgccctggcgcagctgctccagtccttcgaagatctgcccctgtgtagtatactacagcaaattcaggagaagtatgacctgcatcaagtcaagaaagcaatgttgagaccagccctgtttgccaaccttttcggagtcctggccctattccagtctggacggctggtcaaggaccaggaggccctgatgaaatccgtaaagctcctgcaggctctggcacagtaccaaaaccacctccaagaacagcccagaaaagccctggttgatattcttagtgaggtgtccaaagcgactctacaggagattcttcccgaagtgctgaaggccgacctcaacatcatcctgtcctctccggagcaactagagcttttcctcttagcccagcagaaagtcccttccaagctgaaaaagctggtgggctcagtcaacctgttctcagacgagaatgtccctcgactggtaaacgtcttgaagatggcagccagtagcgtgaagaaagatcggaaattacctgcaattgccctggatctcctgcgactggccctgaaagaagacaaattccccagattctggaaggaagtggtggaacaaggccttctcaagatgcagttttggcctgcctcgtacctgtgcttccgtctgctgggcgcagccctcccgttgctcacaaaggagcagttacacttggtcatgcagggagacgtgatacggcactacggtgaacatgtgtgcaccgccaagctgcccaagcagtttaaatttgcgcccgagatggatgactacgtgggtacattcctggaaggctgccaggacgaccccgaaagacagcttgctgtgctggtggccttttctagcgttacgaatcagggcttaccagtgacgccaacattctggcgcgttgtgcggttcttaagtcctccagcactccaagggtatgtcgcctggctccgcgccatgtttcttcagcccgatcttgattccttggtggatttttccaccaacaaccagaagaaggcccaggatagcagtctccacatgccagaaagggctgtattccgtctgaggaagtggattatcttccgccttgtgtcaatagtggattcactgcacctcgagatggaggaagccttaaccgaacaggtggcacgcttctgcctgttccattcgttctttgtaaccaagaagcccacatcgcagattccagaaacaaagcctcaggagaggtccgaggggcccgcacaaccaccccacgcacccggagggccggagcggccaaaactagaaaagaaggatgcgaaggagatcccttcagccgaagatggcacccctgcagccacaggcggaagccagcctccgtctatgggtcggaaaaagagaaacagaaccaaggcaaaggtgccggcccaggcgaacgggacaccgaccaccaaatcaccagcgcctggggctcctaccagatccccatctacccccgccaagtcaccgaaacttcagaaaaaagcccaggttcgtaaagctggcaaaccctag

SEQ ID NO: 41626 - DNA, 3999 bp, Artificial Sequence
  derived and/or modified sequence
atggagtctagggaccctgcacagcccatgagccccggtgaagcgacacaaagtggcgctaggccagcagataggtatggtctgctgaaacatagcagagagttcctcgattttttctgggacatcgccaagccagagcaggagacgaggctggctgccacagagaaattactggagtacctgagaggcagacctaaaggctcagagatgaaatacgccctgaagaggctcatcactggactgggagtggggagagaaacggcccgaccatgctacagcctggctttggctcaactcttgcagtctttcgaggacttgcctctgtgctcgatcctacaacagatccaggagaagtacgacctgcaccaggtcaaaaaggccatgctgagaccagcattattcgccaatttattcggcgttctcgccctgttccagtcaggacgtttggtgaaggaccaggaggctttgatgaagtctgtaaaactactgcaggctctggcccagtatcagaaccacctccaggagcagcccagaaaggccctggtggacatcctgagcgaggtttccaaagccacccttcaggagattttaccagaagtgcttaaagctgatcttaatataattttgagttcacccgagcagctcgagctgttcctgctcgcacagcagaaggtgccctccaagctgaagaagctagttggcagcgtgaatcttttctcagacgagaacgttcctaggctcgtcaatgtgctgaagatggcagcaagctctgtaaagaaggatcggaaactcccagcaatcgccctggacctcttgaggctggcactaaaggaggacaagttcccgaggttttggaaggaggttgtggagcagggtttactgaaaatgcagttctggcccgcttcttatctgtgttttcggttgttgggtgcggcactcccattgttaaccaaggaacagctgcatctggttatgcaaggtgatgttatcagacactacggggaacacgtttgcacagccaagctgcccaagcagtttaaatttgctccagagatggacgactacgtggggacgttcctggagggctgtcaagacgaccctgagcgtcagctggccgtactagtcgcgttctcctctgtgactaaccaggggctgcccgttacaccaactttctggcgggtagtgcgctttctgtcgccaccagctctgcagggttacgtcgcctggctccgcgctatgttcctgcagcctgacctggacagcttagtggatttctccacgaacaaccagaagaaggctcaggattcctcccttcatatgccagagcgggcagtttttcggttgcgtaagtggatcatcttccgcttagtttctatcgtggactctctgcacctcgagatggaggaggccttaaccgagcaggtggcccgattttgcttgttccatagttttttcgtaaccaaaaaacctacttctcagatcccagaaacaaaacaccctttctcctttcccctcgaaaatcaagcccgagaagcagtgagcagcgcattcttctccctcttgcagactctaagtacgcagtttaaacaggcccctggccaaacgcaggggggtcagccctggacgtaccacctggtgcagtttgctgacctcctgctcaaccacagccataacgtaaccaccgtcacccccttcaccgcgcaacaacggcaggcgtgggaccgcatgctccagactttgaaggaactggaagcacactcagctgaggcccgtgcggctgcctttcagcatctgcttttactggtgggaatacacctgttaaagtcacccgcagagtcatgcgatcttcttggggacatccagacctgcattagaaaatcactcggagagaaacctcggaggtcccggaccaagactatagacccacaggaaccgccatgggtagaagtcctggttgagatcctgctggcactcttagcccaacctagtcacttgatgcgacaggtagcgagatcagtcttcggccacatctgttctcaccttacccccagggctctccagctgatcctggacgtgctcaatcctgaaacctccgaagatgagaacgatagagtcgtggtgactgacgacagcgacgaacgcagacttaaaggcgctgaagacaagtctgaagaaggcgaggataatcgctcttccgagtcagaggaagaatcggaaggcgaggagtcagaagaagaggaacgagacggtgacgtagaccaggggttcagagaacagcttatgacagtacttcaggctggcaaggccttggggggagaagacagtgagaacgaagaagagttgggcgatgaggctatgatggccctggaccagtcactcgcgagcctttttgctgagcaaaagctgcgaattcaggccaggcgggatgagaagaataaattgcaaaaggaaaaagcactgcggagggatttccagatccgtgtcctcgatctggtggaggtgttggtaacgaagcagccagaaaatgctctggttctagagcttctcgagccgctgctctcaatcatccggaggagtctgcgttctagcagctccaagcaagaacaggatctcttacacaagactgcccgaatctttacacaccacttatgccgcgcacggcgatattgtcatgacctgggtgagagagccggagcattgcacgcacaggtcgaacggttggttcagcaggcagggcgacagcccgactctcccactgctttatatcacttcaacgcctcactgtatttacttcgtgtgttaaaaggaaatactgccgagggatgcgtccacgagactcaggaaaaacagaaggcaggaacagatccaagccacatgccgaccggtccccaggccgcttcatgcctggacctgaacctcgtgacaagagtttattcaactgccctgtcatcattcctgacgaagcgcaatagtccactgaccgttccgatgtttctgagccttttcagtaggcacccagtcctatgtcagagtttactcccgattttagttcagcatattacaggtccagttcggcctagacaccaggcgtgcctgctgctccagaagactctttccatgcgcgaggtgagatcctgttttgaagacccagaatggaagcaattaatgggacaggttctcgctaaagtcaccgaaaatctcagggtgctgggcgaagcccagaccaaagcccagcatcagcaggcacttagcagtctggagctacttaatgttctgtttcgaacatgtaagcacgaaaagctaacgcttgacttgacggtgctgctgggagtgctgcaggggcagcagcagagcctgcagcagggagctcatagtacagggagcagtcgtctgcatgatctgtactggcaggccatgaaaactctgggtgtgcagagacccaagcttgagaagaaggacgcaaaggagatcccatcagctactcagagtcctatctccaaaaaacggaagaagaaggggttcctgccggaaacaaagaagcgcaaaaagaggaagagcgaggatgggactccagcagaagacggaaccccagccgcaacagggggttcacaacctccctctatggggaggaaaaaacggaaccggaccaaggcaaaagttcctgctcaggccaacggtacacctactactaagagtcctgctcctggcgcacctactcggagcccatcaaccccggctaaatcacccaagctgcaaaagaagaatcaaaaaccctcacaagtgaacggcgcacctggatcacccactgagcctgcagggcagaaacagcaccagaaagcattgccaaagaaaggtgtcctcggtaagagtccgctgagcgccttggctagaaagaaagctaggctctccttagtgatccgcagcccttcactgctgcagtctggtgccaagaagaaagcacaaaccttgagatttacaatttcttctagcaaaaagtag

SEQ ID NO: 41627 - DNA, 1812 bp, Artificial Sequence
  derived and/or modified sequence
atggaatcacgagatccggctcaacctatgtccccaggcgaagccacccagagcggggcaaggccagccgatcgctacggcctgctcaaacactccagagaatttcttgattttttctgggatatcgccaaaccagagcaggaaacaagactggccgctacagagaagttactggagtatcttcgagggagacccaaaggttccgagatgaagtacgccctgaaacgcttgatcacaggcctgggtgttggccgagagactgcacgcccatgctattcactggctctggcacaactgctgcagagcttcgaagacctgcccctgtgcagcatcttacagcaaatacaagaaaagtacgacctgcaccaggtaaagaaagccatgctccgacctgcgctctttgcgaacctattcggtgtactcgcgctcttccagagcggccgtctggtaaaagaccaagaggcactgatgaagtctgtaaagttgctgcaggcccttgcccagtatcagaatcatttgcaagaacagccacgcaaagcccttgtggatattctctcagaggtgtctaaagctacgctgcaagaaatcttgcctgaagtgctgaaggccgacttaaacatcatcctgtcttcccctgaacagttggagctcttcctgctcgcccagcagaaagttccctcgaagcttaaaaagctcgtcggttcagtcaatttgttttccgatgaaaacgtcccgagactggtgaacgtgctgaaaatggccgcaagctcagtaaagaaagaccgtaagctcccggcaatcgctctggatcttctgcgtctggcacttaaggaggacaaattcccgaggttttggaaggaggttgtagaacagggcttgttgaaaatgcaattctggccagcaagctacctatgtttcaggctgctcggagcagcactgcctctgctgacaaaagagcaactgcacctggtgatgcagggcgatgtgataaggcattatggagaacacgtgtgcacagcgaagctccccaaacagtttaaattcgcacctgaaatggatgactacgtcggtaccttcctcgagggctgtcaggatgatccagaacgccagctcgcagtgctggtggccttctcttctgtgaccaatcagggcctgccagtgaccccgacattttggcgtgtggtgaggttcctctccccccctgcactccagggctatgtggcctggctgcgggctatgttcctgcagcctgaccttgacagccttgtcgattttagcactaataatcaaaaaaaggctcaagatagcagtttgcatatgcccgaaagggctgtttttaggcttaggaagtggataatctttcgtctggtgtccatcgtggacagcctgcatttagagatggaagaagctttgacggagcaagtagcaaggttctgcctgttccatagcttttttgtcacaaagaaacctacatcgcagataccggaaactaaaccacaggagagaagcgaggggcctgcccagcctcctcatgcacccggaggcccagagaggccaaaactcgagaagaaagacgcaaaggagattccctcagccgaggatgggacacctgcagccaccggaggatctcagcccccaagcatggggcgtaagaagagaaatcgcaccaaggccaaggtgccggcacaggccaatggaacgcccaccaccaaatcgcctgcgccaggtgcccctacacggtcaccatccaccccagccaagagtccaaagctgcaaaaaaaggctcaagttcggaaagccggaaagccctag

SEQ ID NO: 41628 - DNA, 3999 bp, Artificial Sequence
  derived and/or modified sequence
atggagagcagagaccccgcccagcccatgagccccggcgaggccacccagagcggcgccagacccgccgacagatacggcctgctgaagcacagcagagagttcctggacttcttctgggacatcgccaagcccgagcaggagaccagactggccgccaccgagaagctgctggagtacctgagaggcagacccaagggcagcgagatgaagtacgccctgaagagactgatcaccggcctgggcgtgggcagagagaccgccagaccctgctacagcctggccctggcccagctgctgcagagcttcgaggacctgcccctgtgcagcatcctgcagcagatccaggagaagtacgacctgcaccaggtgaagaaggccatgctgagacccgccctgttcgccaacctgttcggcgtgctggccctgttccagagcggcagactggtgaaggaccaggaggccctgatgaagagcgtgaagctgctgcaggccctggcccagtaccagaaccacctgcaggagcagcccagaaaggccctggtggacatcctgagcgaggtgagcaaggccaccctgcaggagatcctgcccgaggtgctgaaggccgacctgaacatcatcctgagcagccccgagcagctggagctgttcctgctggcccagcagaaggtgcccagcaagctgaagaagctggtgggcagcgtgaacctgttcagcgacgagaacgtgcccagactggtgaacgtgctgaagatggccgccagcagcgtgaagaaggacagaaagctgcccgccatcgccctggacctgctgagactggccctgaaggaggacaagttccccagattctggaaggaggtggtggagcagggcctgctgaagatgcagttctggcccgccagctacctgtgcttcagactgctgggcgccgccctgcccctgctgaccaaggagcagctgcacctggtgatgcagggcgacgtgatcagacactacggcgagcacgtgtgcaccgccaagctgcccaagcagttcaagttcgcccccgagatggacgactacgtgggcaccttcctggagggctgccaggacgaccccgagagacagctggccgtgctggtggccttcagcagcgtgaccaaccagggcctgcccgtgacccccaccttctggagagtggtgagattcctgagcccccccgccctgcagggctacgtggcctggctgagagccatgttcctgcagcccgacctggacagcctggtggacttcagcaccaacaaccagaagaaggcccaggacagcagcctgcacatgcccgagagagccgtgttcagactgagaaagtggatcatcttcagactggtgagcatcgtggacagcctgcacctggagatggaggaggccctgaccgagcaggtggccagattctgcctgttccacagcttcttcgtgaccaagaagcccaccagccagatccccgagaccaagcaccccttcagcttccccctggagaaccaggccagagaggccgtgagcagcgccttcttcagcctgctgcagaccctgagcacccagttcaagcaggcccccggccagacccagggcggccagccctggacctaccacctggtgcagttcgccgacctgctgctgaaccacagccacaacgtgaccaccgtgacccccttcaccgcccagcagagacaggcctgggacagaatgctgcagaccctgaaggagctggaggcccacagcgccgaggccagagccgccgccttccagcacctgctgctgctggtgggcatccacctgctgaagagccccgccgagagctgcgacctgctgggcgacatccagacctgcatcagaaagagcctgggcgagaagcccagaagaagcagaaccaagaccatcgacccccaggagcccccctgggtggaggtgctggtggagatcctgctggccctgctggcccagcccagccacctgatgagacaggtggccagaagcgtgttcggccacatctgcagccacctgacccccagagccctgcagctgatcctggacgtgctgaaccccgagaccagcgaggacgagaacgacagagtggtggtgaccgacgacagcgacgagagaagactgaagggcgccgaggacaagagcgaggagggcgaggacaacagaagcagcgagagcgaggaggagagcgagggcgaggagagcgaggaggaggagagagacggcgacgtggaccagggcttcagagagcagctgatgaccgtgctgcaggccggcaaggccctgggcggcgaggacagcgagaacgaggaggagctgggcgacgaggccatgatggccctggaccagagcctggccagcctgttcgccgagcagaagctgagaatccaggccagaagagacgagaagaacaagctgcagaaggagaaggccctgagaagagacttccagatcagagtgctggacctggtggaggtgctggtgaccaagcagcccgagaacgccctggtgctggagctgctggagcccctgctgagcatcatcagaagaagcctgagaagcagcagcagcaagcaggagcaggacctgctgcacaagaccgccagaatcttcacccaccacctgtgcagagccagaagatactgccacgacctgggcgagagagccggcgccctgcacgcccaggtggagagactggtgcagcaggccggcagacagcccgacagccccaccgccctgtaccacttcaacgccagcctgtacctgctgagagtgctgaagggcaacaccgccgagggctgcgtgcacgagacccaggagaagcagaaggccggcaccgaccccagccacatgcccaccggcccccaggccgccagctgcctggacctgaacctggtgaccagagtgtacagcaccgccctgagcagcttcctgaccaagagaaacagccccctgaccgtgcccatgttcctgagcctgttcagcagacaccccgtgctgtgccagagcctgctgcccatcctggtgcagcacatcaccggccccgtgagacccagacaccaggcctgcctgctgctgcagaagaccctgagcatgagagaggtgagaagctgcttcgaggaccccgagtggaagcagctgatgggccaggtgctggccaaggtgaccgagaacctgagagtgctgggcgaggcccagaccaaggcccagcaccagcaggccctgagcagcctggagctgctgaacgtgctgttcagaacctgcaagcacgagaagctgaccctggacctgaccgtgctgctgggcgtgctgcagggccagcagcagagcctgcagcagggcgcccacagcaccggcagcagcagactgcacgacctgtactggcaggccatgaagaccctgggcgtgcagagacccaagctggagaagaaggacgccaaggagatccccagcgccacccagagccccatcagcaagaagagaaagaagaagggcttcctgcccgagaccaagaagagaaagaagagaaagagcgaggacggcacccccgccgaggacggcacccccgccgccaccggcggcagccagccccccagcatgggcagaaagaagagaaacagaaccaaggccaaggtgcccgcccaggccaacggcacccccaccaccaagagccccgcccccggcgcccccaccagaagccccagcacccccgccaagagccccaagctgcagaagaagaaccagaagcccagccaggtgaacggcgcccccggcagccccaccgagcccgccggccagaagcagcaccagaaggccctgcccaagaagggcgtgctgggcaagagccccctgagcgccctggccagaaagaaggccagactgagcctggtgatcagaagccccagcctgctgcagagcggcgccaagaagaaggcccagaccctgagattcaccatcagcagcagcaagaagtag

SEQ ID NO: 41629 - DNA, 1812 bp, Artificial Sequence
  derived and/or modified sequence
atggagagcagagaccccgcccagcccatgagccccggcgaggccacccagagcggcgccagacccgccgacagatacggcctgctgaagcacagcagagagttcctggacttcttctgggacatcgccaagcccgagcaggagaccagactggccgccaccgagaagctgctggagtacctgagaggcagacccaagggcagcgagatgaagtacgccctgaagagactgatcaccggcctgggcgtgggcagagagaccgccagaccctgctacagcctggccctggcccagctgctgcagagcttcgaggacctgcccctgtgcagcatcctgcagcagatccaggagaagtacgacctgcaccaggtgaagaaggccatgctgagacccgccctgttcgccaacctgttcggcgtgctggccctgttccagagcggcagactggtgaaggaccaggaggccctgatgaagagcgtgaagctgctgcaggccctggcccagtaccagaaccacctgcaggagcagcccagaaaggccctggtggacatcctgagcgaggtgagcaaggccaccctgcaggagatcctgcccgaggtgctgaaggccgacctgaacatcatcctgagcagccccgagcagctggagctgttcctgctggcccagcagaaggtgcccagcaagctgaagaagctggtgggcagcgtgaacctgttcagcgacgagaacgtgcccagactggtgaacgtgctgaagatggccgccagcagcgtgaagaaggacagaaagctgcccgccatcgccctggacctgctgagactggccctgaaggaggacaagttccccagattctggaaggaggtggtggagcagggcctgctgaagatgcagttctggcccgccagctacctgtgcttcagactgctgggcgccgccctgcccctgctgaccaaggagcagctgcacctggtgatgcagggcgacgtgatcagacactacggcgagcacgtgtgcaccgccaagctgcccaagcagttcaagttcgcccccgagatggacgactacgtgggcaccttcctggagggctgccaggacgaccccgagagacagctggccgtgctggtggccttcagcagcgtgaccaaccagggcctgcccgtgacccccaccttctggagagtggtgagattcctgagcccccccgccctgcagggctacgtggcctggctgagagccatgttcctgcagcccgacctggacagcctggtggacttcagcaccaacaaccagaagaaggcccaggacagcagcctgcacatgcccgagagagccgtgttcagactgagaaagtggatcatcttcagactggtgagcatcgtggacagcctgcacctggagatggaggaggccctgaccgagcaggtggccagattctgcctgttccacagcttcttcgtgaccaagaagcccaccagccagatccccgagaccaagccccaggagagaagcgagggccccgcccagcccccccacgcccccggcggccccgagagacccaagctggagaagaaggacgccaaggagatccccagcgccgaggacggcacccccgccgccaccggcggcagccagccccccagcatgggcagaaagaagagaaacagaaccaaggccaaggtgcccgcccaggccaacggcacccccaccaccaagagccccgcccccggcgcccccaccagaagccccagcacccccgccaagagccccaagctgcagaagaaggcccaggtgagaaaggccggcaagccctag

SEQ ID NO: 41630 - protein, 871 aa, Artificial Sequence
  derived and/or modified sequence
MSFSEMNRRTLAFRGGGLVTASGGGSTNNNAGGEASAWPPQPQPRQPPPPAPPALQPPNGRGADEEVELEGLEPQDLEASAGPAAGAAEEAKELLLPQDAGGPTSLGGGAGGPLLAERNRRTLAFRGGGGGGLGNNGSSRGRPETSVWPLRHFNGRGPATVDLELDALEGKELMQDGASLSDSTEDEEEGASLGDGSGAEGGSCSSSRRSGGDGGDEVEGSGVGAGEGETVQHFPLARPKSLMQKLQCSFQTSWLKDFPWLRYSKDTGLMSCGWCQKTPADGGSVDLPPVGHDELSRGTRNYKKTLLLRHHVSTEHKLHEANAQESEIPSEEGYCDFNSRPNENSYCYQLLRQLNEQRKKGILCDVSIVVSGKIFKAHKNILVAGSRFFKTLYCFSNKESPNQNNTTHLDIAAVQGFSVILDFLYSGNLVLTSQNAIEVMTVASYLQMSEVVQTCRNFIKDALNISIKSEAPESVVVDYNNRKPVNRDGLSSSRDQKIASFWATRNLTNLASNVKIENDGCNVDEGQIENYQMNDSSWVQDGSPEMAENESEGQTKVFIWNNMGSQGIQETGKTRRKNQTTKRFIYNIPPNNETNLEDCSVMQPPVAYPEENTLLIKEEPDLDGALLSGPDGDRNVNANLLAEAGTSQDGGDAGTSHDFKYGLMPGPSNDFKYGLIPGTSNDFKYGLIPGASNDFKYGLLPESWPKQETWENGESSLIMNKLKCPHCSYVAKYRRTLKRHLLIHTGVRSFSCDICGKLFTRREHVKRHSLVHKKDKKYKCMVCKKIFMLAASVGIRHGSRRYGVCVDCADKSQPGGQEGVDQGQDTEFPRDEEYEENEVGEADEELVDDGEDQNDPSRWDESGEVCMSLDD

SEQ ID NO: 41631 - DNA, 2616 bp, Artificial Sequence
  derived and/or modified sequence
atgagcttcagcgagatgaacagaagaaccctggccttcagaggcggcggcctggtgaccgccagcggcggcggcagcaccaacaacaacgccggcggcgaggccagcgcctggcccccccagccccagcccagacagccccccccccccgccccccccgccctgcagccccccaacggcagaggcgccgacgaggaggtggagctggagggcctggagccccaggacctggaggccagcgccggccccgccgccggcgccgccgaggaggccaaggagctgctgctgccccaggacgccggcggccccaccagcctgggcggcggcgccggcggccccctgctggccgagagaaacagaagaaccctggccttcagaggcggcggcggcggcggcctgggcaacaacggcagcagcagaggcagacccgagaccagcgtgtggcccctgagacacttcaacggcagaggccccgccaccgtggacctggagctggacgccctggagggcaaggagctgatgcaggacggcgccagcctgagcgacagcaccgaggacgaggaggagggcgccagcctgggcgacggcagcggcgccgagggcggcagctgcagcagcagcagaagaagcggcggcgacggcggcgacgaggtggagggcagcggcgtgggcgccggcgagggcgagaccgtgcagcacttccccctggccagacccaagagcctgatgcagaagctgcagtgcagcttccagaccagctggctgaaggacttcccctggctgagatacagcaaggacaccggcctgatgagctgcggctggtgccagaagacccccgccgacggcggcagcgtggacctgccccccgtgggccacgacgagctgagcagaggcaccagaaactacaagaagaccctgctgctgagacaccacgtgagcaccgagcacaagctgcacgaggccaacgcccaggagagcgagatccccagcgaggagggctactgcgacttcaacagcagacccaacgagaacagctactgctaccagctgctgagacagctgaacgagcagagaaagaagggcatcctgtgcgacgtgagcatcgtggtgagcggcaagatcttcaaggcccacaagaacatcctggtggccggcagcagattcttcaagaccctgtactgcttcagcaacaaggagagccccaaccagaacaacaccacccacctggacatcgccgccgtgcagggcttcagcgtgatcctggacttcctgtacagcggcaacctggtgctgaccagccagaacgccatcgaggtgatgaccgtggccagctacctgcagatgagcgaggtggtgcagacctgcagaaacttcatcaaggacgccctgaacatcagcatcaagagcgaggcccccgagagcgtggtggtggactacaacaacagaaagcccgtgaacagagacggcctgagcagcagcagagaccagaagatcgccagcttctgggccaccagaaacctgaccaacctggccagcaacgtgaagatcgagaacgacggctgcaacgtggacgagggccagatcgagaactaccagatgaacgacagcagctgggtgcaggacggcagccccgagatggccgagaacgagagcgagggccagaccaaggtgttcatctggaacaacatgggcagccagggcatccaggagaccggcaagaccagaagaaagaaccagaccaccaagagattcatctacaacatcccccccaacaacgagaccaacctggaggactgcagcgtgatgcagccccccgtggcctaccccgaggagaacaccctgctgatcaaggaggagcccgacctggacggcgccctgctgagcggccccgacggcgacagaaacgtgaacgccaacctgctggccgaggccggcaccagccaggacggcggcgacgccggcaccagccacgacttcaagtacggcctgatgcccggccccagcaacgacttcaagtacggcctgatccccggcaccagcaacgacttcaagtacggcctgatccccggcgccagcaacgacttcaagtacggcctgctgcccgagagctggcccaagcaggagacctgggagaacggcgagagcagcctgatcatgaacaagctgaagtgcccccactgcagctacgtggccaagtacagaagaaccctgaagagacacctgctgatccacaccggcgtgagaagcttcagctgcgacatctgcggcaagctgttcaccagaagagagcacgtgaagagacacagcctggtgcacaagaaggacaagaagtacaagtgcatggtgtgcaagaagatcttcatgctggccgccagcgtgggcatcagacacggcagcagaagatacggcgtgtgcgtggactgcgccgacaagagccagcccggcggccaggagggcgtggaccagggccaggacaccgagttccccagagacgaggagtacgaggagaacgaggtgggcgaggccgacgaggagctggtggacgacggcgaggaccagaacgaccccagcagatgggacgagagcggcgaggtgtgcatgagcctggacgactag

SEQ ID NO: 41632 - DNA, 2616 bp, Artificial Sequence
  derived and/or modified sequence
atgagctttagtgagatgaaccgacggaccttggctttcagagggggtgggttagtgactgccagcggaggaggttccacgaacaacaatgccggcggcgaggcctcagcatggcctcctcagcctcaaccacgccagccccctccccccgcgcccccagcacttcagcctcccaacggccgcggggccgatgaagaggtcgagttggaaggactcgagccccaagatctggaggccagtgccggacccgccgctggggcagcagaggaggctaaggagcttttactgcctcaagatgcaggggggcccactagcttgggaggtggagctggcgggcctctgctggccgaaaggaatcgcagaactctagcttttcgcggaggaggtgggggtgggctgggtaacaatggatcgtcaagaggacggccagaaaccagcgtgtggccattaagacattttaatggaagagggccagccaccgttgaccttgagctcgatgcattggaaggtaaagagctgatgcaggatggtgcttcgttatctgactccacagaggatgaggaagaaggtgcttccctgggagatggttcaggggccgagggaggcagctgcagctcaagcagacggtccgggggcgacggaggcgacgaagttgagggctctggcgtaggagccggcgaaggagaaacagtccagcacttccctctcgcccgacctaagtctctcatgcagaagctgcagtgttctttccagaccagctggctgaaggactttccttggctaaggtactcaaaggacacgggactgatgagctgcggctggtgtcaaaaaacccctgctgatgggggctctgtggacctgcccccagtcgggcacgacgagctctcaaggggcacgagaaactataagaaaactcttttactgcgccaccatgtgagcactgaacacaagctccacgaggctaatgcccaggagagtgagattccaagcgaggaaggttattgtgatttcaactcgcgccccaatgaaaactcttactgctatcagcttctgaggcagctcaacgagcaaagaaaaaaggggatcctatgcgatgttagcattgtcgtctctgggaagatcttcaaagcacacaagaacatcctagtggccgggtccaggttttttaagaccctgtattgtttcagtaacaaggaatctccaaaccagaataacactacccatctagacatagccgcagtccaaggctttagcgtgatcctggactttttgtacagtggtaatctggttctaactagtcagaatgccatcgaagtgatgactgtcgccagctacctccaaatgtcagaggtcgttcagacatgtaggaattttatcaaagatgccctgaatatttccattaagtccgaggccccagaaagcgtggtagtggattataataaccgtaagccagtcaatagagatggactgtcctcttcacgcgaccagaagattgcttccttttgggccactcgcaatctcaccaacctggccagcaacgtgaagatcgaaaacgacggatgcaacgtggacgagggacagattgagaactatcagatgaacgattcaagctgggttcaggatggtagtcccgagatggccgaaaacgagtccgaggggcagaccaaggttttcatatggaacaacatgggatcccaggggattcaggaaaccggcaagacccgccgaaagaatcagacaactaagagatttatctacaatatcccccctaacaacgagactaaccttgaggattgttcggttatgcaacctcccgtggcctatcctgaggaaaatactcttcttataaaagaagagccggacttagatggcgccctgctttcggggccggacggagacaggaatgttaacgccaatttgttagccgaagctgggacgagtcaggatggaggagacgctggaacatctcacgattttaagtatggtttaatgccaggacccagcaatgactttaagtatgggctaatcccagggacaagcaatgattttaagtatgggttgatacccggagcctcaaatgacttcaagtatggccttctacctgagtcatggcccaagcaggagacctgggagaatggagaatcctccttaatcatgaataagctgaaatgcccccattgctcttatgtagctaagtataggaggacgcttaaacggcatctgttgatccacacgggcgtgcgctctttctcctgtgacatttgcggaaaacttttcacccgaagggaacacgtgaagcgccactccctggttcacaagaaagacaaaaagtataagtgtatggtctgtaagaaaatctttatgctggcagcatcagtgggtatccgacatggcagccggcgttatggggtgtgcgttgactgtgcagacaagagtcagcctggcgggcaagagggcgtagatcaggggcaggacaccgaatttcctcgagatgaggagtatgaggaaaacgaagtgggcgaggccgacgaggagctcgttgacgacggggaggaccagaatgatccgtcgcggtgggacgagagcggagaggtgtgcatgagcctcgatgactag

SEQ ID NO: 41633 - DNA, 2616 bp, Artificial Sequence
  derived and/or modified sequence
atgtctttctccgagatgaatcgccgtactctggcctttcgcggtgggggtctcgttactgctagcggcggcggatcgaccaataacaatgctggcggcgaagccagcgcctggccaccacagcctcagccccggcaacctccccccccagcccccccagcactgcagccgcctaacggccggggggccgacgaggaggtcgagttagagggattggaaccacaggacctcgaagcctcagccgggcccgccgctggggcagccgaggaggccaaggagctccttttaccacaagacgctggagggccaacctcgctaggtggcggggccggcgggcccctccttgccgagaggaacaggcgcaccctggcctttcggggagggggtgggggcgggctaggcaataacggctcctcgagagggagacccgaaacatctgtgtggccgctcagacacttcaatggtcgaggccccgccaccgtcgatctggagctggatgccttggagggcaaggaattgatgcaggacggcgcttcgttgagtgatagtaccgaagatgaggaagaaggtgccagcctcggggatggcagcggtgcagaaggcggttcctgctccagcagcagacgctccggaggggatggcggggatgaggtggaaggatccggggtgggagcaggagagggggagactgtacaacacttccctctggcccgccctaaatcgctaatgcagaaactgcagtgtagtttccagaccagttggctcaaggatttcccatggctgcgctactccaaagatacaggcctcatgtcatgtggctggtgccagaagacgcccgcagacgggggttctgtcgatctgcccccagttggacacgatgagctgtctcggggtacccggaattacaaaaagactctgctcctccggcatcatgtttcaactgaacataaactgcacgaggccaatgcccaggagagcgaaattccatccgaggaaggttactgtgatttcaacagccgccccaatgaaaacagctattgttatcagctgcttcgacaattgaacgagcagagaaaaaaaggcatcctgtgtgacgtgtcaattgtagtctcagggaagattttcaaagcccacaaaaatatactggtggctggttctcgtttttttaagactttatattgtttttcgaataaggaatctccaaatcagaacaatacaacacaccttgacattgctgccgtgcagggcttctctgtcattttagacttcctgtattccggaaacctcgtcttgacctcacagaacgccatcgaggttatgaccgtcgcaagctacctgcagatgagcgaagtggttcagacctgtaggaatttcatcaaagacgctctgaatatttctatcaaaagcgaagcccccgagagtgtggtggtggactacaacaatcggaagccggtaaatagggacggcctgagttcttcaagagatcagaaaattgctagcttttgggcaaccagaaacctgacgaacctcgcaagtaatgttaagattgaaaatgatgggtgcaacgtagacgaagggcaaattgagaactatcagatgaacgactcgagttgggtgcaagatggctctcccgaaatggctgaaaatgagtcggaaggccagactaaggtcttcatctggaataatatggggagtcaaggcattcaagaaaccggtaagactagacgaaaaaatcagactaccaagaggtttatctacaatatcccccccaataacgaaaccaacctagaggactgctcggtaatgcaaccacccgtcgcttacccagaggagaataccttactcataaaggaggagcctgatttggacggagccctgttgtccggacccgacggggatagaaacgtcaacgcgaacttgcttgccgaagctggcacgagtcaggatggcggcgacgcaggtacatctcatgatttcaaatacggactaatgccaggacccagcaacgacttcaaatacggactaatccccgggactagtaatgattttaagtatggactcatccccggtgcatccaatgatttcaaatacggcctgctgcccgaatcttggccaaagcaggaaacttgggagaacggtgaatcatcgcttatcatgaacaagctgaagtgcccccactgcagctatgtcgctaagtataggcggactctgaagaggcacctcttaatccacacaggtgtacgcagcttctcttgtgacatttgtggcaagctgtttacacggcgtgagcatgtgaagaggcattcactggtgcacaaaaaggataagaagtataagtgcatggtatgcaaaaagatctttatgttggctgcctctgtcgggatccggcacggttcacggcggtatggcgtgtgcgttgactgcgccgacaagagccagcccggcggccaggaaggagtcgatcagggtcaagataccgagtttccccgggatgaggagtatgaagaaaatgaggtaggagaggccgatgaggagctagtagatgacggggaggatcaaaacgacccatccaggtgggacgagtctggtgaggtatgtatgagtctggacgattag

SEQ ID NO: 41634 - DNA, 2616 bp, Artificial Sequence
  derived and/or modified sequence
atgtccttcagcgagatgaacagaaggaccctggccttccggggcggcggcctggtgacagccagcggcggcggcagcaccaacaacaatgccggcggggaggccagcgcctggccaccccagccccagccccggcagcccccacctccagcccccccagccctgcagcccccaaatggaagaggagcagatgaggaggtggagctggagggcctggagccccaggacctggaggccagcgctggccctgctgctggagctgctgaggaggccaaggagctgctgctgccccaggatgctgggggccccaccagcctgggcggcggggccggcggccccctgctggccgagaggaacagaaggaccctggccttccggggcggcggcggcggcggcctgggcaacaacggcagcagccggggccggcctgagacctctgtgtggcccctgcggcacttcaacggccggggccctgccaccgtggacctggagctggatgccctggagggcaaggagctgatgcaggatggagccagcctgagtgacagcacagaagatgaggaggagggcgccagcctgggagatggcagcggggctgagggcggcagctgcagcagcagccgccgctctggaggagatggaggagatgaggtggagggcagcggcgtgggcgctggggagggggagaccgtgcagcacttccccctggcccggcccaagagcctgatgcagaagctgcagtgcagcttccagacctcctggctgaaggacttcccctggctgcgctacagcaaggacaccggcctgatgagctgtggctggtgccagaagaccccagcagatggcggctctgtggacctgccccctgtgggccatgatgagctgagccggggcaccaggaactacaagaagaccctgctgctgcggcaccacgtgtccacagagcacaagctgcacgaggccaatgcccaggagagcgagatccccagcgaggagggctactgtgacttcaacagccggcccaatgaaaattcctactgctaccagctgctgcggcagctgaatgagcagaggaagaagggcatcctgtgtgatgtgtccatcgtggtgtctgggaagatcttcaaggcccacaagaacatcctggtggccggcagccgcttcttcaagaccctgtactgcttcagcaacaaggagagccccaaccagaacaacaccacccacctggacattgctgctgtgcagggcttcagcgtcatcctggacttcctgtacagcggcaacctggtgctgaccagccagaatgccatcgaggtgatgacagtggccagctacctgcagatgtctgaggtggtgcagacctgcaggaacttcatcaaggatgccctgaacatcagcatcaagtctgaggcccctgagagcgtggtggtggactacaacaacaggaagcctgtgaacagagatggcctgagcagcagccgggaccagaagatcgccagcttctgggccaccaggaacctgaccaacctggccagcaatgtgaagattgaaaatgatggctgcaatgtggatgagggccagatcgagaactaccagatgaatgacagctcctgggtgcaggacggcagccctgagatggccgagaatgaaagtgagggccagaccaaggtgttcatctggaacaacatgggcagccagggcatccaggagaccgggaagaccaggaggaagaaccagaccaccaagcgcttcatctacaacatcccccccaacaatgagaccaacctggaggactgcagcgtgatgcagccccctgtggcctacccagaggagaacaccctgctgatcaaggaggagccagacctggatggagccctgctgagcggcccagatggagacagaaatgtgaatgccaacctgctggccgaggccggcaccagccaggatggaggagatgctggcaccagccatgacttcaagtatggcctgatgcctggccccagcaatgacttcaagtatggcctcatccctggcaccagcaatgacttcaagtatggcctcatccctggggccagcaatgacttcaagtatggcctgctgcctgagagctggcccaagcaggagacctgggagaatggagagagcagcctcatcatgaacaagctgaagtgcccccactgcagctatgtggccaagtacagaaggaccctgaagaggcacctgctgatccacactggagtgcgctccttcagctgtgacatctgtgggaagctgttcacccggcgggagcacgtgaagaggcacagcctggtgcacaagaaggacaagaagtacaagtgcatggtgtgcaagaagatcttcatgctggccgcctctgtgggcatcagacatggcagccgccgctatggagtgtgtgtggactgtgccgacaagagccagcccggcggccaggagggcgtggaccagggccaggacacagagttccccagagatgaggagtatgaggagaatgaggtgggggaggctgatgaggagctggtggatgatggagaggaccagaatgaccccagccgctgggatgagagcggggaggtgtgcatgagcctggatgactag

SEQ ID NO: 41635 - DNA, 2616 bp, Artificial Sequence
  derived and/or modified sequence
atgagcttcagcgagatgaaccggcggaccctggccttccggggcggtggtctcgtgacggcctctggaggtggttcgaccaataataacgctgggggtgaggcctcagcctggcctcctcagccccagccaagacagcctccacccccagctcctcctgccctgcagccaccaaacgggcgcggcgctgatgaggaagtagagctcgaaggtctcgagccacaggatctcgaggcgagtgctggaccagcggccggcgctgctgaggaagcgaaggaactcctcctccctcaggacgctggaggaccaactagtctgggcgggggagcaggtggacctctactggccgagcggaatcggcgaaccctcgccttcaggggcggggggggtggcgggctggggaacaatggctcctctcgaggaagacccgagacttcagtgtggcccctgcgccactttaatgggaggggccccgctaccgtggacttggaactggatgcgctggagggcaaggaactcatgcaagatggtgccagtctttcagattccacagaggacgaagaagaaggcgctagccttggcgatggttcgggcgcggaaggagggtcttgcagttcttctcggaggagcggcggtgatgggggggatgaagtggaaggctccggggtgggcgccggagaaggcgaaaccgtgcagcactttccactcgctaggccaaagtcgcttatgcagaagctacaatgctccttccaaacatcatggctgaaagacttcccgtggttacgctatagcaaagatactggcctcatgtcctgtgggtggtgccagaagacacccgctgatggcggcagcgtcgacttgccccctgtaggtcacgacgaactgagcaggggaactcggaattataaaaagactctcctgctgcgacaccatgtttctacagagcataagctacatgaggccaacgcccaggagtccgagattccttccgaagaggggtactgtgacttcaactctcgcccaaacgaaaacagctactgttaccaactcctcaggcaattgaatgaacagaggaaaaaagggatcctatgcgatgtttctatcgtggtgtcgggtaaaatcttcaaagctcataagaatatactagtggcaggctctcgcttcttcaaaacgctgtactgcttttcgaataaggagagtcctaatcagaacaatacaacccaccttgatatagctgccgtccaggggttcagtgtcatcttggatttcttgtattctgggaatctcgtattgactagtcaaaacgccatcgaagttatgacagtggctagctacctgcagatgtctgaagtggtgcagacttgtagaaattttatcaaagatgccctgaacatctccattaagtcggaggcccccgaatccgttgtagttgactataacaatagaaaacctgttaatagagacggactcagctcgtcacgagatcagaagatcgcctcattttgggccacaaggaatctaacaaatttggcctcaaatgtgaagatagagaacgatggatgtaacgttgatgaagggcagatcgaaaactatcagatgaacgatagttcttgggtccaggatggctctcctgagatggccgagaacgaatccgaggggcaaacgaaagtcttcatttggaataacatgggttctcagggtatacaagaaaccggcaagaccagacgtaaaaaccagactacaaagcggtttatctacaatatcccgccgaacaatgagacaaatttggaggactgctccgtcatgcagccgcccgtcgcgtacccagaagagaataccctgcttatcaaagaggagcccgacttggatggggccctgctgtctggcccagacggggaccgaaacgtgaacgccaatcttctcgccgaggccggaacttcacaggatggcggtgacgcagggacatcacatgatttcaagtatggattaatgcctggaccatcaaacgacttcaagtacggcctcatcccaggtacttcgaacgacttcaaatatgggcttatcccgggcgcttcaaatgattttaaatatggtctcctgccggaaagctggcccaaacaagagacatgggagaacggcgagtcttctctgattatgaataaactgaagtgcccgcactgtagctacgtggcgaagtatagaaggactcttaagcggcacttgcttattcataccggcgtccgttctttctcctgtgacatctgtgggaaattgtttaccagacgtgagcatgttaaaagacacagcttggtccataagaaggacaagaagtataagtgtatggtgtgcaagaagatttttatgctcgccgcctccgtgggtatcaggcatggctctcggcggtatggcgtatgcgtggactgtgctgacaagtcgcagcctggaggacaggagggcgtagatcagggacaggacaccgaatttccacgagacgaggaatatgaagagaacgaagtgggagaggcagacgaggagctggtcgatgatggagaggatcaaaatgacccatcacggtgggatgaatctggcgaggtgtgcatgagtctggatgattag

SEQ ID NO: 41636 - DNA, 2616 bp, Artificial Sequence
  derived and/or modified sequence
atgagcttcagcgagatgaaccggcggaccctggccttccggggcggaggtcttgtgaccgcctccggtgggggttcaactaacaataacgccggcggggaggcctctgcatggccaccccagcctcagcccagacaaccaccaccccctgccccacctgcattgcagcctccaaatggtcgcggcgccgatgaggaggtggaactcgaaggactcgaacctcaagatctcgaggcctctgcggggcccgcagcaggggcggctgaggaggcgaaagaactcctgctgccacaggatgctggcggccccacgtctcttggaggcggcgctggcggccctctgcttgccgagaggaacagaagaaccttggcatttcgcggaggcggaggaggtgggctaggaaacaacggctcctcaagaggccgtcctgagaccagcgtgtggccccttcggcacttcaatggacgcgggcctgctaccgttgatctggagctcgacgccttggaaggcaaagagttaatgcaagacggcgcgtccttaagcgacagcaccgaagatgaggaagaaggagccagcttgggtgatggctcaggggcagaaggcggatcctgttcaagctcacggcgctctggcggggacggcggcgacgaggtggagggttcaggcgtgggggcaggcgaaggggagacagtgcaacattttcctctggcccggcccaagtccctcatgcagaaactacagtgctccttccagacctcctggctcaaagatttcccgtggctgcgctatagcaaggacaccggcctgatgtcctgcggctggtgtcagaagactcctgcggatggagggagtgtagatctgcctcctgtgggccatgacgagctctctcgcggcacacgcaactataaaaagacgcttctcctgcgtcatcatgtgtccaccgaacacaagttgcacgaagctaacgctcaggaaagtgaaattccgtctgaagaagggtactgtgatttcaatagcaggccgaatgagaactcttactgctaccagctcctgagacagcttaatgaacagaggaagaaggggatactttgcgatgtttccatcgtggtctccggcaagatttttaaggcccataagaatatccttgtggcgggatcaagatttttcaaaaccttatactgtttttccaacaaggaatcccctaatcagaacaatactacccatctggacatagctgccgtccaggggttctcagttattctggattttctgtacagcggcaatttagtcctgacatcacagaatgcaattgaggtgatgacagtcgcatcatatctgcaaatgtcagaggtagtgcagacctgcaggaatttcataaaagacgccctgaacatctcaatcaagagcgaggctcccgagtctgtagttgtggactataataatagaaagccagttaatcgtgacggactctcatcttcgcgcgatcagaaaatcgcttctttctgggcaacccgcaatctcaccaacctcgctagtaacgtgaaaatcgaaaacgatgggtgtaacgtggacgaggggcaaattgaaaactaccagatgaatgacagcagctgggtccaggatgggtctcccgaaatggccgagaatgagtcagaaggacaaactaaggtgtttatttggaacaacatgggttcccagggcatccaggaaactggcaagacaaggcgcaagaaccaaaccactaagaggttcatttacaacatcccaccgaacaacgagactaatctggaggattgtagcgtcatgcagccaccggtggcatatccagaggaaaatactctcctgatcaaagaggagcctgatctggatggggcgttgctgtctggccctgatggcgatcgcaacgttaacgccaatttattggccgaggccggcacttcccaggatggcggggatgcagggacctcacacgactttaaatacgggctaatgcctgggccatctaatgattttaaatacggcctgattccaggaaccagcaacgatttcaaatacggcctcattcccggcgcctctaatgatttcaagtacggcctcctgccagaatcctggcccaagcaggaaacatgggagaatggcgagagcagtctgatcatgaacaagttgaagtgcccccattgttcgtacgtagcgaaatacaggaggacactgaagaggcatctcctgatccatacaggagtgcggtcattctcatgtgacatatgcggaaaactcttcaccaggagagagcatgtgaagaggcactctctggtgcacaaaaaggataaaaagtacaaatgtatggtgtgcaaaaagatcttcatgcttgccgcctccgtgggtattcgccatggatcgcgcaggtatggagtctgtgtggattgtgcagataagagccagccgggtggccaggagggagtcgaccagggtcaggacaccgagttccctcgcgatgaggaatacgaagagaatgaagtcggcgaggctgacgaggagctggtggacgacggagaggaccagaatgacccctcccggtgggacgagagcggggaggtatgcatgtctctcgacgattag

SEQ ID NO: 41637 - DNA, 2616 bp, Artificial Sequence
  derived and/or modified sequence
atgtcgttttccgagatgaaccgtaggacgctggcattccggggaggaggtttggtgacggcctctggcggaggctcaacgaataacaacgcaggaggcgaggcatcagcgtggccaccgcagccccagccaaggcaaccgcctcctcctgcaccccctgccctgcagccacccaacggcaggggagcggatgaagaggtggagctggagggcctggagcctcaggatctcgaagcaagcgctggcccagccgctggagcggctgaggaagcgaaagagctgctgctccctcaggacgctggcggacccacctctttgggtggaggagcaggcggaccccttctggcagaacgcaaccggagaaccttggcttttaggggaggagggggagggggactcggaaacaatgggtcaagcagagggcgtccagagaccagcgtctggcctctgaggcatttcaatggtcgcggtcctgccactgtcgatctggaactggatgccttagaaggaaaggagctcatgcaggatggggcaagcctttctgattccacggaagatgaagaagagggggcttctttgggcgacggaagtggcgcagagggcggatcttgcagtagttcccgccgttccggaggcgatggtggggatgaagttgaagggagtggagtcggggctggggaaggggagaccgttcaacacttcccgctggcacgtcccaaatcccttatgcagaagctacagtgttcttttcagacaagctggctgaaggattttccatggttgcgttatagcaaagacactgggctcatgagctgtgggtggtgccaaaagacccccgctgacggaggcagcgtggacctcccccctgttgggcatgatgaactgagtcgcggtactcgcaattacaaaaaaactctcctgctccgacatcacgtatccaccgagcataaacttcacgaagccaatgcccaggagtccgaaattccatctgaggagggctactgtgacttcaacagccggccaaacgagaattcgtactgttaccaactactgagacaactgaatgaacagaggaaaaaggggatcctgtgcgacgtctctattgtggtcagtggtaagatcttcaaagctcataagaacatcctcgtggccggaagcaggttctttaaaacgctgtattgcttttcaaacaaggaatcaccgaatcaaaacaacaccacacatctcgacatcgcagctgtgcaaggattctccgttatcttggactttttgtacagtggaaaccttgttctgacttcgcaaaatgcaatcgaagtaatgacggtcgcatcatacctccagatgtcagaagtggtacaaacttgcagaaatttcattaaagatgccctgaatataagcatcaaatccgaggcgcctgagtccgtggttgtcgattataacaaccggaagccggtgaatagggatgggctgagctcgtcaagagatcagaagattgcttctttctgggcaacccggaacctgacaaaccttgccagcaacgtcaaaattgaaaacgatgggtgcaatgtcgacgaaggacagattgaaaattatcaaatgaacgactcctcatgggtccaagacggctcaccagagatggcagagaacgagagcgagggacagaccaaggtgtttatctggaacaacatgggctcccagggaattcaggagactggcaagacgcgtcgcaagaaccagacgacaaaaaggttcatttataacataccgccaaataacgaaactaacctggaagattgcagcgtaatgcagccccctgtggcatatcctgaagaaaacacattactgattaaggaggagccggatttagatggtgccctcttgtctggccctgacggtgatcgcaacgtcaatgcaaacctgttggccgaggcgggaactagccaagacggaggagatgcaggaacttcccacgattttaaatacgggttgatgcctggtccttccaatgatttcaaatacgggcttatccctggtacctctaatgactttaagtacggcctgatccccggagccagcaacgacttcaagtatggcctgctgcccgaaagttggcccaagcaggaaacatgggaaaacggggaatcgtctctgattatgaataaactgaaatgcccccactgctcctacgtcgccaagtaccgacgaacccttaagcgccatttgttaatccataccggggtaaggagcttttcctgcgacatatgtgggaagctgtttactcgaagagaacacgtaaagagacacagcctggttcataagaaagacaagaagtataagtgtatggtctgcaagaagattttcatgttggccgcttcggtgggcattagacatggctcccgtcgctacggcgtttgcgtagactgcgccgataaatcacagcccggagggcaagaaggcgttgaccaaggacaggacactgagttcccacgcgatgaagagtatgaagaaaatgaagtgggagaagccgacgaggagcttgtcgacgatggagaagatcagaacgatcctagcagatgggatgagagcggagaagtgtgcatgagcctcgacgattag

SEQ ID NO: 41638 - DNA, 2616 bp, Artificial Sequence
  derived and/or modified sequence
atgtccttcagcgaaatgaacaggcgaactctcgctttcaggggcggtggtctcgtcacggcatctgggggagggtctacgaataacaatgctggaggcgaggcctctgcttggccaccacagccgcagccacgacagccccctccccctgcccctcctgcccttcagccccctaatggaaggggggcagacgaagaagtggaactggaaggcctagaaccccaggatctggaagcttctgctggacctgccgctggggcagccgaggaggcgaaagagttgctgttacctcaggacgcagggggtcccactagtctcggtggaggggctggcggacctctccttgcagagaggaaccggagaactcttgcctttcgcggtggcggaggcggtggattaggtaataatggatcctcccgcggtaggcccgaaactagcgtttggccactaaggcactttaatggaaggggcccagctacagttgaccttgaactggatgccttggagggcaaggagctgatgcaggacggtgcttcgctgagtgactctacagaagacgaggaagagggagcctcactcggagatggatctggggcagagggcggtagctgcagtagcagtcgacgctcaggaggtgacggaggtgacgaagttgagggcagcggcgtgggtgctggcgagggcgaaaccgtgcagcattttcctctcgctcggccaaaatctctcatgcaaaaactgcagtgctcatttcagacttcctggcttaaggatttcccgtggctgagatattctaaagacaccggactcatgagctgcggatggtgtcagaagacacccgctgacggtggtagcgttgatttgccaccagtgggtcacgatgagttgagcagagggactagaaactataaaaagaccttgctcctcaggcatcacgtgagtaccgaacacaagttgcacgaggctaacgcgcaggagagcgagatccccagcgaagaaggttactgtgactttaactccagacccaacgaaaactcttactgttaccaactgctgagacaacttaacgagcagcgaaaaaaggggatcctttgtgacgtgtctatcgtggttagcgggaaaatcttcaaggcacacaagaatattctggtggcagggtcacgctttttcaaaactctgtattgtttttctaataaagagtcccccaaccagaacaacaccactcacctagacatagccgctgtccaaggcttcagcgtaatcctggattttctctattcaggaaacctggtcctgactagccagaatgcgatagaagtgatgaccgtggcaagttatctccagatgtccgaagttgtccagacctgtaggaactttatcaaagatgccttgaatattagcatcaagagtgaggccccagagagcgttgttgtcgactacaataacagaaagcctgtaaacagggacggactatcttccagtagggaccagaagatcgcttccttctgggccacccggaatcttaccaacttggctagcaacgtaaaaatcgagaacgacggatgtaatgtggacgaagggcagatcgaaaactatcagatgaacgattcctcatgggtacaggatggatcacctgagatggccgagaacgaaagtgaaggccaaaccaaagtattcatctggaataacatgggaagtcagggaattcaggagaccggaaaaacgcgccgtaagaaccagaccaccaagcgatttatctacaatatcccccctaataacgaaaccaacctggaagactgttctgtgatgcagcccccagtcgcatatcctgaggagaatactctcttaattaaagaggagcctgacctagacggtgccctcttatctgggccagatggtgatcggaatgtaaacgctaaccttcttgcggaagccggtactagccaggatggtggggatgccggaactagccacgacttcaagtacggcctaatgcccggtcccagcaatgactttaaatacggcctgatcccaggcactagcaatgacttcaaatatggcctgatccctggggctagcaatgactttaaatatggccttttgcccgagagttggcctaaacaggagacgtgggaaaatggtgagagcagcctgatcatgaataagctcaaatgtccacactgctcatacgtagctaaataccgaaggaccctaaaaaggcacctgctgattcataccggcgtgagatctttttcttgcgacatttgcggcaaattgttcaccaggagagagcacgtcaagcgccacagcctcgtccacaagaaggataagaagtataagtgcatggtctgcaaaaaaatttttatgctggctgcaagtgtgggcatccggcacggctcgcggaggtatggggtctgtgtggactgcgctgacaaaagccagcccggagggcaagagggagtggatcaaggacaggatactgagttcccaagagatgaggaatacgaggagaacgaagtgggagaggcagatgaggagctggtcgacgacggtgaggaccagaacgatcccagtcgatgggatgaaagtggcgaggtgtgcatgagtctggatgattag

SEQ ID NO: 41639 - DNA, 6061 bp, Artificial Sequence
  derived and/or modified sequence
cggtccgttgttcatttgccattcgacctccgccagggcctggtcggacggaaacgctccgccggctttattgtcgcttcgttatgtggcggagccgagcagtttagcgtgcctctcaccctcagcgcctgcgaagccggcggcggcgtcgggactcctcggcgcgcggaggaaggatatctgtgtggaggatcggtgtgtgcgcgcgcggctttaaagagggggcagcggagggtctccccgcactccgctgctcaacttcgaaggcctcgctcgctgcaggctcgctcctcacctctccgccgcccgcccccttctccgcgcgggacgctgcccggagcgcggcggggcgggggtggaggacgagagagcggtcggaggcgtcggcccggcagcggcagcggcagcggacgcgtgcagcagacccgggagcgagcgcgagccgggctgccgggcgagagggcgaggccgagccccgcgagaccggaacgccgggggcgggggcgagacagagggggagccgcggggagcgcgcgggacgcggcccgaggccgtgcgcgagccggggcaccgggcggcggcggcggcggcgcgcgccatgtcgttcagtgaaatgaaccgcaggacgctggcgttccgaggaggcgggttggtcaccgctagcggcggcggctccacgaacaataacgctggcggggaggcctcagcttggcctccgcagccccagccgagacagcccccgccgccagcgccgcccgcgcttcagccgcctaatgggcggggggccgacgaggaagtggaattggagggcctggagccccaagacctggaggcctccgccgggccggccgccggcgccgccgaggaagccaaggagttgctgctcccccaagacgcgggcggccccacctcgcttggcggtggcgcggggggccccctgctagcggaaaggaaccgtcggactctggccttccgaggcggcggcggcgggggtctcggcaacaatggcagtagccgcggccgccccgagacctcggtgtggcccttgaggcatttcaatgggcgagggccggcgactgtggatctggagctggacgcgctggaggggaaggagttgatgcaggacggcgcgtccctgagcgacagcaccgaggacgaggaggagggggcgagcctgggcgacggcagcggggcggaaggcggcagctgcagcagcagcaggcggtcgggcggcgatggcggggacgaagtggagggcagcggtgtgggagctggcgaaggagagactgtccagcacttcccgctcgcgcggcccaagtctctaatgcagaagctccaatgctccttccagacctcctggctcaaggactttccctggctgcgctattccaaggatactggtcttatgtcttgcggctggtgccaaaagacccctgcagatgggggaagcgtggaccttcccccagtggggcatgatgagctttcgcgagggacccgcaactacaagaaaaccctcctcctgaggcaccacgtctctaccgagcacaaactccacgaagccaacgcccaggagtcagaaataccatcagaggaggggtactgtgactttaatagtaggccaaatgagaactcttattgctatcaacttctgcgacaactaaatgaacagagaaagaaaggtattctttgtgatgtcagcattgtggtaagcggaaaaatcttcaaagctcataagaacatcctggttgcaggcagccgtttctttaagactttatattgcttttcaaacaaagaaagccctaaccaaaacaatactacccacttagatattgctgcagttcaaggtttttcagtcatcttggacttcttgtattctggtaacctggtgctcacaagccaaaatgccattgaagttatgaccgtggccagctatcttcaaatgagtgaagttgttcaaacttgccgaaatttcattaaagatgccttaaatataagcattaaatcagaagctccagagtctgtagttgtggactataataatagaaaaccagttaatagagatggtctgtcttcatcacgggatcaaaaaattgccagtttttgggcaacacggaatcttaccaatttggcaagtaatgtaaagattgaaaatgatggttgtaatgtcgacgagggccaaatagaaaactaccaaatgaatgacagtagttgggtccaggatggatctcctgaaatggctgaaaatgaatctgaaggtcaaacaaaagtgtttatttggaataatatgggctcccagggaattcaagagactggcaaaacaaggaggaaaaaccaaactacaaaaagatttatttataatattccacctaataatgaaacgaatttagaagattgctcagtaatgcagccacctgttgcctatccagaagaaaatacactactcatcaaggaagaaccagatttagatggtgctctactctcggggccagatggtgataggaatgtgaatgcaaatttattggctgaagctggcactagtcaagatggaggtgatgctggtacttcacatgatttcaagtatggtttgatgcctggtccttcaaatgatttcaagtatggattgataccaggtacttcaaatgatttcaagtatggattgataccaggtgcttcaaatgatttcaagtatggattattgccagaatcttggccaaaacaagaaacctgggaaaatggtgaatcatctctaatcatgaacaagttaaaatgccctcattgtagctatgtagccaaatacagacgaacactaaaaaggcacttgctcattcacacaggagtgagatcatttagctgtgatatttgtggaaaactgtttactcgaagagaacatgtaaaaagacattccctggtgcataaaaaggataaaaaatacaaatgtatggtgtgtaagaagatcttcatgttagcagccagtgttggaataagacatggatctcgacgttatggtgtttgtgtagactgtgcagataaatcacagccaggagggcaagaaggtgtagatcagggacaggatacagaattccctcgggatgaagaatacgaggagaatgaagtaggagaagctgatgaagagctagttgatgatggagaagatcagaatgatccctctcgatgggatgaatcaggagaagtttgtatgtctctagatgattaactgacctactatactcctcaaggatgctgcatttggacctaatatgaatcgacaatttggattgttgaacttgaaggcttgcaaaatatggtacatgctggatagtagttatgttgctgtgaaaactgtagggtcaaagccttatagcaaaaaaaatttttttttatatttgcacaggactatacagcaaacaaccatgtggttggattacatggagtccccacatactcagtcagttatcaaagtaaaatattttttatttataggatatacagtaactatttgggtcctatgaaaatagtccttaaagagcttacattcatgtgctactttaacatgaatggagaaaatccgtttatggaagtacagtgacaattgacccaatcactctgtccatcaaaccactcaggctagtttgtactagtagagttttgtttctatttttatttttattaattttattttttttaatacagattttcagtgaggggctttttcaaccccattggttctattttcttgtatttttccatttaatttgcttcataacttaaaccaagtctcttctagtcttaggtattatttctcgattttgtgctgatgggcatgtttataagaactggagaggtaatttattggaatgaactaactgacttcctccattcccctcttcctttttgacatgaattttactacttcacaaatgaagaatgatgttatgaagttaccgtggcgaagttgacaaataccactaaaatgattatgatttagaagtaactttcttctgctgctctaatctgataaatggttactatatgatattttctgacatggtatttggttttgggtatctgttactttggcactattcttgtttgcctctttatttttgccagtgtactatacctcagtcctatttgaaagacctaattgaaagaaaaatcatagaaataagtaaaatgatttgttttataatttatccaccatgtccagtttggttagcttgttatgcaatataagtgaaatatcaggtttttacccgtgtcccttttatcatgaaaattaacacaaaatgtgcattctcttttgtttcatacttagcgggatattgattgttttgaaattatgatcaatacttaatttatttttttctgtccttgaagtcactacaccttgatacagtctttctagtagtcaccatgattcaacagtctcaaaaatcttacaaataaaattctgagaagctttattattctataaattcttcagggtacaaagggtgacatattgaggtgaaattgtcagatttacttagcctggtgacatgaattagctgattgtggaactctcagcagcatttcacgtattgttaacatgtatggcatttattagcatattgtatattatataagattgagggatgtcatattttcagctttcttttaaataaaaattgagtatattttcctattttatatcaggtaactaaattatgctagttatgtggaaaaaattgcaaagatgctttgacagatataatccctttggtgctccatctgatcaaagttgaaaagttgatgttttttaagagacaagctttatcattgtctctgatttcagtagaataatggtttattgttagacaatgatgtttctgcttggataaatcaaagataaattacagttacatggttagatgcatcttttgtcatctatattgtagtttctacataactgtaaacctgacagataagaatagtttcggtttgatttttgtttaaaacagatgagtacttcttaatgttctagacaaatgagtaaaatgtatttctggtagaaattagttgggcaaagatactatgaatgaaaaagtattttaaacgtaaaatgttctttgtgaatatgtaagtatagtataaagatttctttcatcccatttatccccttcctttaaataaactagtttacaattggtagatctgtctatatataaatatatattaaagaacaaagatatatatctaaaaatcacctaaatctgctttattagactacagttcacttattgcatagaaactggacttggctttacattcttaatgtacttttacttttcctcaagatatgaacttactctcttgaagctgaattttcttttactacttaaatcatttatgtatatctggtaaattatgaccaaatttttgttagattgcatacagtaaattgaaatacacacttggtacactacgggattgttgtgcttttgtttggttttagttggaaataaggtttgatgtagatggcttgttactgttaatttaaaatattctataattgtccattactttatgttgtgttgtgacagatttggctatatttttagtcaattgaaatatgatactttaaaagtttgtttttaggtaatccaaaggaaaagtgtttatactcttgaatatattagcctcagcctatataaaaatttctttgaagtaaacattttaccggaaacagaattgacagatttttctacttgctgactgcctaacttattttgtttcatgatctcgagggactgccttttcccatctagatcttttaaaaaaatagttttagtactaaggtatactactggacatttctatttttttaagtgtattctttttctgacttacagtaaaatttcaggaagttgatagatactaagaacttatgattggtctcagaggtaacaatgaaatactcataattttgtctgtggaactctggcagaattatgttacacatttggcgaagttgtctcttgtaatttatattttaaatgaaaaagtattttagagcttttaa

SEQ ID NO: 41640 - DNA, 10132 bp, Artificial Sequence
  derived and/or modified sequence
aaaggaggttgtgtccgtggtcgtaacctcttcgcgtgaaaggcaccgcctggtccagtctttgtgaaggaacaaaataagttcacttccttgggcaccgccacccaccctcagcaaatgacaaggctggagcgcagctcccaccgcacagttatttgcaaagtcccaggtgaactcgtggcgagagaaggaaaatgcgcgtcccgggcgcgggtagggcctggtcggacggaaacgctccgccggctttattgtcgcttcgttatgtggcggagccgagcagtttagcgtgcctctcaccctcagcgcctgcgaagccggcggcggcgtcgggactcctcggcgcgcggaggaaggatatctgtgtggaggatcggtgtgtgcgcgcgcggctttaaagagggggcagcggagggtctccccgcactccgctgctcaacttcgaaggcctcgctcgctgcaggctcgctcctcacctctccgccgcccgcccccttctccgcgcgggacgctgcccggagcgcggcggggcgggggtggaggacgagagagcggtcggaggcgtcggcccggcagcggcagcggcagcggacgcgtgcagcagacccgggagcgagcgcgagccgggctgccgggcgagagggcgaggccgagccccgcgagaccggaacgccgggggcgggggcgagacagagggggagccgcggggagcgcgcgggacgcggcccgaggccgtgcgcgagccggggcaccgggcggcggcggcggcggcgcgcgccatgtcgttcagtgaaatgaaccgcaggacgctggcgttccgaggaggcgggttggtcaccgctagcggcggcggctccacgaacaataacgctggcggggaggcctcagcttggcctccgcagccccagccgagacagcccccgccgccagcgccgcccgcgcttcagccgcctaatgggcggggggccgacgaggaagtggaattggagggcctggagccccaagacctggaggcctccgccgggccggccgccggcgccgccgaggaagccaaggagttgctgctcccccaagacgcgggcggccccacctcgcttggcggtggcgcggggggccccctgctagcggaaaggaaccgtcggactctggccttccgaggcggcggcggcgggggtctcggcaacaatggcagtagccgcggccgccccgagacctcggtgtggcccttgaggcatttcaatgggcgagggccggcgactgtggatctggagctggacgcgctggaggggaaggagttgatgcaggacggcgcgtccctgagcgacagcaccgaggacgaggaggagggggcgagcctgggcgacggcagcggggcggaaggcggcagctgcagcagcagcaggcggtcgggcggcgatggcggggacgaagtggagggcagcggtgtgggagctggcgaaggagagactgtccagcacttcccgctcgcgcggcccaagtctctaatgcagaagctccaatgctccttccagacctcctggctcaaggactttccctggctgcgctattccaaggatactggtcttatgtcttgcggctggtgccaaaagacccctgcagatgggggaagcgtggaccttcccccagtggggcatgatgagctttcgcgagggacccgcaactacaagaaaaccctcctcctgaggcaccacgtctctaccgagcacaaactccacgaagccaacgcccaggagtcagaaataccatcagaggaggggtactgtgactttaatagtaggccaaatgagaactcttattgctatcaacttctgcgacaactaaatgaacagagaaagaaaggtattctttgtgatgtcagcattgtggtaagcggaaaaatcttcaaagctcataagaacatcctggttgcaggcagccgtttctttaagactttatattgcttttcaaacaaagaaagccctaaccaaaacaatactacccacttagatattgctgcagttcaaggtttttcagtcatcttggacttcttgtattctggtaacctggtgctcacaagccaaaatgccattgaagttatgaccgtggccagctatcttcaaatgagtgaagttgttcaaacttgccgaaatttcattaaagatgccttaaatataagcattaaatcagaagctccagagtctgtagttgtggactataataatagaaaaccagttaatagagatggtctgtcttcatcacgggatcaaaaaattgccagtttttgggcaacacggaatcttaccaatttggcaagtaatgtaaagattgaaaatgatggttgtaatgtcgacgagggccaaatagaaaactaccaaatgaatgacagtagttgggtccaggatggatctcctgaaatggctgaaaatgaatctgaaggtcaaacaaaagtgtttatttggaataatatgggctcccagggaattcaagagactggcaaaacaaggaggaaaaaccaaactacaaaaagatttatttataatattccacctaataatgaaacgaatttagaagattgctcagtaatgcagccacctgttgcctatccagaagaaaatacactactcatcaaggaagaaccagatttagatggtgctctactctcggggccagatggtgataggaatgtgaatgcaaatttattggctgaagctggcactagtcaagatggaggtgatgctggtacttcacatgatttcaagtatggtttgatgcctggtccttcaaatgatttcaagtatggattgataccaggtacttcaaatgatttcaagtatggattgataccaggtgcttcaaatgatttcaagtatggattattgccagaatcttggccaaaacaagaaacctgggaaaatggtgaatcatctctaatcatgaacaagttaaaatgccctcattgtagctatgtagccaaatacagacgaacactaaaaaggcacttgctcattcacacaggagtgagatcatttagctgtgatatttgtggaaaactgtttactcgaagagaacatgtaaaaagacattccctggtgcataaaaaggataaaaaatacaaatgtatggtgtgtaagaagatcttcatgttagcagccagtgttggaataagacatggatctcgacgttatggtgtttgtgtagactgtgcagataaatcacagccaggagggcaagaaggtgtagatcagggacaggatacagaattccctcgggatgaagaatacgaggagaatgaagtaggagaagctgatgaagagctagttgatgatggagaagatcagaatgatccctctcgatgggatgaatcaggagaagtttgtatgtctctagatgattaactgacctactatactcctcaaggatgctgcatttggacctaatatgaatcgacaatttggattgttgaacttgaaggcttgcaaaatatggtacatgctggatagtagttatgttgctgtgaaaactgtagggtcaaagccttatagcaaaaaaaatttttttttatatttgcacaggactatacagcaaacaaccatgtggttggattacatggagtccccacatactcagtcagttatcaaagtaaaatattttttatttataggatatacagtaactatttgggtcctatgaaaatagtccttaaagagcttacattcatgtgctactttaacatgaatggagaaaatccgtttatggaagtacagtgacaattgacccaatcactctgtccatcaaaccactcaggctagtttgtactagtagagttttgtttctatttttatttttattaattttattttttttaatacagattttcagtgaggggctttttcaaccccattggttctattttcttgtatttttccatttaatttgcttcataacttaaaccaagtctcttctagtcttaggtattatttctcgattttgtgctgatgggcatgtttataagaactggagaggtaatttattggaatgaactaactgacttcctccattcccctcttcctttttgacatgaattttactacttcacaaatgaagaatgatgttatgaagttaccgtggcgaagttgacaaataccactaaaatgattatgatttagaagtaactttcttctgctgctctaatctgataaatggttactatatgatattttctgacatggtatttggttttgggtatctgttactttggcactattcttgtttgcctctttatttttgccagtgtactatacctcagtcctatttgaaagacctaattgaaagaaaaatcatagaaataagtaaaatgatttgttttataatttatccaccatgtccagtttggttagcttgttatgcaatataagtgaaatatcaggtttttacccgtgtcccttttatcatgaaaattaacacaaaatgtgcattctcttttgtttcatacttagcgggatattgattgttttgaaattatgatcaatacttaatttatttttttctgtccttgaagtcactacaccttgatacagtctttctagtagtcaccatgattcaacagtctcaaaaatcttacaaataaaattctgagaagctttattattctataaattcttcagggtacaaagggtgacatattgaggtgaaattgtcagatttacttagcctggtgacatgaattagctgattgtggaactctcagcagcatttcacgtattgttaacatgtatggcatttattagcatattgtatattatataagattgagggatgtcatattttcagctttcttttaaataaaaattgagtatattttcctattttatatcaggtaactaaattatgctagttatgtggaaaaaattgcaaagatgctttgacagatataatccctttggtgctccatctgatcaaagttgaaaagttgatgttttttaagagacaagctttatcattgtctctgatttcagtagaataatggtttattgttagacaatgatgtttctgcttggataaatcaaagataaattacagttacatggttagatgcatcttttgtcatctatattgtagtttctacataactgtaaacctgacagataagaatagtttcggtttgatttttgtttaaaacagatgagtacttcttaatgttctagacaaatgagtaaaatgtatttctggtagaaattagttgggcaaagatactatgaatgaaaaagtattttaaacgtaaaatgttctttgtgaatatgtaagtatagtataaagatttctttcatcccatttatccccttcctttaaataaactagtttacaattggtagatctgtctatatataaatatatattaaagaacaaagatatatatctaaaaatcacctaaatctgctttattagactacagttcacttattgcatagaaactggacttggctttacattcttaatgtacttttacttttcctcaagatatgaacttactctcttgaagctgaattttcttttactacttaaatcatttatgtatatctggtaaattatgaccaaatttttgttagattgcatacagtaaattgaaatacacacttggtacactacgggattgttgtgcttttgtttggttttagttggaaataaggtttgatgtagatggcttgttactgttaatttaaaatattctataattgtccattactttatgttgtgttgtgacagatttggctatatttttagtcaattgaaatatgatactttaaaagtttgtttttaggtaatccaaaggaaaagtgtttatactcttgaatatattagcctcagcctatataaaaatttctttgaagtaaacattttaccggaaacagaattgacagatttttctacttgctgactgcctaacttattttgtttcatgatctcgagggactgccttttcccatctagatcttttaaaaaaatagttttagtactaaggtatactactggacatttctatttttttaagtgtattctttttctgacttacagtaaaatttcaggaagttgatagatactaagaacttatgattggtctcagaggtaacaatgaaatactcataattttgtctgtggaactctggcagaattatgttacacatttggcgaagttgtctcttgtaatttatattttaaatgaaaaagtattttagagcttttaatgaaggggaagagtataaactttctttcatattcactctgtagttacagaccgtctcataaatcaagattgtgcattattagagttctcagagacagatacttccatatggacccctgttcatttttcttatttactagatattttgctaaatttagcacactagcaattaagagtttaaaaaagaagaaacgttataggaaagggaaactgaacagtaatgagtagctttgaaattggggaaaacacactagctgggttaggtacagctatcctaatggagaagagtgagctaaatgcgttaattcatgtaaagtgcttagaacactggtacataataggtgcataacacatcttaaagttgtttaataatagataagaaccaagaggaaaaagaaataagaaaagatgggggaaaggaaggagaaaataggaaatgaaaggattaggacttgggcatttatattaatacaaaatggtgtaaacggcctgaatatcactgtagtagtatcatacgggggaaagtgtgatggaaaataggtttaaaaatcttaatttttaaaactttagtaagctttatttatattttttaggattttctgaacatagcatgaagggtttagattcatttttctgaaaaacgattaaaaaaactaccaattttttttttgagtgcccacacttgccgttgtgctgtatacatgattttaccttaatcctctataaggtaggtgctaattgtctccattttatagatgaggaaaggctcagagaaattcagaaacttggctaatttaacacagctgtgacagagctcgaatttgaccacgtctgattctgaagcccatactctttcagggaggctctattgctgcctcattaaacaactcttgtagaatttcagctcttaatggagtctatggattatatttttcctataagacagctgtgtttagaattttgagtgtctttcctccccccaataaatttccttactactctttcttcataaagcagttgttttgtcactttgactatattaagacacatcagtgtagcacatgctcttaactggctgtggcattttaattttataaaagaatggtttttatctgaagaactagatagaaaccccagtttttgtgccgttcagtcacccagatccttaaacttaactatggtacataatatccacacttagaactaacaggtgtttagtcactttaggacttaaaatggaaagtttttttttttttcctgctgtatctctgctttcaactgaagttaaagaattctagatagtttaaaatgtgttagggataagcacacttcaaaagatgttttctagccctaaattttatgacattgggtacttaaatttggagtacactagctattgagaacaatattttgggttgaggagagatggttgaggccattatttagtgggagcattggcattttgaacactgtaaacaaaagaacacttccgcctgctgtttgtaaaagctctttgggaagatcttttacgaagaccaactttttaaaatgtaaattacctacctaatataagtgtcctaagacatgtatgtaaacttccggaactgttttgtctgtgtatttagaaaatacacaagaatctttattcaaacctaaaaatataaacttgtgagcactaaactgcttctggctttgtgaattttattgactgacatttaattcagatttctttgcaagtgtactaatttagactaattggggtaaggggaacaccttaatgaactttgacttatgtataattcagatatctttgtacttaaggcttacaagtttgaattatggaatactataagggttttttgtttatttgtatgtttttatatgaaagtacataaatgacagactacctccaagtaatcctgctttaattaatagcagtgatttgtaatcagtgtatcttttaagattctctacaggttttagaaaatattaaaaattccctgtaatttacatttgtgcataatcttggaaatgggttgaaaagcaaaggtaaactgcttcatcccatgttgtatatttgtggactgattgactacaagtgatgtgatgttataaatttgaagtctttgaaactttattaatgtagagaaaacataactagctttttaggttatttcaaagttagtaatagagcaaaggaaatcagaactggccagatattcagacttgacttagaaaaacaggagtttgttgattttgtttggagaagggcacaataaaggggagcccacatagcattataatgcctagtatctttaaacatgtaaagagctatcatgaggcagaagaattaagaaactttatatgtttctaaggggtcatgattgggaccattggctcaagattgaaaatcggtttttaattatccaaagatgaaatggggctgcttcagaaaaaggtctaccactggagataacgctatgaaaagtgaaagagattacttaatcattttgacaaaggcagtattgaccagacatttctatttcagagttggatttgtgcttagttttttttaggtgttgggacccttgtagttgctttttattttgcttagtcaacaaacactaaaatgataaaatttggtatgtataagtactggacgaaggatgttttgacactaaaaaggacataatttaggaaattaagaatttagacaccaagtttggcttaatagaaaaagtcactatctgaacttctttctttttcaccacaaatcaccgcagaccagtgtttgggagcaggtgtaggaaattgaattattggatctatgtttaggtaagaaaactaaaggtacttcagaatttaggctatgacataactgtctttctgaagtttaaagaaagaaagtgaactatagaaatctattcagctaattaaagtgaatgaaaaatattacagattccataactgcatggcgccttacctgctattaatactgccgccttactgtcagccagatgattttttcccaccacggccagtcttaaatttggcaataagaaaaagctaatcttccaagtgtaagtaggtatgtgttagaatcttggtgaaagataaacacaagacagtcttcttggcgcaggtcctaacagttggtgagataatacataagatggtttcaggattattgtagaattatttaggttgaaagagactgtaagagactaatgaagcatacccagagaggttgctacagtgactccagtcagttttaggacccaggactcctgaacttcaatttcagtattatttttctgtaccaaactcattcaataaatacttgagattagggataagtttgaagttagaagattccagagtacactcaaatagtatttggcacatagcttgttgatcaaaagtatttactaagtgagtgacaaaaggcactagcaactttaaggattttgcctattagtatcatatggcatgtagctatcaagccagtttcgtttagttattttgtgttgccaagcatatgatacgtggtgtcacactgagcctttgggatcctttccctggatacataaccctagtagataatgttactgcaagatgtaatgaccaaatccaacctactgcaaatgttactatggaaatctcaatgcaaaagtagcctttgtgattttttttttaaaccgtctccataacagaacacttagaattattagccatttgctgcaaagtatttgttttaaaatgtctggcatatacaccactaacatttaaatgcccaacattcggtctatacgtgaaaaaactagaagaaaagccctgttggagttttgatgtagagtgcaataatacatcaataaaggtattttaaaatga

SEQ ID NO: 41641 - protein, 1117 aa, Artificial Sequence
  derived and/or modified sequence
METFFRRHFRGKVPGPGEGQQRPSSVGLPTGKARRRSPAGQASSSLAQRRRSSAQLQGCLLSCGVRAQGSSRRRSSTVPPSCNPRFIVDKVLTPQPTTVGAQLLGAPLLLTGLVGMNEEEGVQEDVVAEASSAIQPGTKTPGPPPPRGAQPLLPLPRYLRRASSHLLPADAVYDHALWGLHGYYRRLSQRRPSGQHPGPGGRRASGTTAGTMLPTRVRPLSRRRQVALRRKAAGPQAWSALLAKAITKSGLQHLAPPPPTPGAPCSESERQIRSTVDWSESATYGEHIWFETNVSGDFCYVGEQYCVARMLKSVSRRKCAACKIVVHTPCIEQLEKINFRCKPSFRESGSRNVREPTFVRHHWVHRRRQDGKCRHCGKGFQQKFTFHSKEIVAISCSWCKQAYHSKVSCFMLQQIEEPCSLGVHAAVVIPPTWILRARRPQNTLKASKKKKRASFKRKSSKKGPEEGRWRPFIIRPTPSPLMKPLLVFVNPKSGGNQGAKIIQSFLWYLNPRQVFDLSQGGPKEALEMYRKVHNLRILACGGDGTVGWILSTLDQLRLKPPPPVAILPLGTGNDLARTLNWGGGYTDEPVSKILSHVEEGNVVQLDRWDLHAEPNPEAGPEDRDEGATDRLPLDVFNNYFSLGFDAHVTLEFHESREANPEKFNSRFRNKMFYAGTAFSDFLMGSSKDLAKHIRVVCDGMDLTPKIQDLKPQCVVFLNIPRYCAGTMPWGHPGEHHDFEPQRHDDGYLEVIGFTMTSLAALQVGGHGERLTQCREVVLTTSKAIPVQVDGEPCKLAASRIRIALRNQATMVQKAKRRSAAPLHSDQQPVPEQLRIQVSRVSMHDYEALHYDKEQLKEASVPLGTVVVPGDSDLELCRAHIERLQQEPDGAGAKSPTCQKLSPKWCFLDATTASRFYRIDRAQEHLNYVTEIAQDEIYILDPELLGASARPDLPTPTSPLPTSPCSPTPRSLQGDAAPPQGEELIEAAKRNDFCKLQELHRAGGDLMHRDEQSRTLLHHAVSTGSKDVVRYLLDHAPPEILDAVEENGETCLHQAAALGQRTICHYIVEAGASLMKTDQQGDTPRQRAEKAQDTELAAYLENRQHYQMIQREDQETAV

SEQ ID NO: 41642 - DNA, 3354 bp, Artificial Sequence
  derived and/or modified sequence
atggagaccttcttcagaagacacttcagaggcaaggtgcccggccccggcgagggccagcagagacccagcagcgtgggcctgcccaccggcaaggccagaagaagaagccccgccggccaggccagcagcagcctggcccagagaagaagaagcagcgcccagctgcagggctgcctgctgagctgcggcgtgagagcccagggcagcagcagaagaagaagcagcaccgtgccccccagctgcaaccccagattcatcgtggacaaggtgctgaccccccagcccaccaccgtgggcgcccagctgctgggcgcccccctgctgctgaccggcctggtgggcatgaacgaggaggagggcgtgcaggaggacgtggtggccgaggccagcagcgccatccagcccggcaccaagacccccggcccccccccccccagaggcgcccagcccctgctgcccctgcccagatacctgagaagagccagcagccacctgctgcccgccgacgccgtgtacgaccacgccctgtggggcctgcacggctactacagaagactgagccagagaagacccagcggccagcaccccggccccggcggcagaagagccagcggcaccaccgccggcaccatgctgcccaccagagtgagacccctgagcagaagaagacaggtggccctgagaagaaaggccgccggcccccaggcctggagcgccctgctggccaaggccatcaccaagagcggcctgcagcacctggccccccccccccccacccccggcgccccctgcagcgagagcgagagacagatcagaagcaccgtggactggagcgagagcgccacctacggcgagcacatctggttcgagaccaacgtgagcggcgacttctgctacgtgggcgagcagtactgcgtggccagaatgctgaagagcgtgagcagaagaaagtgcgccgcctgcaagatcgtggtgcacaccccctgcatcgagcagctggagaagatcaacttcagatgcaagcccagcttcagagagagcggcagcagaaacgtgagagagcccaccttcgtgagacaccactgggtgcacagaagaagacaggacggcaagtgcagacactgcggcaagggcttccagcagaagttcaccttccacagcaaggagatcgtggccatcagctgcagctggtgcaagcaggcctaccacagcaaggtgagctgcttcatgctgcagcagatcgaggagccctgcagcctgggcgtgcacgccgccgtggtgatcccccccacctggatcctgagagccagaagaccccagaacaccctgaaggccagcaagaagaagaagagagccagcttcaagagaaagagcagcaagaagggccccgaggagggcagatggagacccttcatcatcagacccacccccagccccctgatgaagcccctgctggtgttcgtgaaccccaagagcggcggcaaccagggcgccaagatcatccagagcttcctgtggtacctgaaccccagacaggtgttcgacctgagccagggcggccccaaggaggccctggagatgtacagaaaggtgcacaacctgagaatcctggcctgcggcggcgacggcaccgtgggctggatcctgagcaccctggaccagctgagactgaagccccccccccccgtggccatcctgcccctgggcaccggcaacgacctggccagaaccctgaactggggcggcggctacaccgacgagcccgtgagcaagatcctgagccacgtggaggagggcaacgtggtgcagctggacagatgggacctgcacgccgagcccaaccccgaggccggccccgaggacagagacgagggcgccaccgacagactgcccctggacgtgttcaacaactacttcagcctgggcttcgacgcccacgtgaccctggagttccacgagagcagagaggccaaccccgagaagttcaacagcagattcagaaacaagatgttctacgccggcaccgccttcagcgacttcctgatgggcagcagcaaggacctggccaagcacatcagagtggtgtgcgacggcatggacctgacccccaagatccaggacctgaagccccagtgcgtggtgttcctgaacatccccagatactgcgccggcaccatgccctggggccaccccggcgagcaccacgacttcgagccccagagacacgacgacggctacctggaggtgatcggcttcaccatgaccagcctggccgccctgcaggtgggcggccacggcgagagactgacccagtgcagagaggtggtgctgaccaccagcaaggccatccccgtgcaggtggacggcgagccctgcaagctggccgccagcagaatcagaatcgccctgagaaaccaggccaccatggtgcagaaggccaagagaagaagcgccgcccccctgcacagcgaccagcagcccgtgcccgagcagctgagaatccaggtgagcagagtgagcatgcacgactacgaggccctgcactacgacaaggagcagctgaaggaggccagcgtgcccctgggcaccgtggtggtgcccggcgacagcgacctggagctgtgcagagcccacatcgagagactgcagcaggagcccgacggcgccggcgccaagagccccacctgccagaagctgagccccaagtggtgcttcctggacgccaccaccgccagcagattctacagaatcgacagagcccaggagcacctgaactacgtgaccgagatcgcccaggacgagatctacatcctggaccccgagctgctgggcgccagcgccagacccgacctgcccacccccaccagccccctgcccaccagcccctgcagccccacccccagaagcctgcagggcgacgccgcccccccccagggcgaggagctgatcgaggccgccaagagaaacgacttctgcaagctgcaggagctgcacagagccggcggcgacctgatgcacagagacgagcagagcagaaccctgctgcaccacgccgtgagcaccggcagcaaggacgtggtgagatacctgctggaccacgccccccccgagatcctggacgccgtggaggagaacggcgagacctgcctgcaccaggccgccgccctgggccagagaaccatctgccactacatcgtggaggccggcgccagcctgatgaagaccgaccagcagggcgacacccccagacagagagccgagaaggcccaggacaccgagctggccgcctacctggagaacagacagcactaccagatgatccagagagaggaccaggagaccgccgtgtag

SEQ ID NO: 41643 - DNA, 4086 bp, Artificial Sequence
  derived and/or modified sequence
tgctagctctccaaactaggacttgctcagcagaggccgccagcccggagctggatccagagcccggccttggggaccccagctcccacctgcgccctgccttccagatcagccaaccgcctgccatggagactttctttaggagacatttccgggggaaggtgccaggccctggagaggggcagcagcggcccagcagcgtggggctgcccacaggcaaggcccggcgtcgctcccccgctgggcaggcctcctcctcactggcacagcggcgccgctccagcgcccagctccagggctgcctcctgagttgcggggtgagggcccagggttccagccgccggcgctccagcactgtgcccccttcctgcaacccccgcttcatcgtggataaggtgctcactccacagcctaccaccgtgggggcccagcttctgggtgcacccctgctgttgaccgggcttgtgggcatgaatgaggaggagggtgtccaggaggatgtggtagccgaggcatcgagcgccatccagccaggcaccaagacaccagggccacccccacctcggggcgcccagccgctgttgcccctaccccgctacctgcgccgagcctcctcccacctgctccccgcggatgccgtatatgaccacgctctctggggcctgcacggctactatcggcgcctcagccagcggcggccctcaggccagcaccctggccctgggggccgaagagcctcaggcaccaccgccggcaccatgctgcccacccgtgtgcgcccactgtcccgcaggcgccaggtagccctacggcgcaaggcggccggaccccaggcctggagcgccctgctcgcgaaagccatcaccaagtcgggcctccagcacctggccccccctccgcccacccctggggccccgtgcagcgagtcagagcggcagatccggagtacagtggactggagcgagtcagcgacatatggggagcacatctggttcgagaccaacgtgtccggggacttctgctacgttggggagcagtactgtgtagccaggatgctgaagtcagtgtctcgaagaaagtgcgcagcctgcaagattgtggtgcacacgccctgcatcgagcagctggagaagataaatttccgctgtaagccgtccttccgtgaatcaggctccaggaatgtccgcgagccaacctttgtacggcaccactgggtacacagacgacgccaggacggcaagtgtcggcactgtgggaagggattccagcagaagttcaccttccacagcaaggagattgtggccatcagctgctcgtggtgcaagcaggcataccacagcaaggtgtcctgcttcatgctgcagcagatcgaggagccgtgctcgctgggggtccacgcagccgtggtcatcccgcccacctggatcctccgcgcccggaggccccagaatactctgaaagcaagcaagaagaagaagagggcatccttcaagaggaagtccagcaagaaagggcctgaggagggccgctggagacccttcatcatcaggcccaccccctccccgctcatgaagcccctgctggtgtttgtgaaccccaagagtgggggcaaccagggtgcaaagatcatccagtctttcctctggtatctcaatccccgacaagtcttcgacctgagccagggagggcccaaggaggcgctggagatgtaccgcaaagtgcacaacctgcggatcctggcgtgcgggggcgacggcacggtgggctggatcctctccaccctggaccagctacgcctgaagccgccaccccctgttgccatcctgcccctgggtactggcaacgacttggcccgaaccctcaactggggtgggggctacacagatgagcctgtgtccaagatcctctcccacgtggaggaggggaacgtggtacagctggaccgctgggacctccacgctgagcccaaccccgaggcagggcctgaggaccgagatgaaggcgccaccgaccggttgcccctggatgtcttcaacaactacttcagcctgggctttgacgcccacgtcaccctggagttccacgagtctcgagaggccaacccagagaaattcaacagccgctttcggaataagatgttctacgccgggacagctttctctgacttcctgatgggcagctccaaggacctggccaagcacatccgagtggtgtgtgatggaatggacttgactcccaagatccaggacctgaaaccccagtgtgttgttttcctgaacatccccaggtactgtgcgggcaccatgccctggggccaccctggggagcaccacgactttgagccccagcggcatgacgacggctacctcgaggtcattggcttcaccatgacgtcgttggccgcgctgcaggtgggcggacacggcgagcggctgacgcagtgtcgcgaggtggtgctcaccacatccaaggccatcccggtgcaggtggatggcgagccctgcaagcttgcagcctcacgcatccgcatcgccctgcgcaaccaggccaccatggtgcagaaggccaagcggcggagcgccgcccccctgcacagcgaccagcagccggtgccagagcagttgcgcatccaggtgagtcgcgtcagcatgcacgactatgaggccctgcactacgacaaggagcagctcaaggaggcctctgtgccgctgggcactgtggtggtcccaggagacagtgacctagagctctgccgtgcccacattgagagactccagcaggagcccgatggtgctggagccaagtccccgacatgccagaaactgtcccccaagtggtgcttcctggacgccaccactgccagccgcttctacaggatcgaccgagcccaggagcacctcaactatgtgactgagatcgcacaggatgagatttatatcctggaccctgagctgctgggggcatcggcccggcctgacctcccaacccccacttcccctctccccacctcaccctgctcacccacgccccggtcactgcaaggggatgctgcaccccctcaaggtgaagagctgattgaggctgccaagaggaacgacttctgtaagctccaggagctgcaccgagctgggggcgacctcatgcaccgagacgagcagagtcgcacgctcctgcaccacgcagtcagcactggcagcaaggatgtggtccgctacctgctggaccacgcccccccagagatccttgatgcggtggaggaaaacggggagacctgtttgcaccaagcagcggccctgggccagcgcaccatctgccactacatcgtggaggccggggcctcgctcatgaagacagaccagcagggcgacactccccggcagcgggctgagaaggctcaggacaccgagctggccgcctacctggagaaccggcagcactaccagatgatccagcgggaggaccaggagacggctgtgtagcgggccgcccacgggcagcaggagggacaatgcggccaggggacgagcgccttccttgcccacctcactgccacattccagtgggacggccacggggggacctaggccccagggaaagagccccatgccgccccctaaggagccgcccagacctagggctggactcaggagctgggggggcctcacctgttcccctgaggaccccgccggacccggaggctcacagggaacaagacacggctgggttggatatgcctttgccggggttctggggcagggcgctccctggccgcagcagatgccctcccaggagtggaggggctggagagggggaggccttcgggaagaggcttcctgggccccctggtcttcggccgggtccccagcccccgctcctgccccaccccacctcctccgggcttcctcccggaaactcagcgcctgctgcacttgcctgccctgccttgcttggcacccgctccggcgaccctccccgctcccctgtcatttcatcgcggactgtgcggcctgggggtggggggcgggactctcacggtgacatgtttacagctgggtgtgactcagtaaagtggatttttttttcttt

SEQ ID NO: 41644 - DNA, 3354 bp, Artificial Sequence
  derived and/or modified sequence
atggaaactttctttcggcgccattttcggggaaaggtgccaggaccaggggaagggcaacagcgacccagcagcgtggggctaccaactggcaaggcccggaggagatctcccgcagggcaggccagtagttccttggcacagcggcgcaggagttccgcccaactgcagggttgcctcctctcgtgcggggtacgggcccagggctcctctcggcgccgctcatcaactgtccctcctagctgcaatccacgcttcatagtggataaggttctaacacctcagcctacaaccgtgggggctcagctgttgggggctcctttgttgctcactggcctggtgggcatgaacgaagaagagggcgtgcaagaggacgttgtcgcggaggccagtagtgctattcagcccggcacgaaaaccccaggcccccctcccccccgcggtgcccagccccttctgccattacctagatacctcaggcgggctagtagtcacctgctccctgcggacgcagtctacgatcacgccctatggggcctgcacggatattatcgaaggctgtctcaaagacgaccttctggacagcacccaggccccggggggagaagagccagcggtaccactgcgggcacaatgttgcccactagagtgcgccccctaagtagacggcgacaagttgccctacgaaggaaagcagccggacctcaggcctggtctgctctcctggccaaagccataaccaaaagcgggcttcagcatttagcacctccgcctcccacacccggcgccccatgtagcgagtcggaacgacaaatccgctccacagtggattggtcagagagtgccacatacggagagcacatctggttcgaaacaaacgtatccggagacttttgctacgtcggcgagcagtattgtgtggcccgcatgcttaagtccgtgagcagacggaaatgcgctgcttgcaaaatcgttgttcatactccttgtatagaacagctggaaaaaatcaactttcgttgcaagccttccttccgtgagagcggtagccgcaacgtccgagagcctactttcgtgcggcatcattgggtgcatcgccgccgccaggacgggaaatgccggcattgtggaaaaggttttcaacagaaattcactttccattcaaaagaaattgtggccatctcgtgttcatggtgcaagcaggcctaccactctaaggtctcttgtttcatgctgcaacagattgaggagccctgctctttaggagttcacgccgctgtcgttatccctccaacttggatcctcagggcccggcgcccccaaaacaccctcaaggcatccaagaaaaagaagagagctagtttcaaaaggaagagctcaaagaaggggccagaagagggccgctggcgcccatttatcatccgaccgactccgtctccactcatgaagccactcctcgtattcgttaatcccaaatcaggtggcaatcaaggagcaaagataatccagtctttcctctggtacctgaatccacgacaggtctttgatctgtcccagggcggcccaaaagaggcactggagatgtacaggaaagtccacaatctgagaattctcgcttgcgggggggacggtaccgtaggctggattctctccaccttggaccaacttagactgaagccccctccccctgtggccatcctgccactggggacaggcaacgatctcgcaaggaccctcaactggggaggggggtatacagacgagcccgtttcaaagatcctttcccacgtggaggagggcaatgtcgtgcaactggaccgatgggatttgcacgctgaaccgaatcccgaggcgggaccagaagaccgtgacgagggcgccactgaccgcctaccactcgacgtgtttaacaactatttctccctcgggtttgacgcacacgtgacccttgagttccacgaatcacgcgaagctaacccggaaaagttcaactctcgtttccggaacaagatgttttacgctggaacagccttttccgacttcctgatgggttcttctaaggatttagccaagcacatccgggtggtttgcgatggaatggacctcaccccaaagatacaagacttgaagccacaatgcgtggtgtttttaaacattcctcgctattgtgctgggacaatgccctggggtcatcccggtgaacatcacgacttcgaaccacagcgtcatgatgatggctacttggaagtgatcgggtttacaatgacttccctcgccgcgctgcaggtgggtggccacggcgagagactgacacagtgcagggaggtggtgctaaccacctctaaggctatcccagtgcaggtagacggcgaaccctgtaagcttgccgcctcccggatacgaatagccctgaggaatcaggccaccatggtgcagaaggctaagcggcgtagcgccgcacccctgcattccgatcagcagcctgtccccgagcagctccgcatccaagtgtcacgggtgagcatgcatgattacgaagccctgcactacgacaaggagcagctgaaggaggccagcgtgcctctgggaacagtggtggttcccggggactcggatcttgaactgtgccgcgcccatatcgaacgactgcagcaggaacccgatggagccggtgctaagtcacccacctgtcaaaagctgtctccgaagtggtgcttcctggatgctacaaccgcttcccgattttatagaatcgaccgcgcgcaggaacatctgaattacgtgaccgaaatagcacaggacgagatatacatactggatccagaactactgggggcatccgcgcgccccgatctgccgacaccaaccagtccacttccgacttctccttgtagcccaacccctcgttctcttcagggagatgccgctccgccacagggcgaagagctgatcgaggcagcaaagagaaatgacttttgcaaacttcaggagctgcaccgggctgggggcgacctgatgcacagggacgagcagtccaggacgttgttacatcacgccgtttcaaccggatccaaagacgtcgtcagatacctgcttgaccacgccccccctgagatccttgacgcagtcgaggagaatggcgagacttgtttgcatcaggctgctgccctcggccagagaactatttgccattacatcgtggaggccggagcgagtctgatgaaaaccgaccaacaaggagatacccccaggcaacgtgctgaaaaggcacaggataccgaactggcagcatatctggagaaccgtcagcactatcaaatgatccagcgagaagatcaggaaacggccgtgtag

SEQ ID NO: 41645 - DNA, 3354 bp, Artificial Sequence
  derived and/or modified sequence
atggagaccttcttccgccgccacttccggggcaaggtgcccggccctggagagggccagcagaggcccagctctgtgggcctgcccaccgggaaggccaggagaagaagccctgctggccaggccagcagcagcctggcccagaggcggcgcagcagcgcccagctgcagggctgcctgctgagctgtggggtgcgggcccagggcagcagcagaagaagaagcagcacagtgccccccagctgcaacccccgcttcatcgtggacaaggtgctgaccccccagcccaccaccgtgggcgcccagctgctgggcgcccccctgctgctgaccggcctggtgggcatgaatgaggaggagggcgtgcaggaggatgtggtggccgaggccagcagcgccatccagcccggcaccaagaccccaggccccccaccacccaggggggcccagcccctgctgcccctgccccgctacctgcggcgggccagcagccacctgctgcctgcagatgctgtgtatgaccacgccctgtggggcctgcacggctactacagaaggctgagccagaggcggcccagcggccagcaccctggccctgggggccggcgggccagcggcaccacagctggcaccatgctgcccaccagggtgcggcccctgagcagaagacggcaggtggccctgcggaggaaggctgctggcccccaggcctggagcgccctgctggccaaggccatcaccaagagcggcctgcagcacctggcccctcctccacccacccctggggccccctgcagcgagagcgagcggcagatccgcagcacagtggactggagcgagagcgccacctacggggagcacatctggtttgagaccaacgtgtctggggacttctgctacgtgggggagcagtactgtgtggccaggatgctgaagtctgtgtccaggaggaaatgtgccgcctgcaagatcgtggtgcacaccccctgcatcgagcagctggagaagatcaacttccgctgcaagcccagcttccgggagagcggcagcagaaatgtgcgggagcccacctttgtgcgccaccactgggtgcacagaagacggcaggacggcaagtgccgccactgtgggaagggcttccagcagaagttcaccttccacagcaaggagatcgtggccatcagctgctcctggtgcaagcaggcctaccacagcaaggtgtcctgcttcatgctgcagcagatcgaggagccctgcagcctgggcgtgcatgctgctgtggtgatcccccccacctggatcctgcgggcccggcggccccagaacaccctgaaggccagcaagaagaagaagagggccagcttcaagaggaagagcagcaagaagggccctgaggagggccgctggaggcccttcatcatccggcccacccccagccccctgatgaagcccctgctggtgtttgtgaaccccaagagcggcggcaaccagggcgccaagatcatccagagcttcctgtggtacctgaacccccggcaggtgtttgacctgagccagggcggccccaaggaggccctggagatgtacaggaaggtgcacaacctgcgcatcctggcctgtggaggagatggcaccgtgggctggatcctgagcaccctggaccagctgcggctgaagcccccacctcctgtggccatcctgcccctgggcactggaaatgacctggcccggaccctgaactggggcggcggctacacagatgagcctgtgtccaagatcctgagccacgtggaggagggcaatgtggtgcagctggaccgctgggacctgcacgccgagcccaaccctgaggccggcccagaagatagagatgagggcgccacagaccggctgcccctggatgtgttcaacaactacttcagcctgggctttgatgcccacgtgaccctggagttccacgagagccgggaggccaaccctgagaagttcaacagccgcttcaggaacaagatgttttatgccggcacagccttcagtgacttcctgatgggcagcagcaaggacctggccaagcacatccgggtggtgtgtgatggcatggacctgacccccaagatccaggacctgaagccccagtgtgtggtgttcctgaacatcccccgctactgtgccggcaccatgccctggggccaccctggagagcaccacgactttgagccccagagacatgatgatggctacctggaggtgattggcttcaccatgaccagcctggccgccctgcaggtgggcggccacggggagcggctgacccagtgccgggaggtggtgctgaccaccagcaaggccatccctgtgcaggtggatggagagccctgcaagctggccgccagccgcatccgcatcgccctgaggaaccaggccaccatggtgcagaaggccaagagaagatctgctgcccccctgcacagcgaccagcagcctgtgcctgagcagctgcgcatccaggtgtcccgggtgtccatgcatgactatgaggccctgcactatgacaaggagcagctgaaggaggcctctgtgcccctgggcaccgtggtggtgcctggggacagcgacctggagctgtgccgggcccacatcgagcggctgcagcaggagccagatggagctggggccaagagccccacctgccagaagctgagccccaagtggtgcttcctggatgccaccacagccagccgcttctacagaattgaccgggcccaggagcacctgaactacgtgacagaaattgcccaggatgagatctacatcctggaccctgagctgctgggcgccagcgcccggccagacctgcccacccccaccagccccctgcccaccagcccctgcagccccacccccaggagcctgcagggagatgctgccccaccccagggcgaggagctgattgaggccgccaagagaaatgacttctgcaagctgcaggagctgcacagagctggaggagacctgatgcacagagatgagcagagcaggaccctgctgcaccacgctgtgtccacaggcagcaaggatgtggtgcgctacctgctggaccacgcccctcctgagatcctggatgctgtggaggagaatggagagacctgcctgcaccaggccgccgccctgggccagaggaccatctgccactacatcgtggaggccggggccagcctgatgaagacagaccagcagggcgacaccccccggcagagagctgagaaggcccaggacacagagctggccgcctacctggagaaccggcagcactaccagatgatccagcgggaggaccaggagacagctgtgtag

SEQ ID NO: 41646 - DNA, 3354 bp, Artificial Sequence
  derived and/or modified sequence
atggagaccttcttccggcggcacttccggggcaaggtgcccggccctggggaaggacaacagcggcccagtagtgtggggctgccgacaggcaaggcgcgaagacgaagtcccgctggccaggctagtagttccctggcccaaaggcgaaggtcatctgctcaattacagggatgcctcctgagctgtggtgtgagagcccaggggagcagtagaagaagaagcagcacggtgcccccatcttgcaatcctagatttatcgttgacaaggtcttgacgcctcagccaaccacagtcggcgcccagcttctgggggctcctctcctcctcaccgggctcgttgggatgaatgaggaagagggcgttcaggaggacgttgtggctgaagcgagcagcgctattcagcctggcactaagactcccggtcctccgccccctagaggagcccaaccccttctgccactgccccgttacctccgtagggcaagctcccacctgctccctgctgacgctgtatacgaccatgccctgtggggattgcatggatattaccggcgacttagccagcgtcgccccagtggacaacacccgggaccaggagggagacgcgcctctgggaccaccgccggaacaatgctgcccacaagagtgaggcccctgagtagacggcggcaggtggccctgcggcggaaggcggccgggccccaggcctggtctgccctgctggctaaagctattactaagagtggcctccaacacctggccccacccccacccaccccaggagcgccctgctccgagagcgaacgacaaattagatccaccgtggactggtcagaaagcgccacttatggagagcatatttggttcgagaccaatgtctccggtgacttctgttacgtaggagaacaatattgcgtcgcccggatgctgaagtcagtgtcacggcgcaaatgcgctgcctgtaagattgtcgtccatactccatgcattgagcagctggaaaagataaactttcggtgcaagccttctttccgggaatcggggtctagaaacgtgcgtgaaccaacctttgtacgccatcactgggttcataggagaaggcaagacggtaagtgccggcactgcggtaaaggttttcagcaaaaatttacatttcatagcaaagagatcgtggcgatatcttgttcatggtgcaagcaggcctatcatagcaaggtctcctgtttcatgctgcagcaaatcgaggagccatgcagcctgggggtgcacgctgcggtggtgatcccacccacctggatcctcagggcgcgcaggccacagaacacattgaaggcatctaagaagaagaagcgtgcctctttcaagcgcaaaagttccaaaaagggtcctgaggaaggaagatggcgcccatttattattcggcctaccccttctccactcatgaagcccctgctagtttttgtcaaccccaaaagcgggggcaatcagggcgcaaagatcattcaatcctttctgtggtacctaaacccaaggcaggtcttcgacctatcccaggggggacctaaggaggccttagaaatgtatcgcaaggtgcataacttgcgaatactggcctgcggaggcgacgggaccgtagggtggatcctgagcactctggatcagctgcggctaaagccgccaccccccgtggccatcctgccgttgggcactggcaatgatcttgcaagaactctgaactggggcggcggttatacagacgaacccgtctcaaagattctgtcgcacgtagaggaaggtaatgtggtgcagctggataggtgggacttgcacgcagaacccaatcctgaggccgggcccgaagatcgcgatgagggggccaccgacaggctgcctctggatgtttttaataactacttttctctcgggtttgacgcccatgtcacgctggagtttcacgagagcagggaagccaatcctgagaagtttaatagtcggtttcggaataagatgttttacgctggaaccgccttttcagactttctgatgggcagctccaaggatctcgcaaagcatattcgggtggtgtgcgacggcatggatctgaccccaaagattcaggacctgaagccgcaatgtgtggtgttcctgaacattccaaggtattgtgcggggacgatgccttggggacatcccggagaacatcacgatttcgagccccagcgacacgatgacgggtacttggaggtgatcggattcactatgacaagcctggccgccctgcaagtcggggggcacggagaaagattaacacagtgccgcgaagtcgtcctaacaacctctaaagcgataccggtacaggtggacggtgagccatgtaaactggccgcctcacgtatccggattgctctgcgcaatcaggccacaatggtgcagaaggcaaagcggagaagtgctgctccactgcacagtgatcaacaacctgtgcctgaacagctgcggatccaggtgtccagagtttccatgcatgactacgaggcgctgcactatgataaagaacagcttaaggaagcaagcgttcctttgggaacagttgtggtgccaggggattctgatcttgaactttgtagagcccacattgaaagactgcagcaagagcccgatggcgcaggtgccaaatctcctacctgtcagaaactttctccgaagtggtgtttcttagatgctacgaccgcatcccgcttttatcgcatagaccgtgcgcaggagcatctgaactatgttaccgaaatcgcccaggacgagatttatattctggatccagaattgctgggtgcatcggccagaccagacctgccaacacctacctcgcctctgcctacaagtccctgcagcccgacgcctcgctccctgcaaggagacgcggccccaccgcagggcgaggagctgattgaagcagcaaaaagaaacgacttttgcaagctccaggagctccaccgggccgggggagatctgatgcaccgcgatgagcaatcgcgaacgctgttgcatcacgccgtcagtacaggcagcaaggacgtggtgcgctacctgctggatcacgctccacctgagatcttggatgccgtggaggaaaatggagagacttgtctccaccaggcggcagccctggggcagaggaccatctgtcactatatcgttgaggccggcgcgagtctgatgaaaacagatcagcagggggatacaccacgacagcgtgccgagaaggcacaggataccgagctggccgcgtatctagaaaatcggcagcactatcagatgatccaacgggaggatcaggaaaccgccgtgtag

SEQ ID NO: 41647 - DNA, 3354 bp, Artificial Sequence
  derived and/or modified sequence
atggaaactttctttcgcagacacttccggggaaaggtgcctgggcctggcgaagggcaacagcgcccatccagtgtcggtctgccaactggaaaggccaggagacgatctccagcaggacaggcatcttcctcgcttgctcagaggcggaggagctctgcccagcttcaggggtgtctgttatcctgtggcgtgagggcccagggcagcagccggaggcgaagttccactgtacctcccagttgcaacccaagatttatcgttgataaagtgctcacacctcagccaaccactgttggagctcaattgctgggcgcacctctgctcttaactggtttggtggggatgaacgaggaagagggagtacaagaagatgtggtagccgaggcctctagcgccatccagcctgggactaaaacaccaggacccccacccccaagaggcgcacaacctctacttcctctccctcggtacctcagacgagcgtctagccatttgcttccagccgacgctgtctatgaccacgcactgtggggccttcacggctattacagacgcctgtcacaacgccgacctagtggtcagcaccccggacccggtgggagaagggcttcaggtacaactgcgggtaccatgctgccaaccagggtcaggcctctttcacgtagaaggcaggttgctctccgccgaaaagctgccggaccccaagcatggtccgcgctgttagctaaagccattaccaagtccgggctgcagcacctcgcacctcccccacctaccccaggcgcaccatgttccgagagtgagcgccagatacggtcaacagtagattggagtgagagcgcaacatatggggagcacatatggtttgagacaaacgtctctggggatttctgctatgtcggggagcagtactgcgtcgcacgcatgctcaaaagcgtgagtagacgcaaatgtgctgcctgtaagatcgtggtgcatactccatgcattgaacagctggagaagatcaacttcaggtgcaaaccttcctttcgggaaagtgggtcacggaacgtgcgagagccgactttcgtcaggcaccactgggttcacaggaggaggcaggatgggaagtgtcggcattgcggcaagggctttcagcagaagttcacattccacagtaaagaaatagtggcgatctcctgttcgtggtgtaagcaggcctaccactccaaggtgagctgttttatgcttcagcagattgaagaaccctgctcactgggggtccacgccgcagtagtaattccccctacatggatactccgggcacgccgaccccagaatacactcaaggcctctaaaaaaaagaaaagggcctcattcaaaagaaaatcttctaagaagggcccagaggaagggagatggaggccatttattattcggcctaccccaagtcctctcatgaaacccctgctggtctttgtaaatcctaagtcagggggaaatcagggcgcaaagatcattcagtccttcctgtggtatttgaaccccagacaagtatttgacctcagccaggggggaccaaaggaagctctggagatgtataggaaggtccacaacctgcggatccttgcctgcggaggggatgggactgtcggctggattctcagcaccctcgaccagctgaggcttaagccacccccacctgtggcaattctgcctctcgggaccggcaacgacctggcaaggactttaaactgggggggaggctacacagatgagcctgtgagtaagattttatcgcacgtggaagagggaaatgttgttcagctcgaccgttgggatcttcacgccgagcctaatcccgaggccggtcccgaggatcgcgatgagggagctaccgatagattgcctctggacgtgttcaataactatttttccttagggttcgacgcccacgtgaccttggaattccacgagtcacgcgaagccaaccctgagaagttcaattctcgctttcgtaataagatgttttacgccggaactgctttctccgacttcctgatgggctccagtaaagatctagctaagcacatcagggtggtctgtgatgggatggacctcacgcccaaaatccaggatctcaaacctcagtgcgtcgtgtttctaaatattcctcggtactgtgctggaaccatgccatggggccaccctggggaacatcatgacttcgaaccgcagcggcacgacgacggatacttagaagtgattggcttcacaatgacctctctcgccgctttgcaagtgggcggtcatggggagaggttgacgcagtgcagagaggtcgtcctgacgacatctaaagcgatccctgtgcaggtagacggtgaaccatgtaagctcgccgcaagccgaattcggatcgccttacgtaatcaagcaaccatggtgcagaaggccaaacgacggagcgccgctcccttacattctgatcagcagccagttccagaacagcttagaatccaggtgagtagagtgagtatgcacgattacgaagccctacattatgacaaagagcagctcaaagaagcatccgttcccctagggaccgttgtggtgcccggagacagcgatttagagctctgtagagcccacatcgagcggttgcagcaggagccggatggagctggcgcaaaatctcccacttgccaaaaactgagtcccaaatggtgtttcctcgacgccaccacagctagtagattttatcggatcgaccgggctcaggagcatttaaattacgtcacggagattgcccaagatgaaatatacatcctggatccagaactgttgggcgcttccgctaggccagacctgcccacccctacctctccccttcctacctccccgtgctcacccacgcccagatcccttcaaggagacgcggctcctcctcaaggggaagagctaatcgaggccgcaaagcgaaacgatttttgcaagctgcaggagctccatcgtgcaggcggtgatctgatgcacagagacgaacagtcccggacacttcttcaccacgctgtgtctaccggtagtaaagatgtggtgaggtacctgctggaccatgcccctcccgagatcctggacgccgtcgaggaaaatggcgagacttgtttgcatcaggccgctgccctgggtcaaaggacgatttgccattacattgtggaggctggagcttcgctgatgaagacggaccagcagggtgacacacctcggcaacgcgctgaaaaggcccaggacaccgagttagcagcatatctggagaacaggcagcactaccagatgatccagagagaggatcaggagactgcagtgtag

SEQ ID NO: 41648 - protein, 540 aa, Artificial Sequence
  derived and/or modified sequence
MARHLREYQDLLNVKMALDIEIAAYRKLLEGEETRFSTFAGSITGPLYTHRPPITISSKIQKPKVEAPKLKVQHKFVEEIIEETKVEDEKSEMEEALTAITEELAVSMKEEKKEAAEEKEEEPEAEEEEVAAKKSPVKATAPEVKEEEGEKEEEEGQEEEEEEDEGAKSDQAEEGGSEKEGSSEKEEGEQEEGETEAEAEGEEAEAKEEKKVEEKSEEVATKEELVADAKVEKPEKAKSPVPKSPVEEKGKSPVPKSPVEEKGKSPVPKSPVEEKGKSPVPKSPVEEKGKSPVSKSPVEEKAKSPVPKSPVEEAKSKAEVGKGEQKEEEEKEVKEAPKEEKVEKKEEKPKDVPEKKKAESPVKEEAVAEVVTITKSVKVHLEKETKEEGKPLQQEKEKEKAGGEGGSEEEGSDKGAKGSRKEDIAVNGEVEGKEEVEQETKEKGSGREEEKGVVTNGLDLSPADEKKGGDKSEEKVVVTKTVEKITSEGGDGATKYITKSVTVTQKVEEHEETFEEKLVSTKKVEKVTSHAIVKEVTQSD

SEQ ID NO: 41649 - DNA, 1623 bp, Artificial Sequence
  derived and/or modified sequence
atggcacgccaccttcgagagtatcaggacctgctgaacgtcaaaatggccttagatattgagatcgcagcctacaggaagctcctcgagggcgaagagacccgctttagcacttttgcaggtagcataacaggtcccctctacacccatcggcccccaatcactatttcttcgaaaatccagaagcctaaggtcgaggcacctaaactgaaggtccagcacaagttcgtggaagagattattgaagagaccaaggtggaagacgaaaaatcggagatggaggaagcccttacagccattacggaggaattggccgtgtccatgaaggaggagaaaaaggaggccgcagaggaaaaggaggaggaacctgaggcagaggaagaggaggtggctgcaaagaaatctccagtgaaagccaccgcaccggaggtaaaggaagaggagggggagaaggaggaagaagagggtcaagaagaggaagaggaagaggatgagggagccaaatcggaccaggcagaagaaggaggctccgaaaaggaagggtcctcagagaaagaggagggggagcaggaggagggggaaaccgaggccgaagccgaaggagaggaagctgaggcaaaagaggagaagaaggtagaggaaaaaagcgaggaagtcgccactaaagaggaactggttgcagacgcaaaggtcgaaaagcccgagaaggctaagagccctgtaccgaagagtcccgtagaggaaaagggcaagtcacccgtccccaagagtcctgtggaagagaaaggaaagtctcccgttccgaaaagccctgtggaggaaaagggcaagagcccggtgccaaagtcaccagttgaggagaaggggaaatcacctgtgagcaagtccccggtcgaggagaaagctaagtctccggtccctaagagcccagtcgaggaagctaaatcaaaagcagaggtcggaaagggtgaacagaaagaagaggaggagaaagaagtgaaagaggcacctaaagaggagaaagtagaaaagaaggaggagaaacctaaggacgtaccagaaaagaaaaaagcggagtctcctgtgaaggaggaagctgtggctgaggtggtgaccatcacaaaatcagtgaaagtccacctcgagaaagagaccaaggaggagggcaagcccttacagcaagagaaagaaaaggagaaggctggtggcgagggggggagcgaagaagagggaagtgataagggcgctaagggttctcgcaaagaagatatcgccgtaaacggcgaggtcgagggcaaagaagaggtggagcaggaaacaaaagagaagggcagcggcagagaggaggagaagggcgtcgtaactaatggcttggacctgtctccggcagacgaaaagaaagggggggataagtccgaggaaaaggtcgtggtgacaaagacagtggaaaaaattacttccgagggaggcgacggtgcaacaaagtacattaccaagtctgtgacggttacccaaaaagtggaggaacacgaagaaactttcgaagagaaactggtgtcaacgaaaaaggttgagaaagtcacgtcccacgcgatcgtgaaagaagtcacccagtcagactag

SEQ ID NO: 41650 - DNA, 1623 bp, Artificial Sequence
  derived and/or modified sequence
atggcccggcacctgcgggagtaccaggacctgctgaatgtgaagatggccctggacatcgagattgctgcctacaggaagctgctggagggggaggagacccgcttcagcacctttgctggcagcatcaccggccccctgtacacccaccggccccccatcaccatcagcagcaagatccagaagcccaaggtggaggcccccaagctgaaggtgcagcacaagtttgtggaggagatcatcgaggagaccaaggtggaggatgagaagtctgagatggaggaggccctgacagccatcacagaggagctggccgtgtccatgaaggaggagaagaaggaggccgctgaggagaaggaggaggagcctgaggccgaggaggaggaggtggccgccaagaagagccctgtgaaggccacagcccctgaggtgaaggaggaggagggggagaaggaggaggaggagggccaggaggaggaggaggaggaggatgagggcgccaagagtgaccaggccgaggagggcggcagcgagaaggagggcagcagcgagaaggaggagggggagcaggaggagggggagacagaagctgaggccgagggggaggaggccgaggccaaggaggagaagaaggtggaggagaagtctgaggaggtggccaccaaggaggagctggtggctgatgccaaggtggagaagccagagaaggccaagagccctgtgcccaagagccctgtggaggagaagggcaagagccctgtgcccaagagccctgtggaggagaagggcaagagccctgtgcccaagagccctgtggaggagaagggcaagagccctgtgcccaagagccctgtggaggagaagggcaagagccctgtgtccaagagccctgtggaggagaaggccaagagccctgtgcccaagagccctgtggaggaggccaagagcaaggccgaggtgggcaagggggagcagaaggaggaggaggagaaggaggtgaaggaggcccccaaggaggagaaggtggagaagaaggaggagaagcccaaggatgtgcctgagaagaagaaggccgagagccctgtgaaggaggaggccgtggccgaggtggtgaccatcaccaagtctgtgaaggtgcacctggagaaggagaccaaggaggagggcaagcccctgcagcaggagaaggagaaggagaaggccggcggggagggcggcagcgaggaggagggcagtgacaagggggccaagggcagcaggaaggaggacattgctgtgaatggagaggtggagggcaaggaggaggtggagcaggagaccaaggagaagggcagcggccgggaggaggagaagggcgtggtgaccaacggcctggacctgagccctgcagatgagaagaagggcggggacaagtctgaggagaaggtggtggtgaccaagacagtggagaagatcaccagcgagggcggagatggagccaccaagtacatcaccaagtctgtgacagtgacccagaaggtggaggagcacgaggagacctttgaggagaagctggtgtccaccaagaaggtggagaaggtgaccagccacgccatcgtgaaggaggtgacccagagcgactag

SEQ ID NO: 41651 - DNA, 1623 bp, Artificial Sequence
  derived and/or modified sequence
atggcccggcacctgcgggagtaccaggacctgctgaacgtgaagatggctttagatattgagattgcggcttatcggaagttgctcgagggagaggagacaagatttagcacctttgctggctctataacaggtccattgtacacccaccgccccccaatcaccatttcctctaaaatacagaaacctaaagtggaagcccctaagctgaaagtgcaacataaatttgtggaggaaatcatcgaagagaccaaagtggaggatgaaaaatccgagatggaggaagccttgaccgctattaccgaagaacttgctgtgtccatgaaagaagagaaaaaagaagccgctgaggagaaggaggaggaacctgaagctgaagaggaggaggtggccgccaaaaagtctccagtgaaggctacagcgcccgaagtgaaggaagaagagggggagaaagaggaagaggaaggacaggaggaggaggaggaagaggacgagggcgccaagtctgaccaggcagaagagggaggatccgaaaaggagggttcgtccgagaaggaggagggagagcaggaagaaggcgaaactgaggcggaggcggagggagaggaagctgaggccaaggaagaaaagaaggttgaggaaaagagcgaagaagtggcaactaaggaagagctggtggctgacgctaaggtcgagaaacccgaaaaggccaaaagccctgttccaaagtcgcccgtggaagaaaaaggcaagtcaccagttcctaaatcgccagtggaagaaaaaggaaagtctcccgtgccaaagtctcctgtggaagaaaagggaaagagtcctgtgccaaaaagccccgtggaggagaaaggaaaaagcccagtgagcaaatcgccggtcgaagagaaggcaaaatcccctgtgccaaagagccctgtagaagaggctaagtcaaaggccgaggtcgggaaaggagagcagaaggaggaggaagaaaaagaagtcaaagaagctcccaaagaggagaaagttgagaaaaaagaagaaaagcccaaggacgtacctgaaaagaaaaaggcagagtctcccgtcaaagaggaggcagtggccgaggttgtcactataaccaaatccgttaaagtccacctcgagaaggaaaccaaagaggagggcaaaccgctccagcaagaaaaggagaaagagaaagcgggcggtgagggagggtctgaagaggaaggctcagacaagggcgcaaagggttctagaaaagaggacatcgcagtgaacggtgaggtagaaggcaaagaagaagtcgagcaggaaactaaagaaaagggttcagggcgggaggaagagaaaggcgtagttaccaacggcctcgatctgtcaccagccgacgaaaagaagggaggggacaagagcgaggagaaagtggtcgtgaccaagaccgtcgagaaaatcacttccgaaggcggtgacggagcgacaaaatacatcaccaaatccgtcacggttacgcagaaagtggaagagcacgaggagacattcgaagagaagttagtgtccaccaagaaagtcgagaaggtgacttcacacgctatcgtgaaggaagtgacacagtctgactag

SEQ ID NO: 41652 - DNA, 2515 bp, Artificial Sequence
  derived and/or modified sequence
gtgcccaggcgccctctccgccgcgctccctggtggccgctcgctagagcacgcgcgccgcagacctagggtatttgcggatcagcgtcctcgcccatctcatcctccacactccgcccccacccacctgccccagctgctaagggtcttgacctttttcagaaacgtgcatcttttccagttctaattttgcacgcttgcacgtttaaagcaggagggatgaattcggtagtggataaatcagcaactttaggatagcttatgcagaaacgcgtgtattctctacttttccggcagtgatcggaagagctctcaaaattggcttcagcccaaagggctcagatgggaatggccaggacaccatccagcagctggaaaatgagcttcggggcacaaagtgggaaatggctcgtcatttgcgcgaataccaggacctcctcaacgtcaagatggctctggatatagaaatcgctgcgtacagaaaactcctggagggtgaagagactagatttagcacatttgcaggaagcatcactgggccactgtatacacaccgacccccaatcacaatatccagtaagattcagaaacccaaggtggaagctcccaagcttaaggtccaacacaaatttgtcgaggagatcatagaggaaaccaaagtggaggatgagaagtcagaaatggaagaggccctgacagccattacagaggaattggccgtttccatgaaggaagagaagaaagaagcagcagaagaaaaggaagaggaacccgaagctgaagaagaagaagtagctgccaaaaagtctccagtgaaagcaactgcacctgaagttaaagaagaggaaggggaaaaggaggaagaagaaggccaggaagaagaggaggaagaagatgagggagctaagtcagaccaagccgaagagggaggatccgagaaggaaggctctagtgaaaaagaggaaggtgagcaggaagaaggagaaacagaagctgaagctgaaggagaggaagccgaagctaaagaggaaaagaaagtggaggaaaagagtgaggaagtggctaccaaggaggagctggtggcagatgccaaggtggaaaagccagaaaaagccaagtctcctgtgccaaaatcaccagtggaagagaaaggcaagtctcctgtgcccaagtcaccagtggaagagaaaggcaagtctcctgtgcccaagtcaccagtggaagagaaaggcaagtctcctgtgccgaaatcaccagtggaagagaaaggcaagtctcctgtgtcaaaatcaccagtggaagagaaagccaaatctcctgtgccaaaatcaccagtggaagaggcaaagtcaaaagcagaagtggggaaaggtgaacagaaagaggaagaagaaaaggaagtcaaggaagctcccaaggaagagaaggtagagaaaaaggaagagaaaccaaaggatgtgccagagaagaagaaagctgagtcccctgtaaaggaggaagctgtggcagaggtggtcaccatcaccaaatcggtaaaggtgcacttggagaaagagaccaaagaagaggggaagccactgcagcaggagaaagagaaggagaaagcgggaggagagggaggaagtgaggaggaagggagtgataaaggtgccaagggatccaggaaggaagacatagctgtcaatggggaggtagaaggaaaagaggaggtagagcaggagaccaaggaaaaaggcagtgggagggaagaggagaaaggcgttgtcaccaatggcctagacttgagcccagcagatgaaaagaaggggggtgataaaagtgaggagaaagtggtggtgaccaaaacggtagaaaaaatcaccagtgaggggggagatggtgctaccaaatacatcactaaatctgtaaccgtcactcaaaaggttgaagagcatgaagagacctttgaggagaaactagtgtctactaaaaaggtagaaaaagtcacttcacacgccatagtaaaggaagtcacccagagtgactaagatttgagtccattgcaaaaggttaagccatatgacaatttcaaaatgcatgtgattggcagcttcaaaacagaacgggttctcccatgggggctccagacattgtattttactttgtgcaatatgaggggactgcatgcaagctcagggtgctccctcctcagtctttgggggattcaaatgcatgatattgtatgtacctgggaaatttgccgatttcctaagctgttggaagggggtcacttaaggggggatgtcttgagatgtattatgcaaagtaccaactgagccaaaaacaataaacgaaacacagaactcagccttaagaaagctatatatgaataattatgtttacctcactggtgcatttaaaatggacttttgttcatgggagaacctcgttgacatgcacagtttgcaatcttatgttgatcgatgttaaacgtcacagcagtacttgctcaataaaggtcatattggaaacatag

SEQ ID NO: 41653 - DNA, 1623 bp, Artificial Sequence
  derived and/or modified sequence
atggccagacacctgagggagtaccaagacctcctgaatgtcaagatggcactggatatcgagatcgcagcgtaccgcaagctgctggagggagaggaaacgagattctccacattcgccggaagtatcacaggcccattatacacacatcgccctcccattactatctcctccaaaattcaaaagccgaaagtggaagccccaaagttaaaggtgcagcataaattcgttgaggaaatcattgaagaaactaaagtcgaagacgagaagtccgagatggaggaagcattgacagctattactgaagagctggctgtgtcaatgaaggaggaaaagaaggaagcagctgaggaaaaggaggaagagcccgaggccgaggaggaggaagtggccgctaagaaatcacccgtgaaggcaactgccccagaagttaaagaggaggaaggcgaaaaggaggaagaggaagggcaggaggaagaagaggaagaggatgagggggctaaatccgaccaggcagaggaagggggtagcgagaaagaaggatcatccgagaaggaggaaggagagcaggaagaaggagagaccgaggccgaagctgaaggggaagaggctgaggccaaggaggagaagaaggtcgaggagaagtcagaagaggttgcaacgaaggaggagttggtggcggacgctaaggtggagaaacccgagaaggctaaatcacctgtccccaagtccccagtagaggaaaaagggaaatcaccggtgccaaaatcgcccgtcgaggagaaaggaaagtctcccgttcctaagtctccagtagaagagaagggaaagagccccgtacccaaatctcctgtggaggagaagggcaaaagtccagtctcaaagagccccgtggaggagaaggcaaagtcgcctgtgccaaaaagcccggtggaggaggctaagtctaaggcggaggttggcaagggggaacagaaggaggaggaggaaaaagaggtcaaggaagccccaaaagaggagaaggtggaaaaaaaggaggagaaacctaaagatgttcctgagaaaaaaaaagcagagagccctgtcaaggaagaggctgtcgccgaggtggtcacaattacgaagtcagttaaggttcaccttgagaaagaaactaaggaggagggcaagccgttgcagcaggaaaaagaaaaagagaaggcgggaggcgagggaggtagcgaagaagaaggttcggacaagggcgctaaaggctcaaggaaagaagacatcgctgtgaacggcgaggtggaggggaaagaagaggtggagcaagagacaaaagaaaagggtagcgggagggaggaagaaaaaggtgtagtgacaaacggtctggatctctctcccgcagacgagaaaaagggtggtgataagtctgaggagaaggtggtggttactaagacggtagaaaagattacgtccgagggaggcgatggagccacgaaatacattacgaagtcggtaaccgttactcagaaggtcgaagagcatgaggagacctttgaggaaaagcttgtgagcacaaagaaggtggagaaggtcaccagccatgcaatcgtaaaggaagtgacgcagtctgactag

SEQ ID NO: 41654 - DNA, 1623 bp, Artificial Sequence
  derived and/or modified sequence
atggccagacacctgagagagtaccaggacctgctgaacgtgaagatggccctggacatcgagatcgccgcctacagaaagctgctggagggcgaggagaccagattcagcaccttcgccggcagcatcaccggccccctgtacacccacagaccccccatcaccatcagcagcaagatccagaagcccaaggtggaggcccccaagctgaaggtgcagcacaagttcgtggaggagatcatcgaggagaccaaggtggaggacgagaagagcgagatggaggaggccctgaccgccatcaccgaggagctggccgtgagcatgaaggaggagaagaaggaggccgccgaggagaaggaggaggagcccgaggccgaggaggaggaggtggccgccaagaagagccccgtgaaggccaccgcccccgaggtgaaggaggaggagggcgagaaggaggaggaggagggccaggaggaggaggaggaggaggacgagggcgccaagagcgaccaggccgaggagggcggcagcgagaaggagggcagcagcgagaaggaggagggcgagcaggaggagggcgagaccgaggccgaggccgagggcgaggaggccgaggccaaggaggagaagaaggtggaggagaagagcgaggaggtggccaccaaggaggagctggtggccgacgccaaggtggagaagcccgagaaggccaagagccccgtgcccaagagccccgtggaggagaagggcaagagccccgtgcccaagagccccgtggaggagaagggcaagagccccgtgcccaagagccccgtggaggagaagggcaagagccccgtgcccaagagccccgtggaggagaagggcaagagccccgtgagcaagagccccgtggaggagaaggccaagagccccgtgcccaagagccccgtggaggaggccaagagcaaggccgaggtgggcaagggcgagcagaaggaggaggaggagaaggaggtgaaggaggcccccaaggaggagaaggtggagaagaaggaggagaagcccaaggacgtgcccgagaagaagaaggccgagagccccgtgaaggaggaggccgtggccgaggtggtgaccatcaccaagagcgtgaaggtgcacctggagaaggagaccaaggaggagggcaagcccctgcagcaggagaaggagaaggagaaggccggcggcgagggcggcagcgaggaggagggcagcgacaagggcgccaagggcagcagaaaggaggacatcgccgtgaacggcgaggtggagggcaaggaggaggtggagcaggagaccaaggagaagggcagcggcagagaggaggagaagggcgtggtgaccaacggcctggacctgagccccgccgacgagaagaagggcggcgacaagagcgaggagaaggtggtggtgaccaagaccgtggagaagatcaccagcgagggcggcgacggcgccaccaagtacatcaccaagagcgtgaccgtgacccagaaggtggaggagcacgaggagaccttcgaggagaagctggtgagcaccaagaaggtggagaaggtgaccagccacgccatcgtgaaggaggtgacccagagcgactag

SEQ ID NO: 41655 - protein, 492 aa, Artificial Sequence
  derived and/or modified sequence
MKAMPWNWTCLLSHLLMVGMGSSTLLTRQPAPLSQKQRSFVTFRGEPAEGFNHLVVDERTGHIYLGAVNRIYKLSSDLKVLVTHETGPDEDNPKCYPPRIVQTCNEPLTTTNNVNKMLLIDYKENRLIACGSLYQGICKLLRLEDLFKLGEPYHKKEHYLSGVNESGSVFGVIVSYSNLDDKLFIATAVDGKPEYFPTISSRKLTKNSEADGMFAYVFHDEFVASMIKIPSDTFTIIPDFDIYYVYGFSSGNFVYFLTLQPEMVSPPGSTTKEQVYTSKLVRLCKEDTAFNSYVEVPIGCERSGVEYRLLQAAYLSKAGAVLGRTLGVHPDDDLLFTVFSKGQKRKMKSLDESALCIFILKQINDRIKERLQSCYRGEGTLDLAWLKVKDIPCSSALLTIDDNFCGLDMNAPLGVSDMVRGIPVFTEDRDRMTSVIAYVYKNHSLAFVGTKSGKLKKMPGTSLCPTLELQTGPRSHRATVTLELLFSSCSSN

SEQ ID NO: 41656 - DNA, 1479 bp, Artificial Sequence
  derived and/or modified sequence
atgaaagcgatgccatggaactggacctgccttctgagtcatctcttgatggtcggcatgggctcttctacgctcttgaccagacagcctgcaccgctcagccagaagcagagaagctttgtgacgttcagaggcgaaccagccgaggggtttaaccacctcgtggtcgatgagagaacagggcacatttatctgggagcggtgaataggatttacaagctcagctccgacctgaaggtccttgttacacacgagactggccccgacgaagacaacccaaagtgctacccccctaggatagtccaaacctgtaatgagccacttaccacgaccaataatgtaaacaagatgttactgatcgattataaggaaaataggcttatcgcttgcggctctctgtaccagggcatctgcaaacttctccgactggaggatcttttcaagctaggagagccatatcacaaaaaggaacattaccttagcggcgttaatgaatccggcagtgtgttcggcgtgatcgttagctactctaatctggacgataaattattcattgctacagctgtggacggcaagcccgaatatttccccacaatatctagccgaaaattgacaaagaattctgaggcggacggtatgttcgcatatgtatttcatgatgagttcgttgcaagtatgattaagatcccctcggatacgtttaccataatccccgatttcgacatatactacgtctacggattttcaagtggaaacttcgtgtatttcctgacccttcagcccgaaatggtctctccccccggcagcactactaaagagcaggtatacacatccaagctcgtgcgtctctgcaaggaagacaccgccttcaattcttatgtggaagtcccaataggatgtgagcgcagcggcgtggaatatcggctgctccaagccgcttaccttagcaaggctggggccgtgcttggtcgaaccctcggcgtgcatcccgatgatgacctcctgtttacagtctttagcaagggacagaagcgtaagatgaagagcctggatgaatcagcactctgtatcttcatcctgaagcagattaacgacagaataaaagagcgactccaaagctgttatcgaggagagggcacgctggacctggcttggctcaaggttaaggatattccgtgctcgtccgccttgctaactatcgacgataacttttgcggcttagatatgaatgcccccctgggtgtctcagatatggttagaggcatcccagttttcactgaggaccgggaccggatgaccagcgtgatcgcttatgtctacaagaatcattccctcgcattcgtgggcaccaaaagtggcaagctcaagaaaatgcctggcaccagcctgtgtccaacccttgaacttcagaccggcccccgcagccatagggccactgtgaccctcgaacttctgttcagcagctgttcttctaactag

SEQ ID NO: 41657 - DNA, 1479 bp, Artificial Sequence
  derived and/or modified sequence
atgaaggccatgccctggaactggacctgcctgctgagccacctgctgatggtgggcatgggcagcagcaccctgctgacccggcagcctgcccccctgagccagaagcagaggagctttgtgaccttccggggggagcctgctgagggcttcaaccacctggtggtggatgagaggacaggccacatctacctgggcgctgtgaaccgcatctacaagctgagcagtgacctgaaggtgctggtgacccatgagaccggcccagatgaggacaaccccaagtgctacccaccccgcatcgtgcagacctgcaatgagcccctgaccaccaccaacaacgtgaacaagatgctgctgattgactacaaggagaacagactcatcgcctgtggcagcctgtaccagggcatctgcaagctgctgcggctggaggacctcttcaagctgggggagccctaccacaagaaggagcactacctgtctggagtgaatgaaagtggctctgtgtttggagtgattgtgtcctacagcaacctggatgacaagctgttcatcgccacagctgtggatggcaagccagagtacttccccaccatcagcagcaggaagctgaccaagaacagcgaggctgatggcatgtttgcctacgtgttccatgatgaatttgtggcctccatgatcaagatccccagcgacaccttcaccatcatcccagactttgacatctactacgtgtatggcttcagcagcggcaactttgtgtacttcctgaccctgcagcctgagatggtgagccccccaggcagcaccaccaaggagcaggtgtacaccagcaagctggtgcggctgtgcaaggaggacacagccttcaacagctatgtggaggtgcccatcggctgtgagaggtctggagtggagtaccgcctgctgcaggccgcctacctgagcaaggccggggctgtgctgggccgcaccctgggcgtgcacccagatgatgacctgctcttcaccgtcttcagcaagggccagaagaggaagatgaagagcctggatgaaagtgccctgtgcatcttcatcctgaagcagatcaatgaccgcatcaaggagcggctgcagagctgctacagaggagagggcaccctggacctggcctggctgaaggtgaaggacatcccctgcagcagcgccctgctgaccattgatgacaacttctgtggcctggacatgaatgcccccctgggcgtgtctgacatggtgcggggcatccctgtgttcacagaagatcgggacaggatgaccagcgtcatcgcctacgtgtacaagaaccacagcctggcctttgtgggcaccaagagcggcaagctgaagaagatgcctggcaccagcctgtgccccaccctggagctgcagacaggccccaggagccaccgggccaccgtgaccctggagctgctcttcagcagctgcagcagcaactag

SEQ ID NO: 41658 - DNA, 1479 bp, Artificial Sequence
  derived and/or modified sequence
atgaaggccatgccctggaactggacctgcctgctgagccacctgctaatggtgggtatgggatcttccactctgctgacacgacagcctgcccctctatcacagaaacaacgctctttcgtgacctttcgaggcgagccagctgaggggtttaatcacctggtcgtggacgagagaactgggcacatttacctcggagccgtcaataggatctacaaactatcttcagatttgaaagtcctcgtcacacatgagacgggcccagatgaagacaacccaaaatgttatccccctcgtatcgtccagacttgcaatgagccgctcaccactacgaataatgtgaataaaatgttactgattgactataaggagaatcggttaatcgcctgcggcagtctgtatcaggggatatgtaagcttttacgcctggaagatctgttcaagctgggggagccttatcataagaaggagcattacctgtcgggcgtgaatgagtccggttccgtgtttggagtgattgtgtcgtactctaacctcgacgacaaattatttatcgccactgccgtcgacgggaaacccgagtattttccgacaatctcttctaggaagctgaccaaaaattccgaagcagacggcatgtttgcctatgtgttccacgacgaatttgtggccagtatgattaaaattccgtctgacacattcaccatcatcccagactttgacatctattatgtctatggattctcttcaggaaactttgtgtattttttaacactccagcctgagatggtgtccccacccggaagcaccacaaaggaacaggtctacacttccaaactggttagactctgcaaagaggatacggccttcaacagctacgtcgaagttcctatcggctgcgagagatccggcgtggaataccgtcttcttcaggcagcgtacctgagcaaggcaggtgccgtgctgggacggactctcggggtgcaccctgatgacgacctgctgtttacagtgtttagtaagggtcagaagcgcaaaatgaagagtcttgatgagtctgctttgtgcatcttcattctgaagcagattaacgataggatcaaagagcgactgcagagctgttaccgcggcgagggcactctggatctggcatggttaaaggtgaaggacattccctgctcatccgctctattaactattgacgacaatttttgcggcctggatatgaacgccccattgggcgtgagtgatatggtgagggggattcctgtgtttaccgaagaccgcgaccgcatgaccagtgttattgcctacgtatataaaaatcactcgcttgccttcgtggggacaaaaagcggcaaactgaaaaagatgcctggtacttctctgtgccctactttggagttacagaccggacccaggtcccacagggctactgttacactggaactgctgttctctagctgtagttccaactag

SEQ ID NO: 41659 - DNA, 3314 bp, Artificial Sequence
  derived and/or modified sequence
agtgtcaatgcggcgctcccgctgaaggagggaaacgcggcgcgtccagtaggggagactgcattgctgagtcctggccctctgaggggacgactgtgcctgagtgctgctgtgccactgggacccgcctctgccatgaaagccatgccctggaactggacctgccttctctcccacctcctcatggtgggcatgggctcctccactttgctcacccggcagccagccccgctgtcccagaagcagcggtcatttgtcacattccgaggagagcccgccgagggtttcaatcacctggtggtggatgagaggacaggacacatttacttgggggccgtcaatcggatttacaagctctccagcgacctgaaggtcttggtgacgcatgagacagggccggacgaggacaaccccaagtgttacccaccccgcatcgtccagacctgcaatgagcccctgaccaccaccaacaatgtcaacaagatgctcctcatagactacaaggagaacaggctgattgcctgtgggagcctgtaccaaggcatctgcaagctgctgaggctggaggacctcttcaagctgggggagccttatcataagaaggagcactatctgtcaggtgtcaacgagagcggctcagtctttggagtgatcgtctcctacagcaacctggatgacaagctgttcattgccacggcagtggatgggaagcccgagtattttcccaccatctccagccggaaactgaccaagaactctgaggcggatggcatgttcgcgtacgtcttccatgatgagttcgtggcctcgatgattaagatcccttcggacaccttcaccatcatccctgactttgatatctactatgtctatggttttagcagtggcaactttgtctactttttgaccctccaacctgagatggtgtctccaccaggctccaccaccaaggagcaggtgtatacatccaagctcgtgaggctttgcaaggaggacacagccttcaactcctatgtagaggtgcccattggctgtgagcgcagtggggtggagtaccgcctgctgcaggctgcctacctgtccaaagcgggggccgtgcttggcaggacccttggagtccatccagatgatgacctgctcttcaccgtcttctccaagggccagaagcggaaaatgaaatccctggatgagtcggccctgtgcatcttcatcttgaagcagataaatgaccgcattaaggagcggctgcagtcttgttaccggggcgagggcacgctggacctggcctggctcaaggtgaaggacatcccctgcagcagtgcgctcttaaccattgacgataacttctgtggcctggacatgaatgctcccctgggagtgtccgacatggtgcgtggaattcccgtcttcacggaggacagggaccgcatgacgtctgtcatcgcatatgtctacaagaaccactctctggcctttgtgggcaccaaaagtggcaagctgaagaagatgcctggtaccagcctctgccctacccttgagctacagacgggaccccgatcccacagagcaacagtgactctggaactcctgttctccagctgttcatcaaactgagaaaaacttcagagctgtgtaggcttatttagtgtgttgtcagccttggatattggaaaatggaaacagatgagacacatctacctccctgtgaccccagccatacatcatagctcatgtcctgccaccccaagtccttagggaaaaaagactttggagaatgtgtctctgcttagcttggctaggtagttggtctcttttctctgccccaagcgtcccatgggtaattttggacaatggagtgtaggcatgtttgactcttgtggtgttatcacttgtatatgtcagtgaaactaactgattctcccatcggaatatagttatctcttgggcctgatatatggtaggataaccttatgctcatctgtccacttctgcagccaagtcgcctggccagtgtgtgtgtgtgtgtgtgtgtgtgtgtgtgtgtgtgtgtgtgtgtatgcttatctgtgtttaaaggtgtgtgtgcatacacagggcagagaggatggagcccaccgtactgcagcatcatgtaattaactcagtgctcagaaccatcccagcctctgcgggaaagagaaaaggaagccaacagtgcctgatgagctgatcatatgtgcaaaagctctgttggcatctggtccaggagagcacccaaaaaaagttaattggtgttgtccagtctcctttccttaagactatggttacaacaaagcgtgagcagtgtctcctgcatggccactatccagcacaattccataattcccccatagagccggtggggaggaggaggtgagtggcgaaggaagtggaaacacttggtgtcatgtgctcctatcatttctactagcttactgggaaataaagtgtagtcaagagtgtatgaaggcaagatgtaaaattagcgactggtgctaatctggttacttgaaaacaagtgaaagtgctgtagatttgttctgttgctaagaaccaccacactaaacctcgtatagttcctggaggatacacaacagtgtaattctctttagggtgtgccacaggttcctggcctgtgggagggaatgaatcaggagggctcttgagaaccttcatctgtgtgcttgcactgaaagtgagtcccaaagctggagatttagtgagagcaggcaacccctctgtgtctcactgtccatattctggaggcagaggtttgtaacaggccatgtgcacctgcatagggatgggtaaagcaaggactttgaaagagttgaaaagcattataaacagttgttcagaaatacgtcccaggagttccatgtgaaactggctctgtgtgcattgaagcatggctgttgggaattctaactggtccaacactcctgcaaaacaatgtgtaaatatttaggaagaaacttgaaaatagtcaaatcctttgaactggtgacaattttttaaagaatcaattctaatttgtttcaagggtaataatcaccaagatacacatttcagcatttatttagtctatcaaaaattggaattgatatatacactcatttataggagaatggttaggtagatttggtatatttatgtagtcattgaaaacttagtttataaaggccaatcttgtaactgattcttgtgtgataacattcagtgaaaaagcatgagacaattagaaagcatgatacaatgaataaaataaaaactggaaagagaaccatcaaaatgct

SEQ ID NO: 41660 - DNA, 1479 bp, Artificial Sequence
  derived and/or modified sequence
atgaaggccatgccttggaactggacttgtctgctcagtcatctgttaatggtgggcatgggctccagcacactcctcacgcgacagcctgcccctctaagccagaaacaaagatcgttcgtgacttttaggggtgaacccgctgagggctttaatcatctggtggtggacgagaggaccgggcatatatatctcggagcagtaaaccggatatataaactctcatccgatttgaaggtgttagtcacacacgagacagggcctgacgaggacaatcctaagtgctatccaccacgtatcgtgcagacctgcaacgagccactgaccaccacgaataacgttaacaaaatgctcctcattgattataaggaaaatcggttgatcgcctgtggatccctgtatcaaggaatctgcaagctcctgagactcgaggatctttttaagctgggggagccttatcataagaaggagcactacctgtcgggcgtgaacgaaagcggttctgttttcggggtcattgtgtcctactccaacctcgatgacaagctgtttatcgccactgccgtggacggtaaaccagagtacttcccgaccatttcctcacgaaagttaacaaaaaactccgaagcagatggaatgtttgcttatgtgttccacgacgagttcgtagcatcaatgattaaaattccctccgatacctttaccatcatcccagactttgatatttactatgtgtacggatttagctccggaaactttgtgtatttcctgaccttacagcctgagatggtcagcccaccaggcagcaccaccaaagaacaggtgtacacctctaaactggtgcgcctgtgtaaggaggacacagcttttaattcttacgttgaagttccaatcggatgtgagaggtcgggtgtcgagtaccggctgctgcaggctgcatacctgagcaaagctggagcagtgcttgggaggactctaggggttcatcctgatgatgatctgctgtttactgtcttttcaaagggccaaaagcggaaaatgaaaagtctggacgagtccgcactttgcattttcatactgaaacagattaacgataggatcaaagaacgactacagtcatgctacaggggcgagggcactcttgacttggcgtggcttaaggtgaaagacattccatgctctagtgcgctgttaaccatcgacgacaatttttgcgggctggacatgaatgcgcctctgggggtcagcgatatggtcagaggcatccccgtcttcactgaggatcgcgatcgcatgacaagtgtgattgcctacgtgtacaaaaaccacagcctagcctttgtaggcactaagagtggtaagctgaaaaagatgcctggtacctctctgtgcccaactttggaacttcagacaggaccccgatcacaccgggctaccgtcaccctagagctccttttctcttcctgctctagtaattag

SEQ ID NO: 41661 - DNA, 1479 bp, Artificial Sequence
  derived and/or modified sequence
atgaaggccatgccctggaactggacctgcctgctgagccacctgctgatggtgggcatgggcagcagcaccctgctgaccagacagcccgcccccctgagccagaagcagagaagcttcgtgaccttcagaggcgagcccgccgagggcttcaaccacctggtggtggacgagagaaccggccacatctacctgggcgccgtgaacagaatctacaagctgagcagcgacctgaaggtgctggtgacccacgagaccggccccgacgaggacaaccccaagtgctacccccccagaatcgtgcagacctgcaacgagcccctgaccaccaccaacaacgtgaacaagatgctgctgatcgactacaaggagaacagactgatcgcctgcggcagcctgtaccagggcatctgcaagctgctgagactggaggacctgttcaagctgggcgagccctaccacaagaaggagcactacctgagcggcgtgaacgagagcggcagcgtgttcggcgtgatcgtgagctacagcaacctggacgacaagctgttcatcgccaccgccgtggacggcaagcccgagtacttccccaccatcagcagcagaaagctgaccaagaacagcgaggccgacggcatgttcgcctacgtgttccacgacgagttcgtggccagcatgatcaagatccccagcgacaccttcaccatcatccccgacttcgacatctactacgtgtacggcttcagcagcggcaacttcgtgtacttcctgaccctgcagcccgagatggtgagcccccccggcagcaccaccaaggagcaggtgtacaccagcaagctggtgagactgtgcaaggaggacaccgccttcaacagctacgtggaggtgcccatcggctgcgagagaagcggcgtggagtacagactgctgcaggccgcctacctgagcaaggccggcgccgtgctgggcagaaccctgggcgtgcaccccgacgacgacctgctgttcaccgtgttcagcaagggccagaagagaaagatgaagagcctggacgagagcgccctgtgcatcttcatcctgaagcagatcaacgacagaatcaaggagagactgcagagctgctacagaggcgagggcaccctggacctggcctggctgaaggtgaaggacatcccctgcagcagcgccctgctgaccatcgacgacaacttctgcggcctggacatgaacgcccccctgggcgtgagcgacatggtgagaggcatccccgtgttcaccgaggacagagacagaatgaccagcgtgatcgcctacgtgtacaagaaccacagcctggccttcgtgggcaccaagagcggcaagctgaagaagatgcccggcaccagcctgtgccccaccctggagctgcagaccggccccagaagccacagagccaccgtgaccctggagctgctgttcagcagctgcagcagcaactag

SEQ ID NO: 41662 - DNA, 681 bp, Artificial Sequence
  derived and/or modified sequence
atgatgctccagctccttgagaaagttatagaactggagaattggaccgaaggcaagggcctgattgttcggggggcaaagaatacgtttagctctgggtctgatctgaatgctgtcaagtcacttgggacaccagaggacggaatggccgtgtgcatgttcatgcagaatacactgacccgtttcatgcgcctgccactgatcagcgtggcccttgtacagggctgggcccttggaggcggcgcagaatttaccaccgcctgcgatttcaggcttatgaccccggaatcaaagattcggttcgtgcataaggagatgggtataatcccatcatggggaggtactaccaggctcgttgagatcattggctctcggcaggccttaaaggtcctgtctggagcacttaaacttgactctaaaaatgccctcaatataggcatggttgaagaggtcctacagagcagcgacgaaactaagagcctggaggaggcccaggaatggctcaagcagttcatacagggaccccctgaggtgatacgggccctgaaaaagtccgtctgctcaggccgtgagctttatctagaggaggcacttcagaacgagcgggacctgctaggcactgtatggggcggcccagctaatctggaagcgattgcaaaaaaagggaaattcaataagtag

SEQ ID NO: 41663 - DNA, 681 bp, Artificial Sequence
  derived and/or modified sequence
atgatgctgcagctgctggagaaggtgattgagctggagaactggacagagggcaagggcctcatcgtgcggggggccaagaacaccttcagcagcggcagtgacctgaatgctgtgaagagcctgggcaccccagaagatggcatggctgtgtgcatgttcatgcagaacaccctgacccgcttcatgaggctgcccctcatctctgtggccctggtgcagggctgggccctgggcggcggcgctgagttcaccacagcctgtgacttccggctgatgaccccagagagcaagatccgctttgtgcacaaggagatgggcatcatccccagctggggcggcaccacccggctggtggagatcatcggcagccggcaggccctgaaggtgctgagcggggccctgaagctggacagcaagaatgccctgaacatcggcatggtggaggaggtgctgcagagcagtgatgagaccaagagcctggaggaggcccaggagtggctgaagcagttcatccagggccccccagaggtgatccgggccctgaagaagtctgtgtgcagcggccgggagctgtacctggaggaggccctgcagaatgaaagagacctgctgggcaccgtgtggggcggccctgccaacctggaggccatcgccaagaagggcaagttcaacaagtag

SEQ ID NO: 41664 - DNA, 681 bp, Artificial Sequence
  derived and/or modified sequence
atgatgctgcagctgctggagaaggtgatcgagctggagaactggacagagggtaaaggactgatcgtacggggagccaaaaacacatttagttcgggatccgacttgaatgcggttaagtcacttggaactcctgaagatgggatggcggtgtgcatgtttatgcagaatactctgacacgcttcatgaggctgcctctcatctccgttgccttggtccagggatgggcactagggggaggcgcagaatttactaccgcctgcgatttccggctcatgactcctgaaagtaagataagatttgttcacaaggaaatggggatcatcccctcttggggtgggacgaccagattggtcgagatcattggcagtcggcaggctctgaaagtcctctccggggctttaaaactagatagtaagaatgctctcaatatcggcatggttgaagaggtcctccagtcatcagacgagacaaagagtctggaggaagcccaggaatggctcaaacagttcattcagggaccccccgaagtgatacgggccctaaagaagtccgtgtgtagcgggcgtgagctttatctcgaggaggctctgcagaatgaaagagatctgctcggcacagtctgggggggtcctgccaacctggaagcaatagccaagaaagggaagtttaacaaatag

SEQ ID NO: 41665 - DNA, 681 bp, Artificial Sequence
  derived and/or modified sequence
atgatgttacagttactggaaaaagtgatcgagttagagaattggaccgaggggaagggactgatcgtgcgcggagcaaagaacaccttcagcagcgggtcagatctgaatgctgtgaaaagtctgggcacccccgaagatggtatggcagtgtgcatgtttatgcagaatactctgacgcggttcatgaggctgcctctgatatcggtagcgttagtgcagggctgggcactgggcggaggcgctgaatttaccaccgcatgcgactttaggttaatgacaccggagtctaaaattcgtttcgtccataaggagatgggtatcattccttcctggggagggactactaggctcgtggagatcattggctctaggcaagccctgaaggtcctcagtggtgctctcaaattggactccaagaacgccctgaatattggaatggtggaagaggtgttgcagagtagcgatgaaacaaaaagtctggaggaggcccaggagtggctgaagcagtttattcagggaccgcctgaggtcatacgggctctcaagaagtcggtctgttccggcagggagttgtacctcgaggaagcacttcaaaatgaacgagatttgctgggcacagtctggggcggtcctgcaaatctggaagcgatcgccaaaaaggggaagttcaacaagtag

SEQ ID NO: 41666 - DNA, 681 bp, Artificial Sequence
  derived and/or modified sequence
atgatgctgcagctgctggagaaggtgatcgagctggagaactggaccgagggcaagggcctgatcgtgagaggcgccaagaacaccttcagcagcggcagcgacctgaacgccgtgaagagcctgggcacccccgaggacggcatggccgtgtgcatgttcatgcagaacaccctgaccagattcatgagactgcccctgatcagcgtggccctggtgcagggctgggccctgggcggcggcgccgagttcaccaccgcctgcgacttcagactgatgacccccgagagcaagatcagattcgtgcacaaggagatgggcatcatccccagctggggcggcaccaccagactggtggagatcatcggcagcagacaggccctgaaggtgctgagcggcgccctgaagctggacagcaagaacgccctgaacatcggcatggtggaggaggtgctgcagagcagcgacgagaccaagagcctggaggaggcccaggagtggctgaagcagttcatccagggcccccccgaggtgatcagagccctgaagaagagcgtgtgcagcggcagagagctgtacctggaggaggccctgcagaacgagagagacctgctgggcaccgtgtggggcggccccgccaacctggaggccatcgccaagaagggcaagttcaacaagtag

SEQ ID NO: 41667 - DNA, 213 bp, Artificial Sequence
  derived and/or modified sequence
atgatgctccagttattggagaaggtaattgagctagaaaattggactgaggggaagggcctgatcgtccggggcgccaagaacacattctcaagcgggtccgacctaaacgccgttaaaagcctggggacccctgagacaagcttcaataagtgttgcgccggctcccggctggggattggttggaggagtcgcatttattattcaatgtag

SEQ ID NO: 41668 - DNA, 213 bp, Artificial Sequence
  derived and/or modified sequence
atgatgctgcagctgctggagaaggtgattgagctggagaactggacagagggcaagggcctcatcgtgcggggggccaagaacaccttcagcagcggcagtgacctgaatgctgtgaagagcctgggcaccccagagaccagcttcaacaagtgctgtgccggcagccggctgggcatcggctggaggagccgcatctactacagcatgtag

SEQ ID NO: 41669 - DNA, 213 bp, Artificial Sequence
  derived and/or modified sequence
atgatgctgcagctgctggagaaggtgatcgagctggagaactggactgaagggaaaggattgatcgttcgcggcgcgaaaaacaccttctcctcagggtccgacctgaacgctgtgaagtctttgggaacaccagaaacctcatttaacaagtgctgcgcaggttcaaggctgggcataggctggaggagccgcatatattattcgatgtag

SEQ ID NO: 41670 - DNA, 213 bp, Artificial Sequence
  derived and/or modified sequence
atgatgctgcagctccttgaaaaggttattgagttggagaattggacggaggggaagggcctgattgtcagaggagctaaaaacactttctcatcgggcagtgacctaaatgctgtgaaatccctaggaacgcctgagacgtcctttaacaaatgttgtgccggatcacgactgggaatcggttggcgtagcagaatttattattccatgtag

SEQ ID NO: 41671 - DNA, 213 bp, Artificial Sequence
  derived and/or modified sequence
atgatgctgcagctgctggagaaggtgatcgagctggagaactggaccgagggcaagggcctgatcgtgagaggcgccaagaacaccttcagcagcggcagcgacctgaacgccgtgaagagcctgggcacccccgagaccagcttcaacaagtgctgcgccggcagcagactgggcatcggctggagaagcagaatctactacagcatgtag

SEQ ID NO: 41672 - protein, 835 aa, Artificial Sequence
  derived and/or modified sequence
MWPHSAGARPWASTLTGKDPRVMACWCLDGLPSGLAEPWRELWRWRSRPLHCVPPFSPLARSSRDHRNLRRRGNIDGWRQNLEPSNNVEMFPPSGHQDVSERRLDTQRPQVTMWERDVSSDRQEPGRRGRSWGLEGSQALSQQAEVIVRQLQELRRLEEEVRLLRETSLQQKMRLEAQAMELEALARAEKAGRAEAEGLRAALAGAEVVRKNLEEGSQRELEEVQRLHQEQLSSLTQAHEEALSSLTSKAEGLEKSLSSLETRRAGEAKELAEAQREAELLRKQLSKTQEDLEAQVTLVENLRKYVGEQVPSEVHSQTWELERQKLLETMQHLQEDRDSLHATAELLQVRVQSLTHILALQEEELTRKVQPSDSLEPEFTRKCQSLLNRWREKVFALMVQLKAQELEHSDSVKQLKGQVASLQEKVTSQSQEQAILQRSLQDKAAEVEVERMGAKGLQLELSRAQEARRRWQQQTASAEEQLRLVVNAVSSSQIWLETTMAKVEGAAAQLPSLNNRLSYAVRKVHTIRGLIARKLALAQLRQESCPLPPPVTDVSLELQQLREERNRLDAELQLSARLIQQEVGRAREQGEAERQQLSKVAQQLEQELQQTQESLASLGLQLEVARQGQQESTEEAASLRQELTQQQELYGQALQEKVAEVETRLREQLSDTERRLNEARREHAKAVVSLRQIQRRAAQEKERSQELRRLQEEARKEEGQRLARRLQELERDKNLMLATLQQEGLLSRYKQQRLLTVLPSLLDKKKSVVSSPRPPECSASAPVAAAVPTRESIKGSLSVLLDDLQDLSEAISKEEAVCQGDNLDRCSSSNPQMSS

SEQ ID NO: 41673 - DNA, 2508 bp, Artificial Sequence
  derived and/or modified sequence
atgtggccccacagcgccggcgccagaccctgggccagcaccctgaccggcaaggaccccagagtgatggcctgctggtgcctggacggcctgcccagcggcctggccgagccctggagagagctgtggagatggagaagcagacccctgcactgcgtgccccccttcagccccctggccagaagcagcagagaccacagaaacctgagaagaagaggcaacatcgacggctggagacagaacctggagcccagcaacaacgtggagatgttcccccccagcggccaccaggacgtgagcgagagaagactggacacccagagaccccaggtgaccatgtgggagagagacgtgagcagcgacagacaggagcccggcagaagaggcagaagctggggcctggagggcagccaggccctgagccagcaggccgaggtgatcgtgagacagctgcaggagctgagaagactggaggaggaggtgagactgctgagagagaccagcctgcagcagaagatgagactggaggcccaggccatggagctggaggccctggccagagccgagaaggccggcagagccgaggccgagggcctgagagccgccctggccggcgccgaggtggtgagaaagaacctggaggagggcagccagagagagctggaggaggtgcagagactgcaccaggagcagctgagcagcctgacccaggcccacgaggaggccctgagcagcctgaccagcaaggccgagggcctggagaagagcctgagcagcctggagaccagaagagccggcgaggccaaggagctggccgaggcccagagagaggccgagctgctgagaaagcagctgagcaagacccaggaggacctggaggcccaggtgaccctggtggagaacctgagaaagtacgtgggcgagcaggtgcccagcgaggtgcacagccagacctgggagctggagagacagaagctgctggagaccatgcagcacctgcaggaggacagagacagcctgcacgccaccgccgagctgctgcaggtgagagtgcagagcctgacccacatcctggccctgcaggaggaggagctgaccagaaaggtgcagcccagcgacagcctggagcccgagttcaccagaaagtgccagagcctgctgaacagatggagagagaaggtgttcgccctgatggtgcagctgaaggcccaggagctggagcacagcgacagcgtgaagcagctgaagggccaggtggccagcctgcaggagaaggtgaccagccagagccaggagcaggccatcctgcagagaagcctgcaggacaaggccgccgaggtggaggtggagagaatgggcgccaagggcctgcagctggagctgagcagagcccaggaggccagaagaagatggcagcagcagaccgccagcgccgaggagcagctgagactggtggtgaacgccgtgagcagcagccagatctggctggagaccaccatggccaaggtggagggcgccgccgcccagctgcccagcctgaacaacagactgagctacgccgtgagaaaggtgcacaccatcagaggcctgatcgccagaaagctggccctggcccagctgagacaggagagctgccccctgcccccccccgtgaccgacgtgagcctggagctgcagcagctgagagaggagagaaacagactggacgccgagctgcagctgagcgccagactgatccagcaggaggtgggcagagccagagagcagggcgaggccgagagacagcagctgagcaaggtggcccagcagctggagcaggagctgcagcagacccaggagagcctggccagcctgggcctgcagctggaggtggccagacagggccagcaggagagcaccgaggaggccgccagcctgagacaggagctgacccagcagcaggagctgtacggccaggccctgcaggagaaggtggccgaggtggagaccagactgagagagcagctgagcgacaccgagagaagactgaacgaggccagaagagagcacgccaaggccgtggtgagcctgagacagatccagagaagagccgcccaggagaaggagagaagccaggagctgagaagactgcaggaggaggccagaaaggaggagggccagagactggccagaagactgcaggagctggagagagacaagaacctgatgctggccaccctgcagcaggagggcctgctgagcagatacaagcagcagagactgctgaccgtgctgcccagcctgctggacaagaagaagagcgtggtgagcagccccagaccccccgagtgcagcgccagcgcccccgtggccgccgccgtgcccaccagagagagcatcaagggcagcctgagcgtgctgctggacgacctgcaggacctgagcgaggccatcagcaaggaggaggccgtgtgccagggcgacaacctggacagatgcagcagcagcaacccccagatgagcagctag

SEQ ID NO: 41674 - DNA, 2508 bp, Artificial Sequence
  derived and/or modified sequence
atgtggccacacagcgctggcgcgcggccgtgggcctctacattgacaggcaaggacccacgggttatggcctgctggtgcctggatggactgccaagcggacttgccgaaccttggcgagagttgtggaggtggaggtcacggccactccactgcgtgccacccttctcacctctggcccggtcgagccgagatcatagaaacttgagaagacgagggaacatagacgggtggcggcaaaatctcgagccatcaaataacgtggaaatgttccccccatccggccatcaggacgtaagtgaaaggaggctggacacacaacgtccccaggtaactatgtgggaaagagatgtcagcagcgaccggcaggagcctggtaggaggggccggagctggggactcgaaggcagtcaggccctgagtcagcaggctgaagtaatcgtgcgccagctccaggaactgcgtcgcctggaggaggaggtccgtctgcttagggagacgtccctacagcaaaaaatgcgtctggaggctcaggccatggagttggaggcactggctagggcagaaaaagccgggcgcgctgaggcagaaggcctacgggcggccttagccggggccgaggttgttcgcaagaatctggaagaaggttcacagcgagaacttgaggaggtgcagaggctccatcaagagcagctgtctagtctcactcaagcccatgaggaggccctctcatcgttaacctctaaagctgaaggactggagaagtccctgtccagtctggaaacccgtcgggcaggtgaggccaaggagctggctgaagcgcaacgcgaggccgaactgctgcggaagcagctatccaaaacacaagaggacctagaagcccaggtgaccctagtcgaaaatctcagaaagtatgtcggggagcaagtgccatctgaggtgcacagccagacatgggaactggagaggcagaaactgctggaaacaatgcaacatctgcaggaagatcgggatagtctacacgccaccgctgagctgctgcaggtgcgagtacagtcgttaacacacatcctcgccctgcaggaggaagagctcacgcgaaaggtgcagcctagcgacagtctcgagcccgagtttactcgaaaatgccaatcattgttgaatcggtggcgggaaaaggtttttgcgctgatggtgcagcttaaggcacaagagctggaacattcggattccgtaaagcagctcaagggccaggtggcgtcactgcaagagaaggtgactagccagagccaggagcaagctattctgcaacgtagtttacaggataaggccgctgaagtggaggttgagcggatgggcgccaaaggcctccagctcgagctctcacgggcacaggaagcccggcggcgatggcaacagcagacagcgtcagcagaagagcaattacggctggtggtgaatgctgtgtcaagcagccagatctggctagaaacgaccatggccaaggtggagggcgctgctgcccaactgccatcgttgaacaatcggctcagttacgcagtcaggaaagtgcatacgatccgcggactcattgcccgaaaactcgccctggcgcaactccgacaggaatcctgtcctctccctcctccagtgacagacgtttctctggaacttcaacagctgcgggaggagcgtaataggctggacgccgagttacagctttcagctagattgatacaacaggaagtgggaagagcacgcgagcaaggcgaggccgagcggcagcagctcagtaaagtggctcagcagctcgaacaagagctccagcagacccaggagagtctggcctcattggggctgcaacttgaagtcgcccgccagggtcaacaagagtctaccgaggaggcagcatcgttgcgacaggaactgacacagcagcaggaactgtatggccaggcgctgcaggaaaaggtggccgaagtggagaccaggctccgggagcagctgagtgacacagaacgaagactcaacgaagctcgaagggaacatgcaaaagcagtcgtgtcactccgtcagattcagcgaagggccgctcaggagaaggagaggtcacaagaacttcggagactccaagaagaggcaagaaaggaagagggtcagaggctcgccaggagactccaggagctggaacgcgataagaatctgatgctggccactctgcagcaggaaggcctcttgagccgctataagcaacagaggctcctcacagttctcccatcccttctggacaagaagaagtcagtcgtcagtagtccccgacctccggaatgtagcgctagtgctcccgtagctgcagcagttcccactcgggagtccataaaaggatccctttctgtgctgctggacgacctccaggatctcagcgaagctatcagcaaagaggaggctgtgtgtcaaggagataaccttgaccggtgcagttcctcaaaccctcagatgagttcatag

SEQ ID NO: 41675 - DNA, 1000 bp, Artificial Sequence
  derived and/or modified sequence
ggggaacatagatggctggagacagaatctagagccttcaaataatgtggagatgtttccaccttcaggccatcaagatgtctcagagaggcggctagacacccagagacctcaagtgaccatgtgggaacgggatgtttccagtgacaggcaggagccagggcggagaggcaggtcctgggggctggaggggtcacaggccctgagccagcaggctgaggtgatcgttcggcagctgcaagagctgcggcggctggaggaggaggtccggctcctgcgggagacctcgctgcagcagaagatgaggctagaggcccaggccatggagctagaggctctggcacgggcggagaaggccggccgagctgaggctgagggcctgcgtgctgctttggctggggctgaggttgtccggaagaatttggaagaggggagccagcgggagctggaagaggttcagaggctgcaccaagagcagctgtcctctttgacacaggctcacgaggaggctctttccagtttgaccagcaaggctgagggcttggagaagtctctgagtagtctggaaaccagaagagcaggggaagccaaggagctggccgaggctcagagggaggccgagctgcttcggaagcagctgagcaagacccaggaagacttggaggctcaggtgaccctggttgagaatctaagaaaatatgttggggaacaagtcccttctgaggtccacagccagacatgggaactggagcgacagaagcttctggaaaccatgcagcacttgcaggaggaccgggacagcctgcatgccaccgcggagctgctgcaggtgcgggtgcagagcctcacacacatcctcgccctgcaggaggaggagctgaccaggaaggttcaaccttcagattccctggagcctgagtttaccaggaagtgccagtccctgctgaaccgctggcgggagaaggtgtttgccctcatggtgcagctaaaggcccaggag

SEQ ID NO: 41676 - DNA, 1000 bp, Artificial Sequence
  derived and/or modified sequence
ggggaacatagatggctgaagacagaatctagagccttcaaataatgtggagatgtttccaccttcaggccatcaagatgtctcagagaggcggctagacacccagagacctcaagtgaccatgtgggaacgggatgtttccagtgacaggcaggagccagggcggagaggcaggtcctgggggctggaggggtcacaggccctgagccagcaggctgaggtgatcgttcggcagctgcaagagctgcggcggctggaggaggaggtccggctcctgcgggagacctcgctgcagcagaagatgaggctagaggcccaggccatggagctagaggctctggcacgggcggagaaggccggccgagctgaggctgagggcctgcgtgctgctttggctggggctgaggttgtccggaagaacttggaagaggggaggcagcgggagctggaagaggttcagaggctgcaccaagagcagctgtcctctttgacacaggctcacgaggaggctctttccagtttgaccagcaaggctgagggcttggagaagtctctgagtagtctggaaaccagaagagcaggggaagccaaggagctggccgaggctcagagggaggccgagctgcttcggaagcagctgagcaagacccaggaagacttggaggctcaggtgaccctggttgagaatctaagaaaatatgttggggaacaagtcccttctgaggtccacagccagacatgggaactggagcgacagaagcttctggacaccatgcagcacttgcaggaggaccgggacagcctgcatgccaccgcggagctgctgcaggtgcgggtgcagagcctcacacacatcctcgccctgcaggaggaggagctgaccaggaaggttcaaccttcagattccctggagcctgagtttaccaggaagtgccagtccctgctgaaccgctggcgggagaaggtgtttgccctcatggtgcagctaaaggcccaggag

SEQ ID NO: 41677 - DNA, 1000 bp, Artificial Sequence
  derived and/or modified sequence
ggggaacatagatggctgaagacagaatctagagccttcaaataatgtggagatgtttccaccttcaggccatcaagatgtctcagagaggcggctagacacccagagacctcaagtgaccatgtgggaacgggatgtttccagtgacaggcaggagccagggcggagaggcaggtcctgggggctggaggggtcacaggccctgagccagcaggctgaggtgatcgttcggcagctgcaagagctgcggtggctggaggaggaggtctggctcctgcgggagacctcgctgcagcagaagatgaggctagaggcccaggccatggagctagaggctctggcacgggcggagaaggccggccgagctgaggctgagggcctgcgtgctgctttggctggggctgaggttgtccggaagaacttggaagaggggaggcagcgggagctggaagaggttcagaggctgcaccaagagcagctgtcctctttgacacaggctcacgaggaggctctttccagtttgaccagcaaggctgagggcttggagaagtctctgagtagtctggaaaccagaagagcaggggaagccaaggagctggccgaggctcagagggaggccgagctgcttcggaagcagctgagcaagacccaggaagacttggaggctcaggtgaccctggttgagaatctaagaaaatatgttggggaacaagtcccttctgaggtccacagccagacatgggaactggagcgacagaagcttctggaaaccatgcagcacttgcaggaggaccgggacagcctgcatgccaccgcggagctgctgcaggtgcgggtgcagagcctcacacacatcctcgccctgcaggaggaggagctgaccaggaaggttcaaccttcagattccctggagcctgagtttaccaggaagtgccagtccctgctgaaccgctggcgggagaaggtgtttgccctcatggtgcagctaaaggcccaggag

SEQ ID NO: 41678 - DNA, 2587 bp, Artificial Sequence
  derived and/or modified sequence
gccctgcatgtggccacattcagctggggccaggccttgggccagcactttaacagggaaggacccaagagtcatggcctgctggtgtctggatgggcttccctcaggccttgctgagccatggagagaactctggagatggcgctcaagacccctgcactgtgtacctcctttctcacctctggccaggagcagcagggaccatagaaacttaaggaggagggggaacatagatggctggagacagaatctagagccttcaaataatgtggagatgtttccaccttcaggccatcaagatgtctcagagaggcggctagacacccagagacctcaagtgaccatgtgggaacgggatgtttccagtgacaggcaggagccagggcggagaggcaggtcctgggggctggaggggtcacaggccctgagccagcaggctgaggtgatcgttcggcagctgcaagagctgcggcggctggaggaggaggtccggctcctgcgggagacctcgctgcagcagaagatgaggctagaggcccaggccatggagctagaggctctggcacgggcggagaaggccggccgagctgaggctgagggcctgcgtgctgctttggctggggctgaggttgtccggaagaacttggaagaggggagccagcgggagctggaagaggttcagaggctgcaccaagagcagctgtcctctttgacacaggctcacgaggaggctctttccagtttgaccagcaaggctgagggcttggagaagtctctgagtagtctggaaaccagaagagcaggggaagccaaggagctggccgaggctcagagggaggccgagctgcttcggaagcagctgagcaagacccaggaagacttggaggctcaggtgaccctggttgagaatctaagaaaatatgttggggaacaagtgccttctgaggtccacagccagacatgggaactggagcgacagaagcttctggaaaccatgcagcacttgcaggaggaccgggacagcctgcatgccaccgcggagctgctgcaggtgcgggtgcagagcctcacacacatcctcgccctgcaggaggaggagctgaccaggaaggttcaaccttcagattccctggagcctgagtttaccaggaagtgccagtccctgctgaaccgctggcgggagaaggtgtttgccctcatggtgcagctaaaggcccaggagctggaacacagtgactctgttaagcagctgaagggacaggtggcctcactccaggaaaaagtgacatcccagagccaggagcaggccatcctgcagcgatccctgcaggacaaagccgcagaggtggaggtggagcgtatgggtgccaagggcctgcagttggagctgagccgtgctcaggaggccaggcgtcggtggcagcagcagacagcctcagccgaggagcagctgaggcttgtggtcaatgctgtcagcagctctcagatctggctcgagaccaccatggctaaggtggaaggggctgccgcccagcttcccagcctcaacaaccgactcagctatgctgtccgcaaggtccacaccattcggggcctgattgctcgaaagcttgcccttgctcagctgcgccaggagagctgtcccctaccaccaccggtcacagacgtgagccttgagttgcagcagttgcgggaagaacggaaccgcctggatgcagaactgcagctgagtgcccgcctcatccagcaggaggtgggccgggctcgggagcaaggggaggcagagcggcagcagctgagcaaggtggcccagcagctggagcaggagctgcagcagacccaggagtccctggctagcttggggctgcagctggaggtagcacgccagggccagcaggagagcacagaggaggctgccagtctgcggcaggagctgacccagcagcaggaactctacgggcaagccctgcaagaaaaggtggctgaagtggaaactcggctgcgggagcaactctcagacacagagaggaggctgaacgaggctcggagggagcatgccaaggccgtggtctccttacgccagattcagcgcagagccgcccaggaaaaggagcggagccaggaactcaggcgtctgcaggaggaggcccggaaggaggaggggcagcgactggcccggcgcttgcaggagctagagagggataagaacctcatgctggccaccttgcagcaggaaggtctcctctcccgttacaagcagcagcgactgttgacagttcttccttccctactggataagaagaaatctgtggtgtccagccccaggcctccagagtgttcagcatctgcacctgtagcagcagcagtgcccaccagggagtccataaaagggtccctctctgtcctgctcgatgacctgcaggacctgagtgaagccatttccaaagaggaagctgtttgtcaaggagacaaccttgacagatgctccagctccaatccccagatgagcagctaagcagctgacagttggagggaaagccagcctgggggctgggaggatcctggagaagtgggtggggacagacca

SEQ ID NO: 41679 - DNA, 567 bp, Artificial Sequence
  derived and/or modified sequence
ggtgtggccaaagcgcagtagggggctctcgcggttggggaacatagatggctggagacagaatctagagccttcaaataatgtggagatgtttccaccttcaggccatcaagatgtctcagagaggcggctagacacccagagacctcaagtgaccatgtgggaacgggatgtttccagtgacaggcaggagccagggcggagaggcaggtcctgggggctggaggggtcacaggccctgagccagcaggctgaggtgatcgttcggcagctgcaagagctgcggcggctggaggaggaggtccggctcctgcgggagacctcgctgcagcagaagatgaggctagaggcccaggccatggagctagaggctctggcacgggcggagaaggccggccgagctgaggctgagggcctgcgtgctgctttggctggggctgaggttgtccggaagaacttggaagaggggagccagcgggagctggaagaggttcagaggctgcaccaagagcagctgtcctctttgacacaggctcacgaggaggctctttccagtttgaccagcaa

SEQ ID NO: 41680 - DNA, 2508 bp, Artificial Sequence
  derived and/or modified sequence
atgtggccccacagcgctggggcccggccctgggccagcaccctgaccgggaaggacccccgggtgatggcctgctggtgcctggatggcctgcccagcggcctggccgagccctggagggagctgtggcgctggaggagccggcccctgcactgtgtgccccccttcagccccctggcccggagcagccgggaccacaggaacctgcggcggcggggcaacattgatggctggaggcagaacctggagcccagcaacaacgtggagatgttcccccccagcggccaccaggatgtgtctgagcggcggctggacacccagaggccccaggtgaccatgtgggagagagatgtgtccagtgaccggcaggagcctggaagaagaggccgctcctggggcctggagggcagccaggccctgagccagcaggccgaggtgattgtgcggcagctgcaggagctgcggcggctggaggaggaggtgcggctgctgcgggagaccagcctgcagcagaagatgaggctggaggcccaggccatggagctggaggccctggcccgggcagagaaggccggccgggcagaggccgagggcctgcgggccgccctggccggggctgaggtggtgaggaagaacctggaggagggcagccagcgggagctggaggaggtgcagaggctgcaccaggagcagctgagcagcctgacccaggcccacgaggaggccctgagcagcctgaccagcaaggccgagggcctggagaagagcctgagcagcctggagaccaggagagctggggaggccaaggagctggccgaggcccagcgggaggccgagctgctgaggaagcagctgagcaagacccaggaggacctggaggcccaggtgaccctggtggagaacctgaggaaatatgtgggggagcaggtgcccagcgaggtgcacagccagacctgggagctggagcggcagaagctgctggagaccatgcagcacctgcaggaggaccgggacagcctgcacgccacagctgagctgctgcaggtgcgggtgcagagcctgacccacatcctggccctgcaggaggaggagctgaccaggaaggtgcagcccagcgacagcctggagcctgagttcaccaggaagtgccagagcctgctgaaccgctggagggagaaggtgtttgccctgatggtgcagctgaaggcccaggagctggagcacagcgacagcgtgaagcagctgaagggccaggtggccagcctgcaggagaaggtgaccagccagagccaggagcaggccatcctgcagaggagcctgcaggacaaggctgctgaggtggaggtggagaggatgggcgccaagggcctgcagctggagctgagccgggcccaggaggcccggcggcgctggcagcagcagacagccagcgctgaggagcagctgcggctggtggtgaatgctgtgagcagcagccagatctggctggagaccaccatggccaaggtggagggcgctgctgcccagctgcccagcctgaacaaccggctgtcctatgctgtgaggaaggtgcacaccatccggggcctgattgccaggaagctggccctggcccagctgcggcaggagagctgccccctgcccccacctgtgacagatgtgtccctggagctgcagcagctgcgggaggagaggaaccggctggatgctgagctgcagctgagcgcccggctcatccagcaggaggtgggccgggcccgggagcagggcgaggccgagcggcagcagctgagcaaggtggcccagcagctggagcaggagctgcagcagacccaggagagcctggccagcctgggcctgcagctggaggtggcccggcagggccagcaggagagcacagaggaggccgccagcctgcggcaggagctgacccagcagcaggagctgtatggccaggccctgcaggagaaggtggccgaggtggagacccggctgcgggagcagctgagtgacacagagcggcggctgaatgaggcccggcgggagcacgccaaggctgtggtgtccctgcggcagatccagaggagagctgcccaggagaaggagaggagccaggagctgcggcggctgcaggaggaggccaggaaggaggagggccagaggctggcccggcggctgcaggagctggagcgggacaagaacctgatgctggccaccctgcagcaggagggcctgctgagccgctacaagcagcagaggctgctgactgtgctgcccagcctgctggacaagaagaagtctgtggtgagcagcccccggcccccagagtgcagcgccagcgcccctgtggccgctgctgtgcccacccgggagagcatcaagggcagcctgtctgtgctgctggatgacctgcaggacctgtctgaggccatcagcaaggaggaggccgtgtgccagggcgacaacctggaccgctgcagcagcagcaacccccagatgagcagctag

SEQ ID NO: 41681 - DNA, 2508 bp, Artificial Sequence
  derived and/or modified sequence
atgtggccccacagcgccggcgcccggccctgggccagcaccctgacaggcaaggacccgagagttatggcgtgctggtgtttggacggactcccatctggcctggccgaaccttggagagaattgtggcggtggcgtagcagacctcttcattgcgtgccacctttctctcctcttgctcgctcaagcagagatcataggaaccttcggcggaggggaaatattgacggatggcgccagaacctggaaccctccaacaacgtggaaatgtttcccccgagcggtcatcaggatgtctctgagcgcagactagacactcaacgcccacaagtgactatgtgggaacgggacgtaagttccgacagacaggagcctggcagaagggggcgcagctggggcctggaaggaagccaagcactgagccagcaggctgaggtgatcgtgagacaattacaggagctgcgtcgcctggaggaagaggtcaggctgctccgtgaaacatcattgcagcagaagatgcggctggaagctcaggctatggaattggaagccctcgcgcgcgccgagaaggctggtcgggccgaggcagaaggtcttcgggccgcactggcaggggccgaggttgttcgtaagaatttagaagagggcagtcagcgcgagctggaggaagtccagcggcttcatcaggagcaattgagcagtctcactcaagcccacgaggaagcattatcctcactgacgtctaaggccgaaggtctggagaaaagtctcagcagcctagagactaggagagctggagaagcaaaagaattagctgaggcccagcgggaagctgagctgttacgcaagcaacttagcaagacgcaggaggacttggaggcccaagtgacactggtggaaaacttacgcaaatacgtcggggaacaggtgccctccgaagtacactcccagacctgggagctggaacgccagaagctgctcgagactatgcagcacctccaggaagaccgcgatagcctgcatgcgacggccgagttactgcaagtgcgcgtccagagtcttactcacatccttgccttacaggaggaagagctgactcgaaaggtccagcccagtgacagtctggaaccagagtttactcgaaagtgtcaatcattactgaaccgctggcgggaaaaggttttcgctctgatggtgcagctgaaggcccaagagctagagcattccgattccgtcaaacagctcaagggccaagtggcctccctccaggagaaggtgaccagccagtcccaggagcaggcaatcttgcaaagaagtctgcaagacaaggctgcagaggtggaagtggaacgaatgggggccaaagggctgcagctggagctgagtagggcacaggaggcacgccggcgctggcaacaacaaacagcgagtgcggaggagcagttgagactggtcgtgaacgccgtgagtagctcccaaatttggctcgagacaactatggccaaagtcgaaggcgccgcagctcaactgccatccttgaataataggctcagctacgccgtccggaaggttcacacgatcaggggcttaattgccagaaagctggctctcgcccagctgcgacaggagagctgtcctctgcctcctccagttacagacgtctcactggagcttcagcagctgagagaagaaaggaataggctggatgccgagctgcagcttagcgccaggctcatccagcaagaggttgggcgggccagggagcagggtgaagccgaacgacaacagctctctaaggtggctcagcagttggagcaggagctgcaacagacacaagaaagcctggcgtcgttgggcttgcagctggaggtggcccgccagggacagcaggagtctaccgaggaggcagcgtccctgcgccaggagctcactcagcaacaggaactgtatgggcaggcccttcaggagaaagtggcagaagtggagacaagattgcgggaacagctctccgacaccgagagaagactgaatgaggctagacgagagcatgcaaaagcagtagtgagcctgagacagatacaacgccgagcagcccaggaaaaagaacggtctcaggagctgcggcggctgcaggaagaggctcggaaggaggagggtcagcggctggcccgccggctgcaggagctcgaacgggataaaaatctaatgctggctaccctgcaacaagaaggccttttaagtcgctacaaacaacagcggttgctgaccgtgcttccatccctactggataaaaagaagtcggtggtgtcctctccgagacccccagaatgcagtgcttcagcccctgtagccgctgccgtgcctaccagggagtcaataaaagggagccttagtgtactgctcgatgatctccaggacttaagcgaggctatctcaaaagaagaagccgtctgccagggggacaacctggaccggtgttctagcagtaatccccagatgagtagctag

SEQ ID NO: 41682 - DNA, 2508 bp, Artificial Sequence
  derived and/or modified sequence
atgtggccccactctgctggcgctcggccttgggcatcaacactgaccggcaaagaccctagggtcatggcttgttggtgtttggacggcctgccgtcagggctggcggagccatggcgagaactgtggagatggaggtccagaccccttcattgcgttcctccatttagccccctggcacggtcctctcgagatcatcggaatttgaggcggcgtggaaacatcgacggctggcgacagaatttggaaccttcgaataatgtggagatgttccctccaagcggacatcaggacgtgtccgaacgcagattggatactcaaagaccccaagtcacaatgtgggaacgtgacgtctccagcgaccggcaggagcctggaagacgcggtcgaagttgggggctagagggatctcaggcccttagtcagcaggcggaagttatcgttcggcagctgcaagagctgagacggctcgaagaagaagtgcggcttctccgtgagacttcgcttcagcagaaaatgcggctggaagcccaggctatggagcttgaagccctggctagggccgaaaaggctggacgcgctgaggccgagggccttagggccgctctggcgggagctgaggtggtgcggaagaatctcgaagagggatcgcagcgcgaattagaagaggtgcagaggctgcaccaggaacagctttcatccctaacgcaggcgcatgaagaggctttgtcaagcttaacaagtaaggccgagggactggagaaatccttgtcgagtctcgagactagacgggcaggcgaagctaaagagctggctgaagctcagagagaggccgagctgttgcggaaacaattgtcaaaaacgcaggaagatctggaagcccaggttacgttggttgagaaccttcgaaagtatgtgggggagcaagtgccttccgaagtacatagccagacatgggaattggaacgccagaagctcctggaaaccatgcagcatcttcaggaagatcgtgacagtctccacgctaccgcagagttgctgcaagtgcgtgtccagtcgttgacccacattctggcactccaggaggaagaactgaccagaaaggttcagccaagtgactcactggagcctgagtttacaagaaaatgtcagtctttgctgaatcggtggagggaaaaggttttcgcccttatggttcagttgaaggcccaagagctcgagcattctgactctgtgaaacagctgaaaggtcaggtggcatctcttcaggaaaaagtaacctctcaatcacaggagcaagccattcttcagcgatccttgcaggataaggccgctgaggtggaagtagagagaatgggggcaaaaggtctacaacttgagctgtcccgagcacaggaggcacgtaggaggtggcagcaacaaactgcgtctgcagaggaacagttgcgactcgtggtcaacgccgtcagtagtagccagatctggttagagaccaccatggccaaagtcgaaggcgcagccgctcaactaccttctctgaacaacaggctgagctacgccgttaggaaagttcacacaatccgcggactcatcgctaggaagctggccctagcccagctacggcaagagagctgtccgctgccccctcctgtcacggacgtgtccctggaacttcagcaactgagggaagagcgaaatcgactggatgcagagttgcagctctccgcacgcctaattcaacaagaggtcgggagagccagggagcagggcgaggctgagcgccagcaactgtccaaagtcgctcagcagctcgaacaggagttacagcagactcaagagtccctcgcctcactggggcttcagctggaagtcgctaggcagggacagcaggagtcgacggaggaagccgcttctctccggcaggagttgactcaacagcaggaactgtatggacaggcgctgcaggagaaggtcgccgaggttgaaacaagactgcgggagcagctaagcgatactgaacggagactcaacgaggctcgccgagagcatgcaaaggcggtggtctccctgcgccaaatccaaaggcgggctgctcaagaaaaagagcgatctcaagagctgcggaggctccaagaagaagccagaaaagaagaaggacagcggctggcacgcaggctgcaagaactggagagggataagaatctgatgctggctaccctgcagcaggagggcctgctgtcccgctataagcagcagcgcttgctgaccgtgctcccaagtctgctcgataagaagaaatctgtggttagttccccaagacctcccgaatgctctgcctcagcaccagtagccgctgcagtgccgaccagggagtccatcaagggatctcttagcgtgctgttggacgatttacaagatttgtctgaagctattagcaaagaagaggccgtctgccaaggcgacaacctggatagatgctcttcatccaatccacagatgagcagctag

SEQ ID NO: 41683 - protein, 871 aa, Artificial Sequence
  derived and/or modified sequence
MWPHSAGARPWASTLTGKDPRVMACWCLDGLPSGLAEPWRELWRWRSRPLHCVPPFSPLARSSRDHRNLRRRGNIDGWRQNLEPSNNVEMFPPSGSTGLIPPSHFQARPLSTLPRMAPTWLSDIPLVQPPGHQDVSERRLDTQRPQVTMWERDVSSDRQEPGRRGRSWGLEGSQALSQQAEVIVRQLQELRRLEEEVRLLRETSLQQKMRLEAQAMELEALARAEKAGRAEAEGLRAALAGAEVVRKNLEEGSQRELEEVQRLHQEQLSSLTQAHEEALSSLTSKAEGLEKSLSSLETRRAGEAKELAEAQREAELLRKQLSKTQEDLEAQVTLVENLRKYVGEQVPSEVHSQTWELERQKLLETMQHLQEDRDSLHATAELLQVRVQSLTHILALQEEELTRKVQPSDSLEPEFTRKCQSLLNRWREKVFALMVQLKAQELEHSDSVKQLKGQVASLQEKVTSQSQEQAILQRSLQDKAAEVEVERMGAKGLQLELSRAQEARRRWQQQTASAEEQLRLVVNAVSSSQIWLETTMAKVEGAAAQLPSLNNRLSYAVRKVHTIRGLIARKLALAQLRQESCPLPPPVTDVSLELQQLREERNRLDAELQLSARLIQQEVGRAREQGEAERQQLSKVAQQLEQELQQTQESLASLGLQLEVARQGQQESTEEAASLRQELTQQQELYGQALQEKVAEVETRLREQLSDTERRLNEARREHAKAVVSLRQIQRRAAQEKERSQELRRLQEEARKEEGQRLARRLQELERDKNLMLATLQQEGLLSRYKQQRLLTVLPSLLDKKKSVVSSPRPPECSASAPVAAAVPTRESIKGSLSVLLDDLQDLSEAISKEEAVCQGDNLDRCSSSNPQMSS

SEQ ID NO: 41684 - DNA, 2616 bp, Artificial Sequence
  derived and/or modified sequence
atgtggccccacagcgccggcgccagaccctgggccagcaccctgaccggcaaggaccccagagtgatggcctgctggtgcctggacggcctgcccagcggcctggccgagccctggagagagctgtggagatggagaagcagacccctgcactgcgtgccccccttcagccccctggccagaagcagcagagaccacagaaacctgagaagaagaggcaacatcgacggctggagacagaacctggagcccagcaacaacgtggagatgttcccccccagcggcagcaccggcctgatcccccccagccacttccaggccagacccctgagcaccctgcccagaatggcccccacctggctgagcgacatccccctggtgcagccccccggccaccaggacgtgagcgagagaagactggacacccagagaccccaggtgaccatgtgggagagagacgtgagcagcgacagacaggagcccggcagaagaggcagaagctggggcctggagggcagccaggccctgagccagcaggccgaggtgatcgtgagacagctgcaggagctgagaagactggaggaggaggtgagactgctgagagagaccagcctgcagcagaagatgagactggaggcccaggccatggagctggaggccctggccagagccgagaaggccggcagagccgaggccgagggcctgagagccgccctggccggcgccgaggtggtgagaaagaacctggaggagggcagccagagagagctggaggaggtgcagagactgcaccaggagcagctgagcagcctgacccaggcccacgaggaggccctgagcagcctgaccagcaaggccgagggcctggagaagagcctgagcagcctggagaccagaagagccggcgaggccaaggagctggccgaggcccagagagaggccgagctgctgagaaagcagctgagcaagacccaggaggacctggaggcccaggtgaccctggtggagaacctgagaaagtacgtgggcgagcaggtgcccagcgaggtgcacagccagacctgggagctggagagacagaagctgctggagaccatgcagcacctgcaggaggacagagacagcctgcacgccaccgccgagctgctgcaggtgagagtgcagagcctgacccacatcctggccctgcaggaggaggagctgaccagaaaggtgcagcccagcgacagcctggagcccgagttcaccagaaagtgccagagcctgctgaacagatggagagagaaggtgttcgccctgatggtgcagctgaaggcccaggagctggagcacagcgacagcgtgaagcagctgaagggccaggtggccagcctgcaggagaaggtgaccagccagagccaggagcaggccatcctgcagagaagcctgcaggacaaggccgccgaggtggaggtggagagaatgggcgccaagggcctgcagctggagctgagcagagcccaggaggccagaagaagatggcagcagcagaccgccagcgccgaggagcagctgagactggtggtgaacgccgtgagcagcagccagatctggctggagaccaccatggccaaggtggagggcgccgccgcccagctgcccagcctgaacaacagactgagctacgccgtgagaaaggtgcacaccatcagaggcctgatcgccagaaagctggccctggcccagctgagacaggagagctgccccctgcccccccccgtgaccgacgtgagcctggagctgcagcagctgagagaggagagaaacagactggacgccgagctgcagctgagcgccagactgatccagcaggaggtgggcagagccagagagcagggcgaggccgagagacagcagctgagcaaggtggcccagcagctggagcaggagctgcagcagacccaggagagcctggccagcctgggcctgcagctggaggtggccagacagggccagcaggagagcaccgaggaggccgccagcctgagacaggagctgacccagcagcaggagctgtacggccaggccctgcaggagaaggtggccgaggtggagaccagactgagagagcagctgagcgacaccgagagaagactgaacgaggccagaagagagcacgccaaggccgtggtgagcctgagacagatccagagaagagccgcccaggagaaggagagaagccaggagctgagaagactgcaggaggaggccagaaaggaggagggccagagactggccagaagactgcaggagctggagagagacaagaacctgatgctggccaccctgcagcaggagggcctgctgagcagatacaagcagcagagactgctgaccgtgctgcccagcctgctggacaagaagaagagcgtggtgagcagccccagaccccccgagtgcagcgccagcgcccccgtggccgccgccgtgcccaccagagagagcatcaagggcagcctgagcgtgctgctggacgacctgcaggacctgagcgaggccatcagcaaggaggaggccgtgtgccagggcgacaacctggacagatgcagcagcagcaacccccagatgagcagctag

SEQ ID NO: 41685 - DNA, 2625 bp, Artificial Sequence
  derived and/or modified sequence
aggggcagaggcggggccgggagcgaggcgtagggggtgtggccaaagcgcagtagggggctctcgcggttggggaacatagatggctggagacagaatctagagccttcaaataatgtggagatgtttccaccttcaggttccactgggctgattcccccctcccactttcaagctcggcccctttcaactctgccaagaatggctcccacctggctctcagacattcccctggtccaacccccaggccatcaagatgtctcagagaggcggctagacacccagagacctcaagtgaccatgtgggaacgggatgtttccagtgacaggcaggagccagggcggagaggcaggtcctgggggctggaggggtcacaggccctgagccagcaggctgaggtgatcgttcggcagctgcaagagctgcggcggctggaggaggaggtccggctcctgcgggagacctcgctgcagcagaagatgaggctagaggcccaggccatggagctagaggctctggcacgggcggagaaggccggccgagctgaggctgagggcctgcgtgctgctttggctggggctgaggttgtccggaagaacttggaagaggggagccagcgggagctggaagaggttcagaggctgcaccaagagcagctgtcctctttgacacaggctcacgaggaggctctttccagtttgaccagcaaggctgagggcttggagaagtctctgagtagtctggaaaccagaagagcaggggaagccaaggagctggccgaggctcagagggaggccgagctgcttcggaagcagctgagcaagacccaggaagacttggaggctcaggtgaccctggttgagaatctaagaaaatatgttggggaacaagtgccttctgaggtccacagccagacatgggaactggagcgacagaagcttctggaaaccatgcagcacttgcaggaggaccgggacagcctgcatgccaccgcggagctgctgcaggtgcgggtgcagagcctcacacacatcctcgccctgcaggaggaggagctgaccaggaaggttcaaccttcagattccctggagcctgagtttaccaggaagtgccagtccctgctgaaccgctggcgggagaaggtgtttgccctcatggtgcagctaaaggcccaggagctggaacacagtgactctgttaagcagctgaagggacaggtggcctcactccaggaaaaagtgacatcccagagccaggagcaggccatcctgcagcgatccctgcaggacaaagccgcagaggtggaggtggagcgtatgggtgccaagggcctgcagttggagctgagccgtgctcaggaggccaggcgtcggtggcagcagcagacagcctcagccgaggagcagctgaggcttgtggtcaatgctgtcagcagctctcagatctggctcgagaccaccatggctaaggtggaaggggctgccgcccagcttcccagcctcaacaaccgactcagctatgctgtccgcaaggtccacaccattcggggcctgattgctcgaaagcttgcccttgctcagctgcgccaggagagctgtcccctaccaccaccggtcacagacgtgagccttgagttgcagcagttgcgggaagaacggaaccgcctggatgcagaactgcagctgagtgcccgcctcatccagcaggaggtgggccgggctcgggagcaaggggaggcagagcggcagcagctgagcaaggtggcccagcagctggagcaggagctgcagcagacccaggagtccctggctagcttggggctgcagctggaggtagcacgccagggccagcaggagagcacagaggaggctgccagtctgcggcaggagctgacccagcagcaggaactctacgggcaagccctgcaagaaaaggtggctgaagtggaaactcggctgcgggagcaactctcagacacagagaggaggctgaacgaggctcggagggagcatgccaaggccgtggtctccttacgccagattcagcgcagagccgcccaggaaaaggagcggagccaggaactcaggcgtctgcaggaggaggcccggaaggaggaggggcagcgactggcccggcgcttgcaggagctagagagggataagaacctcatgctggccaccttgcagcaggaaggtctcctctcccgttacaagcagcagcgactgttgacagttcttccttccctactggataagaagaaatctgtggtgtccagccccaggcctccagagtgttcagcatctgcacctgtagcagcagcagtgcccaccagggagtccataaaagggtccctctctgtcctgctcgatgacctgcaggacctgagtgaagccatttccaaagaggaagctgtttgtcaaggagacaaccttgacagatgctccagctccaatccccagatgagcagctaagcagctgacagttggagggaaagccagcctgggggctgggaggatcctggagaagtgggtggggacagaccagcccttccccatcctggggttgccctgggggataccagctgagtctgaattctgctctaaataaagacgactacagaagga

SEQ ID NO: 41686 - DNA, 2600 bp, Artificial Sequence
  derived and/or modified sequence
aggcgtagggggagtggccaaagcgcagtagggggctctcgcggttggggaacatagatggctgaagacagaatctagagccttcaaataatgtggagatgtttccaccttcaggttccactgggctgattcccccctcccactttcaagctcggcccctttcaactctgccaagaatggctcccacctggctctcagacattcccctggtccaacccccaggccatcaagatgtctcagagaggcggctagacacccagagacctcaagtgaccatgtgggaacgggatgtttccagtgacaggcaggagccagggcggagaggcaggtcctgggggctggaggggtcacaggccctgagccagcaggctgaggtgatcgttcggcagctgcaagagctgcggtggctggaggaggaggtctggctcctgcgggagacctcgctgcagcagaagatgaggctagaggcccaggccatggagctagaggctctggcacgggcggagaaggccggccgagctgaggctgagggcctgcgtgctgctttggctggggctgaggttgtccggaagaacttggaagaggggaggcagcgggagctggaagaggttcagaggctgcaccaagagcagctgtcctctttgacacaggctcacgaggaggctctttccagtttgaccagcaaggctgagggcttggagaagtctctgagtagtctggaaaccagaagagcaggggaagccaaggagctggccgaggctcagagggaggccgagctgcttcggaagcagctgagcaagacccaggaagacttggaggctcaggtgaccctggttgagaatctaagaaaatatgttggggaacaagtcccttctgaggtccacagccagacatgggaactggagcgacagaagcttctggaaaccatgcagcacttgcaggaggaccgggacagcctgcatgccaccgcggagctgctgcaggtgcgggtgcagagcctcacacacatcctcgccctgcaggaggaggagctgaccaggaaggttcaaccttcagattccctggagcctgagtttaccaggaagtgccagtccctgctgaaccgctggcgggagaaggtgtttgccctcatggtgcagctaaaggcccaggagctggaacacagtgactctgttaagcagctgaagggacaggtggcctcactccaggaaaaagtgacatcccagagccaggagcaggccatcctgcagcgatccctgcaggacaaagccgcagaggtggaggtggagcgtatgggtgccaagggcctgcagttggagctgagccgtgctcaggaggccaggcgttggtggcagcagcagacagcctcagccgaggagcagttgaggcttgtggtcaatgctgtcagcagctctcagatctggctcgagaccaccatggctaaggtggaaggggctgccgcccagcttcccagcctcaacaaccgactcagctatgctgtccgcaaggtccacaccattcggggcctgattgctcgaaagcttgcccttgctcagctgcgccaggagagctgtcccctaccaccaccggtcacagatgtgagccttgagttgcagcagctgcgggaagaacggaaccgcctggatgcagaactgcagctgagtgcccgcctcatccagcaggaggtgggccgggctcgggagcaaggggaggcagagcggcagcagctgagcaaggtggcccagcagctggagcaggagctgcagcagacccaggagtccctggctagcttggggctgcagctggaggtagcacgccagtgccagcaggagagcacagaggaggctgccagtctgcggcaggagctgacccagcagcaggaactctacgggcaagccctgcaagaaaaggtggctgaagtggaaactcggctgcgggagcaactctcagacacagagaggaggctgaacgaggctcggagggagcatgccaaggccgtggtctccttgcgccagattcagcgcagagccgcccaggaaaaggagcggagccaggaactcaggcgtctgcaggaggaggcccggaaggaggaggggcagcgactggcccggcgcttgcaggagctagagagggataagaacctcatgctggccaccttgcagcaggaaggtctcctctcccgttacaagcagcagcgactgttgacagttcttccttccctactggataagaagaaatctgtggtgtccagccccaggcctccagagtgttcagcatctgcacctgtagcagcagcagtgcccaccagggagtccataaaagggtccctctctgtcctgctcgatgacctgcaggacctgagtgaagccatttccaaagaggaagctgtttgtcaaggagacaaccttgacagatgctccagctgcaatccccagatgagcagctaagcagctgacagttggagggaaagccagcctgggggctgggaggatcctggagaagtgggtggggacagaccagcccttccccatcctggggttgccctgggggataccagctgagtctgaattctgctctaaataaagacgactacagaagga

SEQ ID NO: 41687 - DNA, 2600 bp, Artificial Sequence
  derived and/or modified sequence
aggcgtagggggtgtggccaaagcgcagtagggggctctcgcggttggggaacatagatggctggagacagaatctagagccttcaaataatgtggagatgtttccaccttcaggttccactgggctgattcccccctcccactttcaagctcggcccctttcaactctgccaagaatggctcccacctggctctcagacattcccctggtccaacccccaggccatcaagatgtctcagagaggcggctagacacccagagacctcaagtgaccatgtgggaacgggatgtttccagtgacaggcaggagccagggcggagaggcaggtcctgggggctggaggggtcacaggccctgagccagcaggctgaggtgatcgttcggcagctgcaagagctgcggcggctggaggaggaggtccggctcctgcgggagacctcgctgcagcagaagatgaggctagaggcccaggccatggagctagaggctctggcacgggcggagaaggccggccgagctgaggctgagggcctgcgtgctgctttggctggggctgaggttgtccggaagaatttggaagaggggagccagcgggagctggaagaggttcagaggctgcaccaagagcagctgtcctctttgacacaggctcacgaggaggctctttccagtttgaccagcaaggctgagggcttggagaagtctctgagtagtctggaaaccagaagagcaggggaagccaaggagctggccgaggctcagagggaggccgagctgcttcggaagcagctgagcaagacccaggaagacttggaggctcaggtgaccctggttgagaatctaagaaaatatgttggggaacaagtcccttctgaggtccacagccagacatgggaactggagcgacagaagcttctggaaaccatgcagcacttgcaggaggaccgggacagcctgcatgccaccgcggagctgctgcaggtgcgggtgcagagcctcacacacatcctcgccctgcaggaggaggagctgaccaggaaggttcaaccttcagattccctggagcctgagtttaccaggaagtgccagtccctgctgaaccgctggcgggagaaggtgtttgccctcatggtgcagctaaaggcccaggagctggaacacagtgactctgttaagcagctgaagggacaggtggcctcactccaggaaaaagtgacatcccagagccaggagcaggccatcctgcagcgatccctgcaggacaaagccgcagaggtggaggtggagcgtatgggtgccaagggcctgcagttggagctgagccgtgctcaggaggccaggcgtcggtggcagcagcagacagcctcagctgaggagcagctgaggcttgtggtcaatgctgtcagcagctctcagatctggctcgagaccaccatggctaaggtggaaggggctgccgcccagcttcccagcctcaacaaccgactcagctatgctgtccgcaaggtccacaccattcggggcctgattgctcgaaagcttgcccttgctcagctgcgccaggagagctgtcccctaccaccaccggtcacagatgtgagccttgagttgcagcagctgcgggaagaacggaaccgcctggatgcagaactgcagctgagtgcccgcctcatccagcaggaggtgggccgggctcgggagcaaggggaggcagagcggcagcagctgagcaaggtggcccagcagctggagcaggagctgcagcagacccaggagtccctggctagcttggggctgcagctggaggtagcacgccagggccagcaggagagcacagaggaggctgccagtctgcggcaggagctgacccagcagcaggaactctacgggcaagccctgcaagaaaaggtggctgaagtggaaactcggctgcgggagcaactctcagacacagagaggaggctgaacgaggctcggagggagcatgccaaggccgtggtctccttgcgccagattcagcgcagagccgcccaggaaaaggagcggagccaggaactcaggcgtctgcaggaggaggcccggaaggaggaggggcagcgactggcccggcgcttgcaggagctagagagggataagaacctcatgctggccaccttgcagcaggaaggtctcctctcccgttacaagcagcagcgactgttgacagttcttccttccctactggataagaagaaatctgtggtgtccagccccaggcctccagagtgttcagcttctgcacctgtagcagcagcagtgcccaccagggagtccataaaagggtccctctctgtcctgctcgatgacctgcaggacctgagtgaagccatttccaaagaggaagctgtttgtcaaggagacaaccttgacagatgctccagctccaatccccagatgagcagctaagcagctgacagttggagggaaagccagcctgggggctgggaggatcctggagaagtgggtggggacagaccagcccttccccatcctggggttgccctgggggataccagctgagtctgaattctgctctaaataaagacgactacagaagga

SEQ ID NO: 41688 - DNA, 2958 bp, Artificial Sequence
  derived and/or modified sequence
gtgcccactatgtgttaggactcgagaaagaggaggcgggcagcaggcatggaagctaaggggatagtagagagaagctgagagaacagccgcaggaaagatttgaataagatgtcaggacgctggcttttctgcctggggatctaggcggcctggattcccaaggtcttggggagggtctagccctgcatgtggccacattcagctggggccaggccttgggccagcactttaacagggaaggacccaagagtcatggcctgctggtgtctggatgggcttccctcaggccttgctgagccatggagagaactctggagatggcgctcaagacccctgcactgtgtacctcctttctcacctctggccaggagcagcagggaccatagaaacttaaggaggagggggaacatagatggctggagacagaatctagagccttcaaataatgtggagatgtttccaccttcaggttccactgggctgattcccccctcccactttcaagctcggcccctttcaactctgccaagaatggctcccacctggctctcagacattcccctggtccaacccccaggccatcaagatgtctcagagaggcggctagacacccagagacctcaagtgaccatgtgggaacgggatgtttccagtgacaggcaggagccagggcggagaggcaggtcctgggggctggaggggtcacaggccctgagccagcaggctgaggtgatcgttcggcagctgcaagagctgcggcggctggaggaggaggtccggctcctgcgggagacctcgctgcagcagaagatgaggctagaggcccaggccatggagctagaggctctggcacgggcggagaaggccggccgagctgaggctgagggcctgcgtgctgctttggctggggctgaggttgtccggaagaacttggaagaggggagccagcgggagctggaagaggttcagaggctgcaccaagagcagctgtcctctttgacacaggctcacgaggaggctctttccagtttgaccagcaaggctgagggcttggagaagtctctgagtagtctggaaaccagaagagcaggggaagccaaggagctggccgaggctcagagggaggccgagctgcttcggaagcagctgagcaagacccaggaagacttggaggctcaggtgaccctggttgagaatctaagaaaatatgttggggaacaagtgccttctgaggtccacagccagacatgggaactggagcgacagaagcttctggaaaccatgcagcacttgcaggaggaccgggacagcctgcatgccaccgcggagctgctgcaggtgcgggtgcagagcctcacacacatcctcgccctgcaggaggaggagctgaccaggaaggttcaaccttcagattccctggagcctgagtttaccaggaagtgccagtccctgctgaaccgctggcgggagaaggtgtttgccctcatggtgcagctaaaggcccaggagctggaacacagtgactctgttaagcagctgaagggacaggtggcctcactccaggaaaaagtgacatcccagagccaggagcaggccatcctgcagcgatccctgcaggacaaagccgcagaggtggaggtggagcgtatgggtgccaagggcctgcagttggagctgagccgtgctcaggaggccaggcgtcggtggcagcagcagacagcctcagccgaggagcagctgaggcttgtggtcaatgctgtcagcagctctcagatctggctcgagaccaccatggctaaggtggaaggggctgccgcccagcttcccagcctcaacaaccgactcagctatgctgtccgcaaggtccacaccattcggggcctgattgctcgaaagcttgcccttgctcagctgcgccaggagagctgtcccctaccaccaccggtcacagacgtgagccttgagttgcagcagttgcgggaagaacggaaccgcctggatgcagaactgcagctgagtgcccgcctcatccagcaggaggtgggccgggctcgggagcaaggggaggcagagcggcagcagctgagcaaggtggcccagcagctggagcaggagctgcagcagacccaggagtccctggctagcttggggctgcagctggaggtagcacgccagggccagcaggagagcacagaggaggctgccagtctgcggcaggagctgacccagcagcaggaactctacgggcaagccctgcaagaaaaggtggctgaagtggaaactcggctgcgggagcaactctcagacacagagaggaggctgaacgaggctcggagggagcatgccaaggccgtggtctccttacgccagattcagcgcagagccgcccaggaaaaggagcggagccaggaactcaggcgtctgcaggaggaggcccggaaggaggaggggcagcgactggcccggcgcttgcaggagctagagagggataagaacctcatgctggccaccttgcagcaggaaggtctcctctcccgttacaagcagcagcgactgttgacagttcttccttccctactggataagaagaaatctgtggtgtccagccccaggcctccagagtgttcagcatctgcacctgtagcagcagcagtgcccaccagggagtccataaaagggtccctctctgtcctgctcgatgacctgcaggacctgagtgaagccatttccaaagaggaagctgtttgtcaaggagacaaccttgacagatgctccagctccaatccccagatgagcagctaagcagctgacagttggagggaaagccagcctgggggctgggaggatcctggagaagtgggtggggacagaccagcccttccccatcctggggttgccctgggggataccagctgagtctgaattctgctctaaataaagacgactacagaagga

SEQ ID NO: 41689 - DNA, 2958 bp, Artificial Sequence
  derived and/or modified sequence
gtgcccactatgtgttaggactcgagaaagaggaggcgggcagcaggcatggaagctaaggggatagtagagagaagctgagagaacagccgcaggaaagatttgaataagatgtcaggacgctggcttttctgcctggggatctaggcggcctggattcccaaggtcttggggagggtctagccctgcatgtggccacattcagctggggccaggccttgggccagcactttaacagggaaggacccaagagtcatggcctgctggtgtctggatgggcttccctcaggccttgctgagccatggagagaactctggagatggcgctcaagacccctgcactgtgtacctcctttctcacctctggccaggagcagcagggaccatagaaacttaaggaggagggggaacatagatggctgaagacagaatctagagccttcaaataatgtggagatgtttccaccttcaggttccactgggctgattcccccctcccactttcaagctcggcccctttcaactctgccaagaatggctcccacctggctctcagacattcccctggtccaacccccaggccatcaagatgtctcagagaggcggctagacacccagagacctcaagtgaccatgtgggaacgggatgtttccagtgacaggcaggagccagggcggagaggcaggtcctgggggctggaggggtcacaggccctgagccagcaggctgaggtgatcgttcggcagctgcaagagctgcggtggctggaggaggaggtctggctcctgcgggagacctcgctgcagcagaagatgaggctagaggcccaggccatggagctagaggctctggcacgggcggagaaggccggccgagctgaggctgagggcctgcgtgctgctttggctggggctgaggttgtccggaagaacttggaagaggggaggcagcgggagctggaagaggttcagaggctgcaccaagagcagctgtcctctttgacacaggctcacgaggaggctctttccagtttgaccagcaaggctgagggcttggagaagtctctgagtagtctggaaaccagaagagcaggggaagccaaggagctggccgaggctcagagggaggccgagctgcttcggaagcagctgagcaagacccaggaagacttggaggctcaggtgaccctggttgagaatctaagaaaatatgttggggaacaagtcccttctgaggtccacagccagacatgggaactggagcgacagaagcttctggaaaccatgcagcacttgcaggaggaccgggacagcctgcatgccaccgcggagctgctgcaggtgcgggtgcagagcctcacacacatcctcgccctgcaggaggaggagctgaccaggaaggttcaaccttcagattccctggagcctgagtttaccaggaagtgccagtccctgctgaaccgctggcgggagaaggtgtttgccctcatggtgcagctaaaggcccaggagctggaacacagtgactctgttaagcagctgaagggacaggtggcctcactccaggaaaaagtgacatcccagagccaggagcaggccatcctgcagcgatccctgcaggacaaagccgcagaggtggaggtggagcgtatgggtgccaagggcctgcagttggagctgagccgtgctcaggaggccaggcgttggtggcagcagcagacagcctcagccgaggagcagttgaggcttgtggtcaatgctgtcagcagctctcagatctggctcgagaccaccatggctaaggtggaaggggctgccgcccagcttcccagcctcaacaaccgactcagctatgctgtccgcaaggtccacaccattcggggcctgattgctcgaaagcttgcccttgctcagctgcgccaggagagctgtcccctaccaccaccggtcacagatgtgagccttgagttgcagcagctgcgggaagaacggaaccgcctggatgcagaactgcagctgagtgcccgcctcatccagcaggaggtgggccgggctcgggagcaaggggaggcagagcggcagcagctgagcaaggtggcccagcagctggagcaggagctgcagcagacccaggagtccctggctagcttggggctgcagctggaggtagcacgccagtgccagcaggagagcacagaggaggctgccagtctgcggcaggagctgacccagcagcaggaactctacgggcaagccctgcaagaaaaggtggctgaagtggaaactcggctgcgggagcaactctcagacacagagaggaggctgaacgaggctcggagggagcatgccaaggccgtggtctccttgcgccagattcagcgcagagccgcccaggaaaaggagcggagccaggaactcaggcgtctgcaggaggaggcccggaaggaggaggggcagcgactggcccggcgcttgcaggagctagagagggataagaacctcatgctggccaccttgcagcaggaaggtctcctctcccgttacaagcagcagcgactgttgacagttcttccttccctactggataagaagaaatctgtggtgtccagccccaggcctccagagtgttcagcatctgcacctgtagcagcagcagtgcccaccagggagtccataaaagggtccctctctgtcctgctcgatgacctgcaggacctgagtgaagccatttccaaagaggaagctgtttgtcaaggagacaaccttgacagatgctccagctgcaatccccagatgagcagctaagcagctgacagttggagggaaagccagcctgggggctgggaggatcctggagaagtgggtggggacagaccagcccttccccatcctggggttgccctgggggataccagctgagtctgaattctgctctaaataaagacgactacagaagga

SEQ ID NO: 41690 - DNA, 2958 bp, Artificial Sequence
  derived and/or modified sequence
gtgcccactatgtgttaggactcgagaaagaggaggcgggcagcaggcatggaagctaaggggatagtagagagaagctgagagaacagccgcaggaaagatttgaataagatgtcaggacgctggcttttctgcctggggatctaggcggcctggattcccaaggtcttggggagggtctagccctgcatgtggccacattcagctggggccaggccttgggccagcactttaacagggaaggacccaagagtcatggcctgctggtgtctggatgggcttccctcaggccttgctgagccatggagagaactctggagatggcgctcaagacccctgcactgtgtacctcctttctcacctctggccaggagcagcagggaccatagaaacttaaggaggagggggaacatagatggctggagacagaatctagagccttcaaataatgtggagatgtttccaccttcaggttccactgggctgattcccccctcccactttcaagctcggcccctttcaactctgccaagaatggctcccacctggctctcagacattcccctggtccaacccccaggccatcaagatgtctcagagaggcggctagacacccagagacctcaagtgaccatgtgggaacgggatgtttccagtgacaggcaggagccagggcggagaggcaggtcctgggggctggaggggtcacaggccctgagccagcaggctgaggtgatcgttcggcagctgcaagagctgcggcggctggaggaggaggtccggctcctgcgggagacctcgctgcagcagaagatgaggctagaggcccaggccatggagctagaggctctggcacgggcggagaaggccggccgagctgaggctgagggcctgcgtgctgctttggctggggctgaggttgtccggaagaatttggaagaggggagccagcgggagctggaagaggttcagaggctgcaccaagagcagctgtcctctttgacacaggctcacgaggaggctctttccagtttgaccagcaaggctgagggcttggagaagtctctgagtagtctggaaaccagaagagcaggggaagccaaggagctggccgaggctcagagggaggccgagctgcttcggaagcagctgagcaagacccaggaagacttggaggctcaggtgaccctggttgagaatctaagaaaatatgttggggaacaagtcccttctgaggtccacagccagacatgggaactggagcgacagaagcttctggaaaccatgcagcacttgcaggaggaccgggacagcctgcatgccaccgcggagctgctgcaggtgcgggtgcagagcctcacacacatcctcgccctgcaggaggaggagctgaccaggaaggttcaaccttcagattccctggagcctgagtttaccaggaagtgccagtccctgctgaaccgctggcgggagaaggtgtttgccctcatggtgcagctaaaggcccaggagctggaacacagtgactctgttaagcagctgaagggacaggtggcctcactccaggaaaaagtgacatcccagagccaggagcaggccatcctgcagcgatccctgcaggacaaagccgcagaggtggaggtggagcgtatgggtgccaagggcctgcagttggagctgagccgtgctcaggaggccaggcgtcggtggcagcagcagacagcctcagctgaggagcagctgaggcttgtggtcaatgctgtcagcagctctcagatctggctcgagaccaccatggctaaggtggaaggggctgccgcccagcttcccagcctcaacaaccgactcagctatgctgtccgcaaggtccacaccattcggggcctgattgctcgaaagcttgcccttgctcagctgcgccaggagagctgtcccctaccaccaccggtcacagatgtgagccttgagttgcagcagctgcgggaagaacggaaccgcctggatgcagaactgcagctgagtgcccgcctcatccagcaggaggtgggccgggctcgggagcaaggggaggcagagcggcagcagctgagcaaggtggcccagcagctggagcaggagctgcagcagacccaggagtccctggctagcttggggctgcagctggaggtagcacgccagggccagcaggagagcacagaggaggctgccagtctgcggcaggagctgacccagcagcaggaactctacgggcaagccctgcaagaaaaggtggctgaagtggaaactcggctgcgggagcaactctcagacacagagaggaggctgaacgaggctcggagggagcatgccaaggccgtggtctccttgcgccagattcagcgcagagccgcccaggaaaaggagcggagccaggaactcaggcgtctgcaggaggaggcccggaaggaggaggggcagcgactggcccggcgcttgcaggagctagagagggataagaacctcatgctggccaccttgcagcaggaaggtctcctctcccgttacaagcagcagcgactgttgacagttcttccttccctactggataagaagaaatctgtggtgtccagccccaggcctccagagtgttcagcttctgcacctgtagcagcagcagtgcccaccagggagtccataaaagggtccctctctgtcctgctcgatgacctgcaggacctgagtgaagccatttccaaagaggaagctgtttgtcaaggagacaaccttgacagatgctccagctccaatccccagatgagcagctaagcagctgacagttggagggaaagccagcctgggggctgggaggatcctggagaagtgggtggggacagaccagcccttccccatcctggggttgccctgggggataccagctgagtctgaattctgctctaaataaagacgactacagaagga

SEQ ID NO: 41691 - DNA, 740 bp, Artificial Sequence
  derived and/or modified sequence
gccaggtgaagggacagatgaagagatcagaacagccttagagctcacgggctaactgggccttgctgagccatggagagaactctggagatggcgctcaagacccctgcactgtgtacctcctttctcacctctggccaggagcagcagggaccatagaaacttaaggaggagggggaacatagatggctggagacagaatctagagccttcaaataatgtggagatgtttccaccttcaggtcagtgggaccagacaaggggagtggtggttgtctctgcctgggaaactgaccatctttgtttttgtaattcttcaggttccactgggctgattcccccctcccactttcaagctcggcccctttcaactctgccaagaatggctcccacctggctctcagacattcccctggtccaacccccaggccatcaagatgtctcagagaggcggctagacacccagagacctcaagtgaccatgtgggaacgggatgtttccagtgacaggcaggagccagggcggagaggcaggtcctgggggctggaggggtcacaggccctgagccagcaggctgaggtgatcgttcggcagctgcaagagctgcggcggctggaggaggaggtccggctcctgcgggagacctcgctgcagcagaagatgaggctagaggcccaggccatggagctagaggctctggcacgggcggagaaggccggccgagctgaggctgagggcc

SEQ ID NO: 41692 - DNA, 740 bp, Artificial Sequence
  derived and/or modified sequence
gccaggtgaagggacagatgaagcgatcagaacagccttagagctcacgggctaactgggccttgctgagccatggagagaactctggagatggcgctcaagacccctgcactgtgtacctcctttctcacctctggccaggagcagcagggaccatagaaacttaaggaggagggggaacatagatggctggagacagaatctagagccttcaaataatgtggagatgtttccaccttcaggtcagtgggaccagacaaggggagtggtggttgtctctgcctgggaaactgaccatctttgtttttgtaattcttcaggttccactgggctgattcccccctcccactttcaagctcggcccctttcaactctgccaagaatggctcccacctggctctcagacattcccctggtccaacccccaggccatcaagatgtctcagagaggcggctagacacccagagacctcaagtgaccatgtgggaacgggatgtttccagtgacaggcaggagccagggcggagaggcaggtcctgggggctggaggggtcacaggccctgagccagcaggctgaggtgatcgttcggcagctgcaagagctgcggcggctggaggaggaggtccggctcctgcgggagacctcgctgcagcagaagatgaggctagaggcccaggccatggagctagaggctctggcacgggcggagaaggccggccgagctgaggctgagggcc

SEQ ID NO: 41693 - DNA, 2616 bp, Artificial Sequence
  derived and/or modified sequence
atgtggccccactccgccggggcccggccctgggccagtactttaacaggtaaagacccacgggtgatggcctgttggtgtctagatggcctgccttcagggctcgctgagccctggagggaactgtggagatggagaagccgaccactccattgcgtgccacctttctcccccctggcgcgatctagccgcgatcacagaaacctgcgtagacgcgggaacatcgatggatggagacaaaacctagagcctagtaacaacgtcgaaatgttccctccttccggtagtactgggctgatccctccttcacatttccaggcacgtccactttcaaccttgccccgaatggcccccacctggctatctgacataccacttgttcagccccctgggcaccaggatgtgtctgaacgaaggttggacacgcagagaccacaggtcaccatgtgggagcgggacgtgtcatcggacagacaggagcctggacgccgtggccggtcttgggggctagaagggagccaggccctgagccagcaggcggaagtgattgtgcggcagctccaggagctgcggagactcgaggaagaagtacgactcctgagagagacatctctccagcagaaaatgcggctggaagcacaagcaatggagctggaggcgctggctagagcggagaaggcggggcgtgccgaagcggaaggtcttagggccgcactggcgggcgctgaggtcgtgcgcaaaaacctcgaagagggttcccagcgagaactggaagaagtccagaggctacatcaggaacaactgtcatcactgactcaggcgcatgaggaggctctcagctctcttactagcaaggccgaagggcttgagaaatctctgtcctctctggaaacacgcagggccggggaagctaaagaattagctgaggcccagcgggaggccgagttgcttcgcaaacaactgtcaaaaactcaagaggacctggaggcccaagttactttggtcgaaaatctgaggaagtacgtcggggaacaggtgccttccgaggtgcacagccagacctgggagctggagcgccagaagctgttagagaccatgcagcacctccaagaagacagggatagcctgcacgcaacagctgagttactgcaggtaagagtacaatcgttgacacatatcctagccttgcaggaggaggagcttacccggaaagtgcagccatcagattcccttgagcctgagttcacccggaaatgtcagagccttttaaatcgatggcgcgaaaaagtatttgcattaatggtgcaactcaaagcacaggagctcgagcactcagatagtgtgaaacagctcaaagggcaggttgccagtttgcaggagaaagttacttcgcagtcacaggaacaggccatcttgcaaagatcattacaggataaagctgctgaggtggaggtggaacggatgggcgctaaagggcttcagctggagctcagccgcgcgcaggaagcccggcgccgttggcagcagcagaccgcctcagctgaggagcaactgaggctggtcgtcaatgcagtgtctagttcacagatctggctcgaaaccacaatggcaaaggtggagggggccgccgcccagctcccttctttgaacaatcgtctgagctatgcagtgaggaaggtgcataccattcgtggtctaatagcaaggaagttggcactcgcacagctccgccaggagtcctgcccccttcctcctcctgtgacagacgtgtcactcgaattacagcagctgagggaggagcgcaatcggctggacgccgagttacagctgagcgcacgactgattcagcaagaggttggtcgggcaagggaacagggtgaggccgaaaggcagcagctcagtaaagtggcacagcagctggaacaagaactccagcagacacaggagagcctggcgagtctcggactgcagctggaagtcgctaggcaggggcagcaggaatctacggaagaggctgcaagtctgaggcaggaactgacacagcagcaggaactttatggacaggctcttcaggagaaggttgcggaggtcgagacacgactaagggagcagctttcagacacagaaagaagactgaacgaggcacgccgggaacacgcaaaggccgtggtttcactgcgacaaattcaacgccgcgcagcccaggagaaggagcgcagtcaggaactccgtcggctacaggaggaggcaagaaaggaggagggtcagcggctggcccgtcgcctgcaagagttggaaagagacaagaatctgatgttggctactctgcagcaagagggactgctctcacgctataagcagcagaggctgctgaccgtgctgccgtcattgttggataagaaaaaatctgtggtttccagccccagacccccggagtgttcagcttcagcccccgttgccgccgccgtgccaacacgtgaatccataaaaggaagcctgtccgttctattagatgacctccaagatctgtccgaagctatctccaaagaggaagctgtgtgccaaggtgacaatctggataggtgttcctcaagtaatccgcaaatgtcctcatag

SEQ ID NO: 41694 - DNA, 2616 bp, Artificial Sequence
  derived and/or modified sequence
atgtggccacactctgcaggcgccagaccttgggcctctacgttaactggaaaagacccccgggtgatggcgtgttggtgtttagacggattgcccagcgggctcgctgagccctggcgcgagctctggaggtggcggagcagacctctacattgtgtgccgccgtttagcccacttgcgcggtccagcagagatcatcgaaatctgcggagaaggggcaatattgacggttggaggcagaatctagaaccaagcaataatgtggagatgttccctccatccggctcaaccgggttgattccaccctcacacttccaggctcgccccctgtcgactttgccgaggatggcccccacatggttaagcgacatccccctggtacaaccacctgggcaccaggatgtatctgagcgcaggctggacacccagcggcctcaggtgactatgtgggagagggacgtcagttccgataggcaggaacctggccggcggggacgtagctggggattggaagggtcgcaggctttatcgcagcaggcggaagtcatcgtccggcagttgcaggagctcagacggttagaagaggaagtcagattgttgcgcgagacatccctccagcagaagatgcgattggaggcccaagccatggagcttgaagccctggctcgggccgaaaaggctggccgggcagaagctgagggtctacgggcggccctcgccggcgccgaagtcgtgcgcaaaaatttagaggaagggagtcaacgcgagctggaagaagtgcagcggttacatcaggagcaactgtctagtctgactcaagcccatgaggaggcattgtcttcactgacctccaaggccgagggtctggaaaaaagcctgtcttctctagagactcgccgagccggtgaggcaaaagagcttgctgaagctcagagagaggcagaattgctccggaaacagctgagcaaaacccaggaggatctggaagcccaggtgacactggtagagaacctccgcaaatatgtgggggaacaggtgccctcagaagtccacagccagacctgggagcttgagcgacaaaagctgctcgagactatgcaacatctgcaggaggaccgcgatagcttgcatgcgactgctgagctgctgcaggtgcgagtgcaatctttgacacatattctggcacttcaggaagaggagcttactaggaaggttcagcccagcgattcattggagcctgaatttacccgaaagtgccagtctctgttaaaccgctggcgggagaaggtgtttgcgcttatggtccagctcaaggctcaagaactggaacacagcgacagcgtgaaacagctgaaaggacaggtggcaagcctgcaagagaaagtgacttcccagtcccaagagcaagccatcctccagaggtctctacaggacaaggccgcagaggtagaggtagaacggatgggagcaaagggcttgcagctggagctgagtcgcgcacaagaagctcgcagacgttggcagcagcagacagcatcagccgaggagcagctcagactggtggttaacgcagtttcctctagtcagatttggctcgaaactaccatggctaaggtggagggcgccgcagcacagttgcctagccttaacaaccggctgtcctacgccgtgcgaaaggtccacaccatacgcggtctgatcgcccgcaagctcgccctcgcacaacttaggcaagagtcatgcccgctcccacctccagtgaccgacgtgagtttggagttgcaacagctccgcgaggaacgcaatcgccttgacgctgaactgcagctgtctgctaggttgattcagcaggaggtgggcagggccagagaacagggcgaggcagagcgtcagcagctatctaaggtggcccagcagcttgaacaggaacttcagcagactcaggaaagtctcgcctcccttggtctgcaacttgaagtggcaagacagggtcaacaggagagcaccgaggaggccgcctctctgaggcaagaactgacacagcagcaggaactttacggacaggcactccaagaaaaggtggcggaggttgaaaccagattgagggaacagctttcagatactgaacggaggctcaacgaggcccgacgggagcatgctaaggccgtggtcagtctgcgacagattcaaagaagagctgcacaggagaaagaacgctcccaggaacttaggcgcctccaggaggaggctagaaaagaggagggtcagcgcctggcccgcagactgcaggagttggaacgcgacaaaaatctgatgcttgccacactccagcaggaaggtcttctcagtcgatataagcagcagagacttctaacagtcctgcccagccttttagataaaaagaaaagcgtggtgtctagtcctagaccaccagaatgttcagcaagtgctcccgtagctgctgcagttccaactagggagagtatcaagggttcgctatcagtattgctggatgatctgcaggatctgtctgaggccatctcaaaggaggaggccgtgtgtcaaggcgacaaccttgacaggtgttcttctagtaacccacagatgtcatcatag

SEQ ID NO: 41695 - DNA, 2600 bp, Artificial Sequence
  derived and/or modified sequence
aggcgtagggggtgtggccaaagcgcagtagggggctctcgcggttggggaacatagatggctgaagacagaatctagagccttcaaataatgtggagatgtttccaccttcaggttccactgggctgattcccccctcccactttcaagctcggcccctttcaactctgccaagaatggctcccacctggctctcagacattcccctggtccaacccccaggccatcaagatgtctcagagaggcggctagacacccagagacctcaagtgaccatgtgggaacgggatgtttccagtgacaggcaggagccagggcggagaggcaggtcctgggggctggaggggtcacaggccctgagccagcaggctgaggtgatcgttcggcagctgcaagagctgcggcggctggaggaggaggtccggctcctgcgggagacctcgctgcagcagaagatgaggctagaggcccaggccatggagctagaggctctggcacgggcggagaaggccggccgagctgaggctgagggcctgcgtgctgctttggctggggctgaggttgtccggaagaacttggaagaggggaggcagcgggagctggaagaggttcagaggctgcaccaagagcagctgtcctctttgacacaggctcacgaggaggctctttccagtttgaccagcaaggctgagggcttggagaagtctctgagtagtctggaaaccagaagagcaggggaagccaaggagctggccgaggctcagagggaggccgagctgcttcggaagcagctgagcaagacccaggaagacttggaggctcaggtgaccctggttgagaatctaagaaaatatgttggggaacaagtcccttctgaggtccacagccagacatgggaactggagcgacagaagcttctggacaccatgcagcacttgcaggaggaccgggacagcctgcatgccaccgcggagctgctgcaggtgcgggtgcagagcctcacacacatcctcgccctgcaggaggaggagctgaccaggaaggttcaaccttcagattccctggagcctgagtttaccaggaagtgccagtccctgctgaaccgctggcgggagaaggtgtttgccctcatggtgcagctaaaggcccaggagctggaacacagtgactctgttaagcagctgaagggacaggtggcctcactccaggaaaaagtgacatcccagagccaggagcaggccatcctgcagcgatccctgcaggacaaagccgcagaggtggaggtggagcgtatgggtgccaagggcctgcagttggagctgagccgtgctcaggaggccaggcgtcggtggcagcagcagacagcctcagccgaggagcagctgaggcttgtggtcaatgctgtcagcagctctcagatctggctcgagaccaccatggctaaggtggaaggggctgccgcccagcttcccagcctcaacaaccgactcagctatgctgtccgcaaggtccacaccattcggggcctgattgctcgaaagcttgcccttgctcagctgcgccaggagagctgtcccctaccaccaccggtcacagatgtgagccttgagttgcagcagctgcgggaagaacggaaccgcctggatgcagaactgcagctgagtgcccgcctcatccagcaggaggtgggccgggctcgggagcaaggggaggcagagcggcagcagctgagcaaggtggcccagcagctggagcaggagctgcagcagacccaggagtccctggctagcttggggctgcagctggaggtagcacgccagggccagcaggagagcacagaggaggctgccagtctgcggcaggagctgacccagcagcaggaactctacgggcaagccctgcaagaaaaggtggctgaagtggaaactcggctgcgggagcaactctcagacacagagaggaggctgaacgaggctcggagggagcatgccaaggccgtggtctccttgcgccagattcagcgcagagccgcccaggaaaaggagcggagccaggaactcaggcgtctgcaggaggaggcccggaaggaggaggggcagcgactggcccggcgcttgcaggagctagagagggataagaacctcatgctggccaccttgcagcaggaaggtctcctctcccgttacaagcagcagcgactgttgacagttcttccttccctactggataagaagaaatctgtggtgtccagccccaggcctccagagtgttcagcatctgcacctgtagcagcagcagtgcccaccagggagtccataaaagggtccctctctgtcctgctcgatgacctgcaggacctgagtgaagccatttccaaagaggaagctgtttgtcaaggagacaaccttgacagatgctccagctccaatccccagatgagcagctaagcagctgacagttggagggaaagccagcctgggggctgggaggatcctggagaagtgggtggggacagaccagcccttccccatcctggggttgccctgggggataccagctgagtctgaattctgctctaaataaagacgactacagaagga

SEQ ID NO: 41696 - DNA, 470 bp, Artificial Sequence
  derived and/or modified sequence
ggggagtggccaaagcgcagtagggggctctcgcggttggggaacatagatggctgaagacagaatctagagccttcaaataatgtggagatgtttccaccttcaggtcagtgggaccagacaaggggagtggtggttgtctctgcctgggaaactgaccatctttgtttttgtaattcttcaggttccactgggctgattcccccctcccactttcaagctcggcccctttcaactctgccaagaatggctcccacctggctctcagacattcccctggtccaacccccaggccatcaagatgtctcagagaggcggctagacacccagagacctcaagtgaccatgtgggaacgggatgtttccagtgacaggcaggagccagggcggagaggcaggtcctgggggctggaggggtcacaggccctgagccagcaggctgaggtgatcgttcggcagctgcaagagct

SEQ ID NO: 41697 - DNA, 470 bp, Artificial Sequence
  derived and/or modified sequence
ggggtgtggccaaagcgcagtagggggctctcgcggttggggaacatagatggctgaagacagaatctagagccttcaaataatgtggagatgtttccaccttcaggtcagtgggaccagacaaggggagtggtggttgtctctgcctgggaaactgaccatctttgtttttgtaattcttcaggttccactgggctgattcccccctcccactttcaagctcggcccctttcaactctgccaagaatggctcccacctggctctcagacattcccctggtccaacccccaggccatcaagatgtctcagagaggcggctagacacccagagacctcaagtgaccatgtgggaacgggatgtttccagtgacaggcaggagccagggcggagaggcaggtcctgggggctggaggggtcacaggccctgagccagcaggctgaggtgatcgttcggcagctgcaagagct

SEQ ID NO: 41698 - DNA, 740 bp, Artificial Sequence
  derived and/or modified sequence
gccaggtgaagggacagatgaagagatcagaacagccttagagctcacgggctaactgggccttgctgagccatggagagaactctggagatggcgctcaagacccctgcactgtgtacctcctttctcacctctggccaggagcagcagggaccatagaaacttaaggaggagggggaacatagatggctgaagacagaatctagagccttcaaataatgtggagatgtttccaccttcaggtcagtgggaccagacaaggggagtggtggttgtctctgcctgggaaactgaccatctttgtttttgtaattcttcaggttccactgggctgattcccccctcccactttcaagctcggcccctttcaactctgccaagaatggctcccacctggctctcagacattcccctggtccaacccccaggccatcaagatgtctcagagaggcggctagacacccagagacctcaagtgaccatgtgggaacgggatgtttccagtgacaggcaggagccagggcggagaggcaggtcctgggggctggaggggtcacaggccctgagccagcaggctgaggtgatcgttcggcagctgcaagagctgcggtggctggaggaggaggtctggctcctgcgggagacctcgctgcagcagaagatgaggctagaggcccaggccatggagctagaggctctggcacgggcggagaaggccggccgagctgaggctgagggcc

SEQ ID NO: 41699 - DNA, 2958 bp, Artificial Sequence
  derived and/or modified sequence
gtgcccactatgtgttaggactcgagaaagaggaggcgggcagcaggcatggaagctaaggggatagtagagagaagctgagagaacagccgcaggaaagatttgaataagatgtcaggacgctggcttttctgcctggggatctaggcggcctggattcccaaggtcttggggagggtctagccctgcatgtggccacattcagctggggccaggccttgggccagcactttaacagggaaggacccaagagtcatggcctgctggtgtctggatgggcttccctcaggccttgctgagccatggagagaactctggagatggcgctcaagacccctgcactgtgtacctcctttctcacctctggccaggagcagcagggaccatagaaacttaaggaggagggggaacatagatggctgaagacagaatctagagccttcaaataatgtggagatgtttccaccttcaggttccactgggctgattcccccctcccactttcaagctcggcccctttcaactctgccaagaatggctcccacctggctctcagacattcccctggtccaacccccaggccatcaagatgtctcagagaggcggctagacacccagagacctcaagtgaccatgtgggaacgggatgtttccagtgacaggcaggagccagggcggagaggcaggtcctgggggctggaggggtcacaggccctgagccagcaggctgaggtgatcgttcggcagctgcaagagctgcggcggctggaggaggaggtccggctcctgcgggagacctcgctgcagcagaagatgaggctagaggcccaggccatggagctagaggctctggcacgggcggagaaggccggccgagctgaggctgagggcctgcgtgctgctttggctggggctgaggttgtccggaagaacttggaagaggggaggcagcgggagctggaagaggttcagaggctgcaccaagagcagctgtcctctttgacacaggctcacgaggaggctctttccagtttgaccagcaaggctgagggcttggagaagtctctgagtagtctggaaaccagaagagcaggggaagccaaggagctggccgaggctcagagggaggccgagctgcttcggaagcagctgagcaagacccaggaagacttggaggctcaggtgaccctggttgagaatctaagaaaatatgttggggaacaagtcccttctgaggtccacagccagacatgggaactggagcgacagaagcttctggacaccatgcagcacttgcaggaggaccgggacagcctgcatgccaccgcggagctgctgcaggtgcgggtgcagagcctcacacacatcctcgccctgcaggaggaggagctgaccaggaaggttcaaccttcagattccctggagcctgagtttaccaggaagtgccagtccctgctgaaccgctggcgggagaaggtgtttgccctcatggtgcagctaaaggcccaggagctggaacacagtgactctgttaagcagctgaagggacaggtggcctcactccaggaaaaagtgacatcccagagccaggagcaggccatcctgcagcgatccctgcaggacaaagccgcagaggtggaggtggagcgtatgggtgccaagggcctgcagttggagctgagccgtgctcaggaggccaggcgtcggtggcagcagcagacagcctcagccgaggagcagctgaggcttgtggtcaatgctgtcagcagctctcagatctggctcgagaccaccatggctaaggtggaaggggctgccgcccagcttcccagcctcaacaaccgactcagctatgctgtccgcaaggtccacaccattcggggcctgattgctcgaaagcttgcccttgctcagctgcgccaggagagctgtcccctaccaccaccggtcacagatgtgagccttgagttgcagcagctgcgggaagaacggaaccgcctggatgcagaactgcagctgagtgcccgcctcatccagcaggaggtgggccgggctcgggagcaaggggaggcagagcggcagcagctgagcaaggtggcccagcagctggagcaggagctgcagcagacccaggagtccctggctagcttggggctgcagctggaggtagcacgccagggccagcaggagagcacagaggaggctgccagtctgcggcaggagctgacccagcagcaggaactctacgggcaagccctgcaagaaaaggtggctgaagtggaaactcggctgcgggagcaactctcagacacagagaggaggctgaacgaggctcggagggagcatgccaaggccgtggtctccttgcgccagattcagcgcagagccgcccaggaaaaggagcggagccaggaactcaggcgtctgcaggaggaggcccggaaggaggaggggcagcgactggcccggcgcttgcaggagctagagagggataagaacctcatgctggccaccttgcagcaggaaggtctcctctcccgttacaagcagcagcgactgttgacagttcttccttccctactggataagaagaaatctgtggtgtccagccccaggcctccagagtgttcagcatctgcacctgtagcagcagcagtgcccaccagggagtccataaaagggtccctctctgtcctgctcgatgacctgcaggacctgagtgaagccatttccaaagaggaagctgtttgtcaaggagacaaccttgacagatgctccagctccaatccccagatgagcagctaagcagctgacagttggagggaaagccagcctgggggctgggaggatcctggagaagtgggtggggacagaccagcccttccccatcctggggttgccctgggggataccagctgagtctgaattctgctctaaataaagacgactacagaagga

SEQ ID NO: 41700 - DNA, 740 bp, Artificial Sequence
  derived and/or modified sequence
gccaggtgaagggacagatgaagagatcagaacagccttagagctcacgggctaactgggccttgctgagccatggagagaactctggagatggcgctcaagacccctgcactgtgtacctcctttctcacctctggccaggagcagcagggaccatagaaacttaaggaggagggggaacatagatggctgaagacagaatctagagccttcaaataatgtggagatgtttccaccttcaggtcagtgggaccagacaaggggagtggtggttgtctctgcctgggaaactgaccatctttgtttttgtaattcttcaggttccactgggctgattcccccctcccactttcaagctcggcccctttcaactctgccaagaatggctcccacctggctctcagacattcccctggtccaacccccaggccatcaagatgtctcagagaggcggctagacacccagagacctcaagtgaccatgtgggaacgggatgtttccagtgacaggcaggagccagggcggagaggcaggtcctgggggctggaggggtcacaggccctgagccagcaggctgaggtgatcgttcggcagctgcaagagctgcggcggctggaggaggaggtccggctcctgcgggagacctcgctgcagcagaagatgaggctagaggcccaggccatggagctagaggctctggcacgggcggagaaggccggccgagctgaggctgagggcc

SEQ ID NO: 41701 - DNA, 646 bp, Artificial Sequence
  derived and/or modified sequence
agtagggggctctcgcggttggccttgctgagccatggagagaactctggagatggcgctcaagacccctgcactgtgtacctcctttctcacctctggccaggagcagcagggaccatagaaacttaaggaggagggggaacatagatggctgaagacagaatctagagccttcaaataatgtggagatgtttccaccttcaggttccactgggctgattcccccctcccactttcaagctcggcccctttcaactctgccaagaatggctcccacctggctctcagacattcccctggtccaacccccaggccatcaagatgtctcagagaggcggctagacacccagagacctcaagtgaccatgtgggaacgggatgtttccagtgacaggcaggagccagggcggagaggcaggtcctgggggctggaggggtcacaggccctgagccagcaggctgaggtgatcgttcggcagctgcaagagctgcggcggctggaggaggaggtccggctcctgcgggagacctcgctgcagcagaagatgaggctagaggcccaggccatggagctagaggctctggcacgggcggagaaggccggccgagctgaggctgagggcctgcgtgctgctttggctggggc

SEQ ID NO: 41702 - DNA, 646 bp, Artificial Sequence
  derived and/or modified sequence
agtagggggctctcgcggttggccttgctgagccatggagagaactctggagatggcgctcaagacccctgcactgtgtacctcctttctcacctctggccaggagcagcagggaccatagaaacttaaggaggagggggaacatagatggctggagacagaatctagagccttcaaataatgtggagatgtttccaccttcaggttccactgggctgattcccccctcccactttcaagctcggcccctttcaactctgccaagaatggctcccacctggctctcagacattcccctggtccaacccccaggccatcaagatgtctcagagaggcggctagacacccagagacctcaagtgaccatgtgggaacgggatgtttccagtgacaggcaggagccagggcggagaggcaggtcctgggggctggaggggtcacaggccctgagccagcaggctgaggtgatcgttcggcagctgcaagagctgcggcggctggaggaggaggtccggctcctgcgggagacctcgctgcagcagaagatgaggctagaggcccaggccatggagctagaggctctggcacgggcggagaaggccggccgagctgaggctgagggcctgcgtgctgctttggctggggc

SEQ ID NO: 41703 - DNA, 470 bp, Artificial Sequence
  derived and/or modified sequence
ggggtgtggccaaagcgcagtagggggctctcgcggttggggaacatagatggctggagacagaatctagagccttcaaataatgtggagatgtttccaccttcaggtcagtgggaccagacaaggggagtggtggttgtctctgcctgggaaactgaccatctttgtttttgtaattcttcaggttccactgggctgattcccccctcccactttcaagctcggcccctttcaactctgccaagaatggctcccacctggctctcagacattcccctggtccaacccccaggccatcaagatgtctcagagaggcggctagacacccagagacctcaagtgaccatgtgggaacgggatgtttccagtgacaggcaggagccagggcggagaggcaggtcctgggggctggaggggtcacaggccctgagccagcaggctgaggtgatcgttcggcagctgcaagagct

SEQ ID NO: 41704 - DNA, 646 bp, Artificial Sequence
  derived and/or modified sequence
agtagggggctctcgcggttggccttgctgagccatggagagaactctggagatggcgctcaagacccctgcactgtgtacctcctttctcacctctggccaggagcagcagggaccatagaaacttaaggaggagggggaacatagatggctgaagacagaatctagagccttcaaataatgtggagatgtttccaccttcaggttccactgggctgattcccccctcccactttcaagctcggcccctttcaactctgccaagaatggctcccacctggctctcagacattcccctggtccaacccccaggccatcaagatgtctcagagaggcggctagacacccagagacctcaagtgaccatgtgggaacgggatgtttccagtgacaggcaggagccagggcggagaggcaggtcctgggggctggaggggtcacaggccctgagccagcaggctgaggtgatcgttcggcagctgcaagagctgcggtggctggaggaggaggtctggctcctgcgggagacctcgctgcagcagaagatgaggctagaggcccaggccatggagctagaggctctggcacgggcggagaaggccggccgagctgaggctgagggcctgcgtgctgctttggctggggc

SEQ ID NO: 41705 - DNA, 700 bp, Artificial Sequence
  derived and/or modified sequence
agggggtacaggggccaggtgaagggacagatgaagagatcagaacagccttagagctcacgggctaactgggtgaagcctcgggggaacatagatggctgaagacagaatctagagccttcaaataatgtggagatgtttccaccttcaggttccactgggctgattcccccctcccactttcaagctcggcccctttcaactctgccaagaatggctcccacctggctctcagacattcccctggtccaacccccaggccatcaagatgtctcagagaggcggctagacacccagagacctcaagtgaccatgtgggaacgggatgtttccagtgacaggcaggagccagggcggagaggcaggtcctgggggctggaggggtcacaggccctgagccagcaggctgaggtgatcgttcggcagctgcaagagctgcggcggctggaggaggaggtccggctcctgcgggagacctcgctgcagcagaagatgaggctagaggcccaggccatggagctagaggctctggcacgggcggagaaggccggccgagctgaggctgagggcctgcgtgctgctttggctggggctgaggttgtccggaagaacttggaagaggggaggcagcgggagctggaagaggttcagaggctgcaccaagagcagctgtcctctttgacacaggctcacgaggagg

SEQ ID NO: 41706 - DNA, 700 bp, Artificial Sequence
  derived and/or modified sequence
agggggtacaggggccaggtgaagggacagatgaagcgatcagaacagccttagagctcacgggctaactgggtgaagcctcgggggaacatagatggctggagacagaatctagagccttcaaataatgtggagatgtttccaccttcaggttccactgggctgattcccccctcccactttcaagctcggcccctttcaactctgccaagaatggctcccacctggctctcagacattcccctggtccaacccccaggccatcaagatgtctcagagaggcggctagacacccagagacctcaagtgaccatgtgggaacgggatgtttccagtgacaggcaggagccagggcggagaggcaggtcctgggggctggaggggtcacaggccctgagccagcaggctgaggtgatcgttcggcagctgcaagagctgcggcggctggaggaggaggtccggctcctgcgggagacctcgctgcagcagaagatgaggctagaggcccaggccatggagctagaggctctggcacgggcggagaaggccggccgagctgaggctgagggcctgcgtgctgctttggctggggctgaggttgtccggaagaatttggaagaggggagccagcgggagctggaagaggttcagaggctgcaccaagagcagctgtcctctttgacacaggctcacgaggagg

SEQ ID NO: 41707 - DNA, 699 bp, Artificial Sequence
  derived and/or modified sequence
gggggtacaggggccaggtgaagggacagatgaagagatcagaacagccttagagctcacgggctaactgggtgaagcctcgggggaacatagatggctggagacagaatctagagccttcaaataatgtggagatgtttccaccttcaggttccactgggctgattcccccctcccactttcaagctcggcccctttcaactctgccaagaatggctcccacctggctctcagacattcccctggtccaacccccaggccatcaagatgtctcagagaggcggctagacacccagagacctcaagtgaccatgtgggaacgggatgtttccagtgacaggcaggagccagggcggagaggcaggtcctgggggctggaggggtcacaggccctgagccagcaggctgaggtgatcgttcggcagctgcaagagctgcggcggctggaggaggaggtccggctcctgcgggagacctcgctgcagcagaagatgaggctagaggcccaggccatggagctagaggctctggcacgggcggagaaggccggccgagctgaggctgagggcctgcgtgctgctttggctggggctgaggttgtccggaagaacttggaagaggggagccagcgggagctggaagaggttcagaggctgcaccaagagcagctgtcctctttgacacaggctcacgaggagg

SEQ ID NO: 41708 - DNA, 676 bp, Artificial Sequence
  derived and/or modified sequence
agcgaggcgtagggggtgtggccaaagcgcagtagggggctctcgcggttggccttgctgagccatggagagaactctggagatggcgctcaagacccctgcactgtgtacctcctttctcacctctggccaggagcagcagggaccatagaaacttaaggaggagggggaacatagatggctggagacagaatctagagccttcaaataatgtggagatgtttccaccttcaggttccactgggctgattcccccctcccactttcaagctcggcccctttcaactctgccaagaatggctcccacctggctctcagacattcccctggtccaacccccaggccatcaagatgtctcagagaggcggctagacacccagagacctcaagtgaccatgtgggaacgggatgtttccagtgacaggcaggagccagggcggagaggcaggtcctgggggctggaggggtcacaggccctgagccagcaggctgaggtgatcgttcggcagctgcaagagctgcggcggctggaggaggaggtccggctcctgcgggagacctcgctgcagcagaagatgaggctagaggcccaggccatggagctagaggctctggcacgggcggagaaggccggccgagctgaggctgagggcctgcgtgctgctttggctggggc

SEQ ID NO: 41709 - DNA, 662 bp, Artificial Sequence
  derived and/or modified sequence
gggggcgggaaggggctgagcgggggtcctgggagggttcaaggggtccaaaggggaagggggtacaggggccaggtgaagggacagatgaagagatcagaacagccttagagctcacgggctaactgggtgaagcctcgggtatctaggggagcagtggtgggagagtagagccggctagcgtacagggggcgagggcaggctattgagagatgggggtgagggtcaggaccagaataattccttcagaaaaaggggaacatagatggctggagacagaatctagagccttcaaataatgtggagatgtttccaccttcaggttccactgggctgattcccccctcccactttcaagctcggcccctttcaactctgccaagaatggctcccacctggctctcagacattcccctggtccaacccccaggccatcaagatgtctcagagaggcggctagacacccagagacctcaagtgaccatgtgggaacgggatgtttccagtgacaggcaggagccagggcggagaggcaggtcctgggggctggaggggtcacaggccctgagccagcaggctgaggtgatcgttcggcagctgcaagagctgcggcggctggaggaggaggtccggctcctgcgggagacctcgctgcagcagaa

SEQ ID NO: 41710 - DNA, 2616 bp, Artificial Sequence
  derived and/or modified sequence
atgtggccccacagcgctggggcccggccctgggccagcaccctgaccgggaaggacccccgggtgatggcctgctggtgcctggatggcctgcccagcggcctggccgagccctggagggagctgtggcgctggaggagccggcccctgcactgtgtgccccccttcagccccctggcccggagcagccgggaccacaggaacctgcggcggcggggcaacattgatggctggaggcagaacctggagcccagcaacaacgtggagatgttcccccccagcggcagcacaggcctcatcccccccagccacttccaggcccggcccctgagcaccctgcccaggatggcccccacctggctgagtgacatccccctggtgcagcccccaggccaccaggatgtgtctgagcggcggctggacacccagaggccccaggtgaccatgtgggagagagatgtgtccagtgaccggcaggagcctggaagaagaggccgctcctggggcctggagggcagccaggccctgagccagcaggccgaggtgattgtgcggcagctgcaggagctgcggcggctggaggaggaggtgcggctgctgcgggagaccagcctgcagcagaagatgaggctggaggcccaggccatggagctggaggccctggcccgggcagagaaggccggccgggcagaggccgagggcctgcgggccgccctggccggggctgaggtggtgaggaagaacctggaggagggcagccagcgggagctggaggaggtgcagaggctgcaccaggagcagctgagcagcctgacccaggcccacgaggaggccctgagcagcctgaccagcaaggccgagggcctggagaagagcctgagcagcctggagaccaggagagctggggaggccaaggagctggccgaggcccagcgggaggccgagctgctgaggaagcagctgagcaagacccaggaggacctggaggcccaggtgaccctggtggagaacctgaggaaatatgtgggggagcaggtgcccagcgaggtgcacagccagacctgggagctggagcggcagaagctgctggagaccatgcagcacctgcaggaggaccgggacagcctgcacgccacagctgagctgctgcaggtgcgggtgcagagcctgacccacatcctggccctgcaggaggaggagctgaccaggaaggtgcagcccagcgacagcctggagcctgagttcaccaggaagtgccagagcctgctgaaccgctggagggagaaggtgtttgccctgatggtgcagctgaaggcccaggagctggagcacagcgacagcgtgaagcagctgaagggccaggtggccagcctgcaggagaaggtgaccagccagagccaggagcaggccatcctgcagaggagcctgcaggacaaggctgctgaggtggaggtggagaggatgggcgccaagggcctgcagctggagctgagccgggcccaggaggcccggcggcgctggcagcagcagacagccagcgctgaggagcagctgcggctggtggtgaatgctgtgagcagcagccagatctggctggagaccaccatggccaaggtggagggcgctgctgcccagctgcccagcctgaacaaccggctgtcctatgctgtgaggaaggtgcacaccatccggggcctgattgccaggaagctggccctggcccagctgcggcaggagagctgccccctgcccccacctgtgacagatgtgtccctggagctgcagcagctgcgggaggagaggaaccggctggatgctgagctgcagctgagcgcccggctcatccagcaggaggtgggccgggcccgggagcagggcgaggccgagcggcagcagctgagcaaggtggcccagcagctggagcaggagctgcagcagacccaggagagcctggccagcctgggcctgcagctggaggtggcccggcagggccagcaggagagcacagaggaggccgccagcctgcggcaggagctgacccagcagcaggagctgtatggccaggccctgcaggagaaggtggccgaggtggagacccggctgcgggagcagctgagtgacacagagcggcggctgaatgaggcccggcgggagcacgccaaggctgtggtgtccctgcggcagatccagaggagagctgcccaggagaaggagaggagccaggagctgcggcggctgcaggaggaggccaggaaggaggagggccagaggctggcccggcggctgcaggagctggagcgggacaagaacctgatgctggccaccctgcagcaggagggcctgctgagccgctacaagcagcagaggctgctgactgtgctgcccagcctgctggacaagaagaagtctgtggtgagcagcccccggcccccagagtgcagcgccagcgcccctgtggccgctgctgtgcccacccgggagagcatcaagggcagcctgtctgtgctgctggatgacctgcaggacctgtctgaggccatcagcaaggaggaggccgtgtgccagggcgacaacctggaccgctgcagcagcagcaacccccagatgagcagctag

SEQ ID NO: 41711 - DNA, 2616 bp, Artificial Sequence
  derived and/or modified sequence
atgtggccccacagcgccggcgcccggccctgggccagcaccctgacagggaaagacccccgtgtgatggcttgctggtgtctggatggcctcccgagtgggcttgccgaaccctggagagagctctggagatggaggtctcggcccttacattgcgtgccgccattcagtcctctcgcaagaagctccagagaccaccggaatttgaggcgacgggggaatatcgatggttggcgacagaatctcgaaccttctaacaacgtcgagatgtttcctccaagcgggtcgaccggactgatccctcccagtcacttccaggcacgccctctctcaacactgccacggatggcccccacctggctcagcgatattccactggtgcaacctcccgggcaccaagacgtgagtgagcgccggcttgacacacagagaccacaagtgaccatgtgggagcgggacgtgtcttccgatcggcaggagccagggcggcgcggccgctcatggggtttggagggatcacaggcgctcagtcagcaggccgaggtgattgtcaggcagttgcaagagctccgacggctagaggaggaggtgaggctgctcagggagacctccctccagcagaaaatgaggctcgaggctcaggccatggaattagaagctctcgcccgggctgagaaagcagggcgagctgaagccgaagggctccgcgctgccctcgccggcgcagaggtcgttaggaagaatttggaagagggttcccagcgggagctcgaggaagtccagcgtctgcatcaggaacaattgtccagcctcacccaggcgcacgaagaggctctgagttcactcactagcaaggctgagggcctcgagaagagcctaagtagcctcgagactcgccgagcaggggaggctaaggagctggctgaggctcaaagagaggccgagttattgaggaagcagttgtccaagacgcaagaggacctcgaggctcaggtgacattggttgagaaccttcgtaaatacgtgggggagcaggtgcccagtgaagtccacagtcaaacctgggagctggaaagacagaagcttctcgaaactatgcagcacctgcaagaggatcgcgattccctccacgctaccgccgagctgcttcaagtacgcgtgcaatccctgacacatattctagccctccaggaggaagagctcacccggaaagtgcagccttcagattccctggagcctgagtttacaaggaagtgccagagcctgctcaatagatggagggagaaagttttcgccctgatggtacagttgaaagcccaggaactcgagcactccgactcagttaagcagctcaagggacaagtagcatcgctccaggaaaaggtcacatcgcagtctcaggagcaagccatcctacagagatctcttcaggacaaggccgcggaggttgaagtagagcgcatgggagccaagggtcttcagcttgagctgagcagagcacaggaggctcgaagaaggtggcagcaacagactgccagcgccgaggagcagttgcggctggtcgtaaacgccgtgtcatcttcccagatctggctggagaccacaatggccaaagtagaaggcgccgcagctcagcttccatctctgaacaatcgtctgtcctatgcggtgaggaaagtgcacaccatcaggggtctgatcgcacgcaaactggccctggcccaactccggcaggaatcttgcccgctacctccccccgtcacagacgtgtctctagagttacagcaactgagggaagagcgcaacaggctggatgcggagttgcagctgagcgcccgcctgattcagcaggaggtcgggagggctcgggaacagggggaggcagagcgacagcagctcagtaaggttgctcagcagctggaacaggaactacagcaaacccaggagagtctggctagcctgggcctgcagctggaagtagcccgtcagggacaacaagagagcactgaggaggccgcctccctgagacaggagcttacccagcaacaggaattatatgggcaggctctacaggaaaaggtcgcagaggttgagactagactgagagagcagttatctgacaccgaaaggaggcttaatgaggctcgacgggagcatgccaaggctgtggtgagcctgaggcagattcagaggcgggcagcgcaggaaaaagagagatctcaagagctgcgacgtctgcaggaagaggcacggaaggaggaaggacagaggctggcccgacggctacaagaattagagagagacaaaaatctcatgctggcaacattacagcaagagggacttttgagccgctataagcaacagaggcttctgacagtgctgccctctttactcgataagaagaagagcgtggtttcttcccccagacctccagaatgctccgccagcgctccggtggcagccgccgtcccgacacgtgaatcaattaaggggtctctttccgtccttcttgacgacctccaggatctgtctgaggcaatatccaaggaggaggctgtctgccaaggtgataacctcgacagatgctcttcctccaatccccaaatgtcaagctag

SEQ ID NO: 41712 - DNA, 2616 bp, Artificial Sequence
  derived and/or modified sequence
atgtggccccacagcgccggcgcccggccctgggccagcaccctgactggaaaggatcccagagtgatggcttgttggtgcctggatggactgcctagtgggctggctgaaccatggcgggaactgtggcgctggcgttctaggcctttgcactgcgtgccacccttttctcctctcgctcgcagctctcgagaccaccggaatttaaggcggagaggcaacattgacggctggcggcagaatctagaaccatccaataatgtggagatgtttccaccaagcggttctactggtttaattcctccatcccattttcaggcccgtccactgtccaccctccccagaatggcgcccacctggctcagcgatataccactcgttcagcccccaggacaccaggacgtcagcgagcgacggctggatacacagcgaccgcaagtcacaatgtgggagcgtgatgtgagcagtgaccgacaagagcccgggcggagagggcggtcttggggcctggaaggatcgcaagcactcagccaacaagccgaggtaatcgtcagacagctgcaggagcttcgtcgcctggaagaagaggtgcgactcttaagagagacgagccttcagcaaaagatgcgccttgaggcgcaggctatggaactcgaggcactggcccgtgcagaaaaagcgggtcgcgccgaggctgagggtctgagagcagccttagcaggagcggaagtggtacgaaaaaacctggaggaaggaagccaaagggagctagaggaggtgcagcgactgcaccaggagcaactctcaagcctaacccaggcccacgaggaagcgctaagcagcttaacctccaaggctgaaggactggagaagtcgctgtcctcgctggagactaggcgtgcgggagaggccaaggaactggctgaggcccagagagaagctgagctgttacgcaagcagctctcaaaaacacaggaggatcttgaggcgcaagtgacactggtggaaaacctccggaaatacgtgggcgaacaggtcccatcagaggtccactctcaaacatgggagctggagcggcagaagttgctagagacgatgcagcatctccaagaagacagggattcgctccacgccactgccgaactattacaagtacgtgtacagagtctaacacatatcctcgccttacaggaggaagagctgacgagaaaagtgcaaccaagtgatagcctggaaccagagtttacacgaaagtgtcaatccttactcaatagatggagagagaaggtttttgcgctgatggtgcagcttaaggcacaggaactcgagcacagtgacagcgtgaagcagctcaagggccaggtcgcttcattgcaggagaaggtgacgagtcagtcacaagaacaggctattctgcagcggagcctccaggacaaagcagccgaagttgaggttgagcgtatgggggctaagggtctccagctggagctgtcaagggcccaggaagcccgacgacgatggcagcagcagaccgcatccgccgaagaacagctcaggttggtcgtgaatgccgtctccagttcccagatttggctcgaaacaacaatggctaaggtggaaggcgccgcagcccaattgccaagcctgaacaatcggctgagctacgcggtcagaaaagtgcacaccatacgcggcctgatcgcaagaaaactcgcccttgcccaactccgccaggaaagctgccctctgccccctccagtgactgacgtgtccctcgaattgcagcaactgcgggaagagaggaaccggctcgatgcagaacttcagctatctgcccgactgattcagcaggaggtgggtagggccagggagcaaggcgaggccgagaggcagcagctaagcaaggtggcacaacagctcgagcaggagcttcagcagacacaggaatctctagcgagcctcggattgcagctcgaagtagctagacagggccaacaggagagcacagaggaggcagcctcccttcggcaggagttgacgcaacagcaggaactttatggccaggcccttcaggaaaaggtagctgaggtcgagaccagacttcgggaacaactgtccgatacggagcgcaggctcaatgaagcgagaagggaacacgcaaaagccgttgtgtccttaaggcagatacaaaggagggcggcacaggagaaagagcggtcccaagagctcaggcgcctccaggaggaagcacgcaaggaagaaggccagagactagctaggaggttgcaggagctggaacgggacaaaaacctcatgttggctacactacagcaggagggactcctgtctaggtataaacaacaacggttgctaacggtacttccaagtcttctggacaagaagaaatccgttgtcagcagtccacgaccgcccgaatgtagcgcatctgctcccgtcgccgccgccgtcccgactagggaaagcatcaaagggtccttaagtgtcctactagacgatttacaagacctgagcgaggccattagtaaggaagaagcggtctgtcaaggggacaacttggacagatgtagttcaagtaacccacaaatgtcttcctag

SEQ ID NO: 41713 - DNA, 2616 bp, Artificial Sequence
  derived and/or modified sequence
atgtggccccattcggccggagctcgcccttgggcttccaccctcacaggtaaggaccctagagtcatggcctgctggtgcctggacggccttccaagtggcttagctgagccctggcgagagctatggcggtggcgcagccgccctctacactgcgtcccaccattctcacctttggctaggagttctagggatcacagaaatctcagacgtagaggaaatatcgatgggtggaggcagaacctcgagccttccaataacgtcgagatgtttccacccagcggctcgaccgggctcatcccacccagtcatttccaggcgcgacccctgtccaccttacccagaatggctcctacctggctgtctgacattcccctcgtccagcccccaggccatcaagacgtcagcgagagacgactggacacccaacggccacaagtgacgatgtgggaaagagacgttagttctgatcggcaggagcctgggcgtcgaggacgctcttggggacttgaaggttcccaggctttatcacaacaggcagaagtcatagttagacagttgcaggagttaaggcgcctggaggaggaagtacgattgctgcgggaaacctcccttcagcaaaaaatgaggctggaggcacaggccatggagctcgaagctctggccagggcagagaaggcgggacgcgcagaagcagaagggcttcgagccgctctggctggagctgaggtcgtaaggaagaatttggaagaaggtagtcaacgggagttggaagaagtgcagaggctgcaccaggagcagctttcaagtctgacccaggcccacgaggaggccctgtcctccctcacatccaaagccgaagggctggagaaatcactgtctagccttgaaacccggagagccggtgaagctaaggaactcgccgaagcccaaagagaagccgaactccttaggaaacagttaagtaagacacaggaggacctggaggcacaggtgacgctcgtcgaaaacttgcgcaagtatgtgggcgaacaggttccatccgaggtgcacagtcagacatgggaattggaacggcaaaagctgcttgaaaccatgcagcatctgcaggaggatcgggattcactgcacgccacagccgagctactacaggttcgagttcagagcttgactcacatactggcattgcaggaagaggagcttactcggaaagtccaaccctccgacagtttggaaccagaattcaccagaaagtgccagtccttactgaaccggtggcgtgaaaaagttttcgcactgatggtgcagctgaaagcccaagaactggagcacagtgattcagtgaagcagttgaaggggcaggtggcttctcttcaggagaaggttaccagccagagtcaagaacaagcaatattgcagcggagcctgcaggataaggctgctgaggtcgaggttgagcggatgggcgcaaagggcctccaactggaactttccagagctcaggaagccaggcggagatggcaacagcagacggcttctgccgaggagcagctgcggttagtggttaacgctgttagctcctcccagatctggctcgagaccacaatggctaaagtggagggtgccgcagcacagctcccgagtctcaacaaccggctgtcctatgcagtccgcaaggtgcatacaattagagggctcatcgctcggaagctggccttagcccagctgcggcaggagtcatgtcccttgccaccaccggtaacggacgtgagcttagagctgcagcaactaagggaggagcgaaatcgactggacgcagagctgcaactttctgcaaggctcatccagcaggaagtcggcagggcacgggagcagggagaagctgagcggcagcaactgtctaaagtggctcagcagctagaacaggagcttcagcagacacaagaatctttggcaagtctcggattgcagcttgaggtagctagacagggccagcaggaatcaacagaggaagcagcctcactcagacaggagctgactcagcaacaggaattatatgggcaggcactccaagagaaggtggccgaggtggaaaccaggcttagagaacagttgtcagacaccgaaaggagattgaatgaggcaagacgcgagcacgctaaggctgtggttagcctccgccagattcagaggcgggctgcacaggagaaggagagaagtcaggagttacgacgccttcaggaggaggctcggaaagaagaaggccagcggctggccaggagactgcaggagttagagcgtgacaaaaacctgatgttagccaccttacagcaggagggtctccttagtcgatataagcagcagaggcttctgacagtgctgccctcgttattagacaaaaaaaaatcagtcgtctctagccctcgccctcccgaatgcagtgcaagtgcccctgtcgctgcagccgtgcctactcgggaaagtatcaagggtagtctgagcgtgctgctggatgatctccaagatttgtcagaagctatatcaaaggaggaagccgtctgccagggggacaatttggatagatgctcttcttctaatccgcagatgtcttcttag

SEQ ID NO: 41714 - DNA, 2616 bp, Artificial Sequence
  derived and/or modified sequence
atgtggccccatagcgccggagccagaccttgggcttccactttaacagggaaggatcctcgcgtgatggcctgctggtgccttgacgggctgccttctggtctggctgaaccctggcgagagctttggcgttggagaagtcgaccactgcattgcgtgccaccattttcacctctcgcgcgatccagcagggaccataggaatctccgacgaagaggaaatattgacgggtggagacagaacttggagccatcgaacaacgtcgaaatgtttccccctagcggctcgactggcttgattcccccatcccacttccaggctaggccactcagcaccttacctcggatggccccaacctggctgtccgacatccccctggtccaaccaccaggccaccaagatgtttcagagcggcgactagacacacagcggccacaagttactatgtgggagagggacgtcagctctgatagacaggagcctggccgaagaggtcgtagttggggcttagagggctctcaggctctgagccagcaagcagaggtgatagttcggcagctccaggagttacgtaggttggaagaggaagtgcgactgctacgagagacatcactccagcagaagatgcggctcgaggctcaggctatggagctggaggcattggctagggcggagaaggctgggagagcagaagctgaaggtttaagggccgcattagcaggtgccgaagtggtacgtaaaaacctggaagaaggttcacagcgggagcttgaggaggtgcagagactgcatcaagaacaactttcaagcctgacccaggcccatgaggaggctctctcctcattgacatctaaagcggaagggctggagaagtcactctcctctctcgaaacgagacgcgctggtgaagccaaggaactggcagaggcccagagagaagctgaactgctgcgaaaacagctgagcaaaactcaggaagatctggaggcccaggtcaccctggtagaaaatcttcgtaaatatgttggtgagcaggtgcccagtgaagttcactcgcagacctgggagctcgagcggcaaaagctgctcgagacaatgcagcatctgcaagaggaccgggattctttacacgcaaccgcagaactcctgcaggttagagtgcagagtctcacccacatcttggcgctccaggaggaagaattgaccagaaaagtgcaaccctctgactctctggagccagagttcactcgcaaatgccaatcgctactgaataggtggcgagagaaggtgttcgcgctcatggtacagttgaaggcgcaagaactggaacacagcgacagcgtaaagcagctgaagggtcaagtagcctccttgcaggagaaggtgaccagtcaatcccaggaacaggctatcctgcaaagaagcttacaggataaagccgctgaggtggaggtggagcggatgggggctaaaggactccaactagagctgtccagagcacaggaggccaggaggagatggcaacagcaaactgcttccgccgaggagcagctgcggctcgtggtcaatgctgtcagttcaagccagatatggttagagaccaccatggcaaaggtagagggtgcggctgctcagcttcccagcttaaataatcgcctttcttacgctgtccggaaagtgcacactatcaggggccttatcgccagaaagctagcactggctcagctccgacaggagtcgtgcccgctccctccacccgtgactgacgtatcattggaactgcagcaactgcgtgaggagaggaacaggctggatgctgagctccagcttagtgccagattaatccagcaggaggtgggcagggcgagggagcagggtgaggctgagcgccaacagctgtctaaagtggcccagcagctggagcaggaactacagcagactcaggaatctctagccagcctgggcctgcagctagaagtggccagacaggggcagcaggagagtacagaggaggccgcttcacttaggcaggagttgacacagcaacaggagctgtacggccaagccctccaggagaaggttgcagaggtggagaccagattgcgggagcagctgtcagatacggaacgacggctgaatgaggcccgacgggagcatgccaaggccgttgtttctctgaggcagatccagcgtcgcgctgcccaggagaaagaaaggtctcaggagcttcgcaggctgcaggaagaagcccgaaaggaagaggggcagaggctggcccgacgcctgcaggagctggaaagggacaagaacctcatgcttgctaccttacagcaggagggcctgctctcccgatacaaacaacagagattgctgacggtccttccttccttgctggacaagaagaagtccgtggtcagtagtccacgaccccctgaatgctccgcctctgccccagtggcagccgctgtacctacgagagagagcatcaaaggatccctgtctgtactgctggacgacctgcaggacctgagcgaggctatatcaaaagaggaggcagtctgtcaaggagataatctggacagatgcagcagtagcaacccacaaatgagcagttag

SEQ ID NO: 41715 - protein, 457 aa, Artificial Sequence
  derived and/or modified sequence
MEQKEGKLSEDGTTVSPAADNPEMSGGGAPAEETKGTAGKAINEGPPTESGKQEKAPAEDGMSAELQGEANGLDEVKVESQREAGGKEDAEAELKKEDGEKEETTVGSQEMTGRKEETKSEPKEAEEKESTLASEKQKAEEKEAKPESGQKADANDRDKPEPKATVEEEDAKTASQEETVVEDEAKAEPKEPDGKEEAKHGAKEEADEPGSPSEEQEQDVEKEPEGGAGVIPSSPEEWPESPTGEGHNLSTDGLGPDCVASGQTSPSASESSPSDVPQSPPESPSSGEKKEKAPERRVSAPARPRGPRAQNRKAIVDKFGGAASGPTALFRNTKAAGAAIGGVKNMLLEWCRAMTKKYEHVDIQNFSSSWSSGMAFCALIHKFFPDAFDYAELDPAKRRHNFTLAFSTAEKLADCAQLLDVDDMVRLAVPDSKCVYTYIQELYRSLVQKGLVKTKKK

SEQ ID NO: 41716 - protein, 512 aa, Artificial Sequence
  derived and/or modified sequence
MLPGAVGESDCSAEAREKMEQKEGKLSEDGTTVSPAADNPEMSGGGAPAEETKGTAGKAINEGPPTESGKQEKAPAEDGMSAELQGEANGLDEVKVESQREAGGKEDAEAELKKEDGEKEETTVGSQEMTGRKEETKSEPKEAEEKESTLASEKQKAEEKEAKPESGQKADANDRDKPEPKATVEEEDAKTASQEETGQRKECSTEPKEKATDEEAKAESQKAVVEDEAKAEPKEPDGKEEAKHGAKEEADAKEEAEDAEEAEPGSPSEEQEQDVEKEPEGGAGVIPSSPEEWPESPTGEGHNLSTDGLGPDCVASGQTSPSASESSPSDVPQSPPESPSSGEKKEKAPERRVSAPARPRGPRAQNRKAIVDKFGGAASGPTALFRNTKAAGAAIGGVKNMLLEWCRAMTKKYEHVDIQNFSSSWSSGMAFCALIHKFFPDAFDYAELDPAKRRHNFTLAFSTAEKLADCAQLLDVDDMVRLAVPDSKCVYTYIQELYRSLVQKGLVKTKKK

SEQ ID NO: 41717 - protein, 494 aa, Artificial Sequence
  derived and/or modified sequence
MEQKEGKLSEDGTTVSPAADNPEMSGGGAPAEETKGTAGKAINEGPPTESGKQEKAPAEDGMSAELQGEANGLDEVKVESQREAGGKEDAEAELKKEDGEKEETTVGSQEMTGRKEETKSEPKEAEEKESTLASEKQKAEEKEAKPESGQKADANDRDKPEPKATVEEEDAKTASQEETGQRKECSTEPKEKATDEEAKAESQKAVVEDEAKAEPKEPDGKEEAKHGAKEEADAKEEAEDAEEAEPGSPSEEQEQDVEKEPEGGAGVIPSSPEEWPESPTGEGHNLSTDGLGPDCVASGQTSPSASESSPSDVPQSPPESPSSGEKKEKAPERRVSAPARPRGPRAQNRKAIVDKFGGAASGPTALFRNTKAAGAAIGGVKNMLLEWCRAMTKKYEHVDIQNFSSSWSSGMAFCALIHKFFPDAFDYAELDPAKRRHNFTLAFSTAEKLADCAQLLDVDDMVRLAVPDSKCVYTYIQELYRSLVQKGLVKTKKK

SEQ ID NO: 41718 - DNA, 1374 bp, Artificial Sequence
  derived and/or modified sequence
atggaacagaaagaggggaaactgagcgaggatggtaccacagtgtcccccgccgccgataatcccgagatgtccggcggtggagcgccggccgaggagacaaagggcacagctggaaaagctataaacgaggggccgcccaccgaatccgggaagcaagagaaggcccccgctgaagacggtatgtccgccgaactgcagggcgaagccaacggactagatgaggtcaaagttgaatctcagcgggaggctggggggaaggaagatgccgaggccgagctgaaaaaggaggatggcgagaaagaggaaacaaccgtggggtctcaagagatgacagggaggaaagaggagactaagtccgaacccaaggaggccgaggagaaggaatcaacactcgcaagcgagaagcaaaaagcggaggaaaaggaagccaaacctgagtccgggcagaaggcggatgcaaacgaccgggataagccagaaccaaaggcgactgtcgaggaggaggatgcaaagactgcaagccaagaggaaaccgtcgtggaggatgaggctaaggctgagcccaaggagcctgatgggaaggaagaagcgaagcatggcgccaaggaagaagctgacgagcccggctcgccctcagaagagcaggagcaggatgtggagaaggagccagagggaggagctggagtaatcccatcatccccggaggaatggcccgagtctcccactggagaggggcacaacctgtcgacggacggactggggccagattgtgtggcctccggacagacctccccctccgcctcggaaagctctccctccgacgttccacagtccccccctgagtccccgtcctccggagagaaaaaagaaaaagcccccgagaggcgagtgagtgcccccgccaggccccggggcccgcgcgctcaaaacaggaaggcaattgtagacaaattcggaggtgctgcttctggacctactgcattgttccgtaatactaaggctgcgggggctgcaattggcggagtgaaaaacatgcttctcgaatggtgtcgtgcgatgactaaaaagtatgaacatgtggacatccaaaatttttcttctagttggagcagcgggatggccttttgcgcactcattcacaaatttttccccgatgcgtttgactatgcagagctggatcccgctaagcgacgccacaacttcacattggcctttagcaccgctgaaaaattggccgactgcgcgcagctgttagatgtagacgatatggtgcgcctggcggtgccagactctaagtgtgtgtatacttacatccaagagctgtatagaagcttggtacagaaaggcttagttaaaacaaaaaaaaagtag

SEQ ID NO: 41719 - DNA, 1539 bp, Artificial Sequence
  derived and/or modified sequence
atgctgcccggcgcggtcggcgagagcgattgtagcgctgaggctcgcgagaagatggagcagaaggaaggcaaactgtctgaggacgggacaaccgtgtcgccagccgctgacaacccagaaatgtctggaggcggcgcaccagcagaagagaccaagggcactgcgggcaaggccataaatgagggcccccccacagaaagcggcaagcaggaaaaagccccagcagaagacggtatgagcgcggagcttcaaggagaggctaacgggcttgatgaagtcaaagtggagtctcagagggaagccggtgggaaagaggacgcggaagcggagttaaagaaggaggacggggagaaagaggaaactaccgtggggtcccaagagatgaccggcaggaaagaggagactaaaagcgaacccaaagaagcagaagagaaggaaagtaccctcgcaagcgaaaaacagaaggcagaggagaaagaggcaaaacccgagtccggtcagaaggctgatgccaacgacagagataaaccagagccaaaggcgacggtggaagaggaggatgccaagacggcaagccaagaggaaacaggccagcgaaaggagtgctcaacagagccaaaagagaaagcaaccgacgaggaagcaaaggccgaaagccagaaagccgtggtagaggatgaggcgaaagccgaacccaaagagcccgatggcaaagaggaagctaagcacggcgctaaggaggaagctgacgccaaagaggaagctgaggacgctgaagaggcagaacctggaagtccatctgaggagcaggagcaggacgtggagaaggagcccgagggaggggcgggcgtaatccccagtagcccagaagaatggcccgagtctccaacaggagagggtcataacctgtctaccgatgggctgggccccgactgtgtggctagcggacagacgtcaccctcagcctccgagagttccccttcggacgtgccacagagccccccggagagcccgagtagcggtgagaaaaaagagaaagcacccgagcgacgcgtctctgcgccggctcgaccaaggggacccagggcgcagaacagaaaagcaatagtggataagttcggtggagcagcatccggaccaacagctctctttagaaatacaaaagccgccggggccgcgataggtggagtgaaaaacatgcttcttgaatggtgcagagctatgacaaagaagtacgagcacgtcgacatccagaacttctcaagctcctggtcctcaggaatggctttctgtgcgttaatacacaaattcttccccgatgcattcgactatgctgagctcgacccagcaaaaaggcgccacaattttaccctggctttttccaccgctgaaaaactggccgattgtgcacagctactggacgttgatgatatggttcgcttagctgtcccagactcaaaatgcgtatacacatacattcaggaactgtacaggagcctggtccagaaaggcctggtaaagaccaagaagaaatag

SEQ ID NO: 41720 - DNA, 1485 bp, Artificial Sequence
  derived and/or modified sequence
atggaacaaaaagaaggtaagctctcagaggatggaaccaccgtgtcccctgcggccgataatccggaaatgtcggggggcggcgcccccgctgaggagaccaagggaacggcagggaaagccattaacgaagggccccccactgaatccgggaaacaggagaaagctcctgccgaagacggtatgagcgcggagttacagggggaagccaacgggttggacgaggttaaagtagaatctcaaagagaggccggggggaaagaggacgccgaggccgagcttaaaaaggaggacggggaaaaggaagagacgacggtgggttcacaggaaatgactggtaggaaagaggagactaagtcagagcccaaagaggcagaggagaaagagtccaccctggcaagtgaaaaacagaaagctgaggaaaaggaggcaaaaccggagtcgggccagaaggccgatgccaatgatagggacaagcctgaaccaaaagcaaccgtagaagaggaggatgctaaaacggcctcccaggaagaaaccgggcagcgaaaggaatgctctacagagcctaaggagaaggccaccgacgaggaggcaaaggccgagtctcagaaagcagtcgtggaggacgaagctaaggccgagcccaaagagcctgacgggaaagaagaggcaaaacatggcgcaaaagaagaagctgacgctaaagaggaggcagaagatgccgaggaagctgagccaggatcaccctccgaggagcaagagcaggacgttgaaaaggaaccggaggggggtgcgggtgtgattccatcttcacctgaggaatggcccgagtcaccaacaggagaggggcacaatctctctaccgatggcctcggcccagattgcgtggcttcgggccaaaccagtccatccgcgagcgaatcaagcccttctgacgttccacagtcccctccagaaagtccaagctccggcgaaaagaaggagaaagccccagaaagacgagtgagcgcaccagctcgaccacgagggcccagggcacaaaataggaaggccatagttgacaaatttgggggcgccgccagtggtccaacggccctctttcgcaacacgaaggccgccggagctgcgattggaggtgtgaagaatatgctgcttgagtggtgccgggccatgactaagaagtacgagcatgtcgatatacaaaacttttcatcctcctggagctctgggatggcgttctgcgctctgattcataaattttttcccgatgccttcgactatgccgagcttgatcctgcaaagcggcgtcacaactttactctcgccttttcgaccgctgagaaactggcggactgcgcacagctactagacgtggatgatatggtcaggctcgccgttcctgattccaagtgcgtgtacacatacattcaggagctgtacaggtccctcgtccagaaggggcttgtcaagaccaaaaagaagtag

SEQ ID NO: 41721 - DNA, 1374 bp, Artificial Sequence
  derived and/or modified sequence
atggagcagaaggagggcaagctgtctgaagatggcaccaccgtgtccccagctgctgacaaccctgagatgtctgggggcggggccccagctgaggagaccaagggcacagctgggaaggccatcaatgaaggccccccaacagagagcggcaagcaggagaaggccccagcagaagatggcatgtctgctgagctgcagggcgaggccaacggcctggatgaggtgaaggtggagagccagcgggaggccggcggcaaggaggatgctgaggccgagctgaagaaggaggatggagagaaggaggagaccaccgtgggcagccaggagatgacaggcaggaaggaggagaccaagtctgagcccaaggaggccgaggagaaggagagcaccctggccagcgagaagcagaaggccgaggagaaggaggccaagccagagagcggccagaaggcagatgccaatgaccgggacaagccagagcccaaggccaccgtggaggaggaggatgccaagacagccagccaggaggagaccgtggtggaggatgaggccaaggccgagcccaaggagccagatggcaaggaggaggccaagcacggggccaaggaggaggctgatgagcccggcagccccagcgaggagcaggagcaggatgtggagaaggagcctgagggcggggccggggtcatccccagcagccctgaggagtggccagagagccccactggagagggccacaacctgagcacagatggcctgggccctgactgtgtggccagcggccagaccagccccagcgccagcgagagcagccccagtgatgtgccccagagccccccagagagccccagcagcggggagaagaaggagaaggcccctgagcggcgggtgtctgccccagcccggccccggggcccccgggcccagaacaggaaggccatcgtggacaagtttggaggagctgccagcggccccacagccctcttcaggaacaccaaggccgccggggccgccatcggcggcgtgaagaacatgctgctggagtggtgccgggccatgaccaagaagtatgagcacgtggacatccagaacttcagcagctcctggagcagcggcatggccttctgtgccctgatccacaagttcttcccagatgcctttgattatgcagagctggaccctgccaagaggaggcacaacttcaccctggccttcagcacagctgagaagctggccgactgtgcccagctgctggatgtggatgacatggtgcggctggccgtgcctgacagcaaatgtgtgtacacctacatccaggagctgtaccgcagcctggtgcagaagggcctggtgaagaccaagaagaagtag

SEQ ID NO: 41722 - DNA, 1539 bp, Artificial Sequence
  derived and/or modified sequence
atgctgcctggagctgtgggggagagtgactgcagcgctgaggcccgggagaagatggagcagaaggagggcaagctgtctgaagatggcaccaccgtgtccccagctgctgacaaccctgagatgtctgggggcggggccccagctgaggagaccaagggcacagctgggaaggccatcaatgaaggccccccaacagagagcggcaagcaggagaaggccccagcagaagatggcatgtctgctgagctgcagggcgaggccaacggcctggatgaggtgaaggtggagagccagcgggaggccggcggcaaggaggatgctgaggccgagctgaagaaggaggatggagagaaggaggagaccaccgtgggcagccaggagatgacaggcaggaaggaggagaccaagtctgagcccaaggaggccgaggagaaggagagcaccctggccagcgagaagcagaaggccgaggagaaggaggccaagccagagagcggccagaaggcagatgccaatgaccgggacaagccagagcccaaggccaccgtggaggaggaggatgccaagacagccagccaggaggagaccggccagaggaaggagtgcagcacagagcccaaggagaaggccacagatgaggaggccaaggccgagagccagaaggctgtggtggaggatgaggccaaggccgagcccaaggagccagatggcaaggaggaggccaagcacggggccaaggaggaggctgatgccaaggaggaggctgaagatgctgaggaggccgagcccggcagccccagcgaggagcaggagcaggatgtggagaaggagcctgagggcggggccggggtcatccccagcagccctgaggagtggccagagagccccaccggggagggccacaacctgagcacagatggcctgggccctgactgtgtggccagcggccagaccagccccagcgccagcgagagcagccccagtgatgtgccccagagccccccagagagccccagcagtggagagaagaaggagaaggcccctgagaggagagtgtctgccccagcccggccccggggcccccgggcccagaacaggaaggccatcgtggacaagtttggaggagctgccagcggccccacagccctcttcaggaacaccaaggctgctggagctgccatcggcggcgtgaagaacatgctgctggagtggtgccgggccatgaccaagaagtatgaacatgtggacatccagaacttcagcagctcctggagcagcggcatggccttctgtgccctgatccacaagttcttcccagatgcctttgattatgcagagctggaccctgccaagagaagacacaacttcaccctggccttcagcacagctgagaagctggccgactgtgcccagctgctggatgtggatgacatggtgcggctggccgtgcctgacagcaaatgtgtgtacacctacatccaggagctgtaccgcagcctggtgcagaagggcctggtgaagaccaagaagaagtag

SEQ ID NO: 41723 - DNA, 1485 bp, Artificial Sequence
  derived and/or modified sequence
atggagcagaaggagggcaagctgtctgaagatggcaccaccgtgtccccagctgctgacaaccctgagatgtctgggggcggggccccagctgaggagaccaagggcacagctgggaaggccatcaatgaaggccccccaacagagagcggcaagcaggagaaggccccagcagaagatggcatgtctgctgagctgcagggcgaggccaacggcctggatgaggtgaaggtggagagccagcgggaggccggcggcaaggaggatgctgaggccgagctgaagaaggaggatggagagaaggaggagaccaccgtgggcagccaggagatgacaggcaggaaggaggagaccaagtctgagcccaaggaggccgaggagaaggagagcaccctggccagcgagaagcagaaggccgaggagaaggaggccaagccagagagcggccagaaggcagatgccaatgaccgggacaagccagagcccaaggccaccgtggaggaggaggatgccaagacagccagccaggaggagaccggccagaggaaggagtgcagcacagagcccaaggagaaggccacagatgaggaggccaaggccgagagccagaaggctgtggtggaggatgaggccaaggccgagcccaaggagccagatggcaaggaggaggccaagcacggggccaaggaggaggctgatgccaaggaggaggctgaagatgctgaggaggccgagcccggcagccccagcgaggagcaggagcaggatgtggagaaggagcctgagggcggggccggggtcatccccagcagccctgaggagtggccagagagccccaccggggagggccacaacctgagcacagatggcctgggccctgactgtgtggccagcggccagaccagccccagcgccagcgagagcagccccagtgatgtgccccagagccccccagagagccccagcagtggagagaagaaggagaaggcccctgagaggagagtgtctgccccagcccggccccggggcccccgggcccagaacaggaaggccatcgtggacaagtttggaggagctgccagcggccccacagccctcttcaggaacaccaaggctgctggagctgccatcggcggcgtgaagaacatgctgctggagtggtgccgggccatgaccaagaagtatgaacatgtggacatccagaacttcagcagctcctggagcagcggcatggccttctgtgccctgatccacaagttcttcccagatgcctttgattatgcagagctggaccctgccaagagaagacacaacttcaccctggccttcagcacagctgagaagctggccgactgtgcccagctgctggatgtggatgacatggtgcggctggccgtgcctgacagcaaatgtgtgtacacctacatccaggagctgtaccgcagcctggtgcagaagggcctggtgaagaccaagaagaagtag

SEQ ID NO: 41724 - DNA, 1374 bp, Artificial Sequence
  derived and/or modified sequence
atggagcagaaggagggcaagctgagcgaggacggcaccaccgtgtcccccgcagccgacaaccccgaaatgagcggcggaggagcgccagcggaagaaacaaagggtacagctgggaaagctattaatgaggggcccccaacggaaagtgggaagcaggagaaggcacccgccgaagatggaatgtccgcagagctgcagggggaagcaaatggactggatgaggttaaagtggagagccagcgggaggctggcggtaaggaagacgccgaagctgagctcaaaaaagaagatggagagaaagaggaaacgacggtgggcagccaggaaatgacaggccgaaaggaggagacaaagtccgagccgaaagaagccgaggagaaggagagtactctggcctccgagaaacagaaggcggaagagaaggaggccaaacctgagagcggccaaaaggccgatgctaacgaccgcgacaagccagaacccaaagcaaccgttgaagaagaagatgccaaaaccgcctctcaggaggagacagtagtagaggatgaagctaaagcagagccaaaagaaccagatggaaaggaggaggcaaagcacggagctaaagaagaggcggacgagcctgggtccccctcagaagagcaggaacaggacgttgaaaaagagcccgaaggcggagctggagttataccaagttcccccgaagagtggccggaatcgccaacaggcgaagggcataacctttccaccgacggcttaggaccagattgtgtcgcctcggggcaaactagcccatccgcctctgaaagcagccccagcgatgtgccgcagtccccacctgagagcccctcctcaggggagaagaaggagaaagcacccgaacgacgagttagcgctcccgcgaggcctcgaggccctagggcccagaacagaaaggccatcgtagataagtttggaggggcagccagcggaccaaccgcattatttcggaacaccaaggctgccggtgcagcgattggaggcgtgaagaacatgctgttggagtggtgccgagcgatgacaaagaagtacgaacatgtcgatattcagaattttagctctagttggagttctgggatggccttctgtgcgctcatacataagttctttccagacgcattcgactacgctgaactggacccagcaaagcggcggcataacttcaccctggcattcagcacagcggagaaactggcggattgcgctcagttacttgacgtcgatgatatggttagattggctgtgcctgattctaaatgcgtctacacctacattcaagagttgtaccggtcattagtgcaaaaaggcctagtgaagactaaaaagaaatag

SEQ ID NO: 41725 - DNA, 1539 bp, Artificial Sequence
  derived and/or modified sequence
atgctgcccggcgccgtgggcgagagcgactgcagcgccgaggccagggagaagatggaacagaaagaagggaagctttcagaggatggaacaactgtgtcgcctgcagctgacaatccggaaatgagtgggggaggcgccccggctgaggaaactaagggcaccgctggcaaggctatcaatgagggacctcctacagaatcgggtaaacaggaaaaagcacctgcggaggatggcatgagcgctgagcttcagggcgaggcaaacggactggacgaggtcaaggtggagtcccagcgcgaggcaggcgggaaggaggatgctgaggctgaattgaaaaaggaggacggcgagaaagaggaaacaactgtgggttcccaggagatgacaggacgtaaagaagaaaccaagtcggagccgaaagaggccgaggagaaagaatctaccctggcctcggaaaaacaaaaggctgaggaaaaagaggctaaaccagagagcggtcaaaaagccgacgccaacgaccgggacaagccagagcccaaggccacggtcgaagaggaagatgccaaaaccgcatctcaggaggaaacaggacaaaggaaagagtgcagtacagagccgaaggagaaagccaccgacgaagaggctaaagctgaaagccaaaaagccgttgtggaggacgaggccaaggccgaaccgaaagagcctgacgggaaagaagaggctaaacacggcgctaaagaggaggctgatgccaaagaggaggccgaggatgccgaggaggcggagccaggcagtcctagcgaagaacaggaacaagatgtggagaaggaacccgaagggggggctggggtgatcccctctagccccgaggagtggcctgagagtcctaccggcgagggccacaacttgtccaccgacggactcgggccagattgtgtggcctcaggccaaactagcccctctgcctccgaatcatctccatctgacgtgccacagtcaccccctgagagtcctagctcaggtgagaagaaggagaaggcacccgaacggcgggtttcggctccagcaagaccccggggcccacgtgcccaaaaccggaaggcaattgtcgataaatttggcggcgccgcctccggaccaactgctctgtttcggaatacaaaggctgctggagcagcaattgggggggtaaagaacatgttacttgagtggtgccgggcgatgacaaagaagtacgagcacgtggatatccagaacttcagcagctcatggagctctggaatggctttttgcgcacttatccataagttcttccctgacgcctttgattatgcggaattggaccctgcaaaacgcagacataacttcacactggcattctctaccgcagaaaagttggcggactgtgctcagctgctggacgttgatgacatggtgaggctggctgtcccagactccaagtgcgtgtatacctatattcaggagttgtaccgctcattggtacagaaggggctggttaagacaaaaaagaagtag

SEQ ID NO: 41726 - DNA, 1485 bp, Artificial Sequence
  derived and/or modified sequence
atggagcagaaggagggcaagctgagcgaggacggcaccaccgtgagtcccgctgctgacaaccctgagatgagcgggggaggcgctccggctgaagagacaaagggtaccgcaggaaaagctattaatgagggacccccaaccgaatctggaaaacaggaaaaggcaccggctgaagacggtatgtctgcggagttacaaggcgaagccaacgggctggacgaggtgaaggtagaatcgcaacgcgaagcagggggaaaggaggacgccgaggccgaactcaaaaaggaagacggtgagaaggaggaaacaacagtaggttcccaggaaatgaccggccggaaggaggagaccaaaagtgagcccaaggaagccgaagaaaaagagagtaccctcgcctctgaaaaacagaaggctgaagaaaaagaagccaagccagaatcaggacagaaagccgatgccaatgatcgggacaaaccagagccaaaggccacggtggaagaggaggatgcaaagactgcctcccaggaagagacagggcagaggaaagagtgttcaacagagccgaaggagaaagctactgacgaggaagctaaggcggagtcgcaaaaagctgtggttgaggacgaagccaaggctgaacctaaggagcctgatgggaaggaggaggccaaacacggtgccaaggaagaggccgacgccaaagaggaagccgaggacgcagaagaggctgagcctggaagtcctagcgaagaacaagaacaggatgtggaaaaggagcccgaggggggcgcgggggtgatcccctcttccccggaggaatggcccgaaagccctacaggagaagggcataatctgtctacagatggcctaggtcccgattgcgtggcctccggacaaacgagccccagcgcttcagagtcttcaccatccgatgtgccacagtccccaccggagtctcccagctcgggggagaagaaggagaaggctcccgagcggcgcgtgtctgcccccgcgcgcccaaggggaccccgcgcacagaatcgaaaggccattgttgataaattcgggggggctgcctccgggcctacagccctattcagaaacacgaaggccgccggcgctgccattgggggcgtcaaaaacatgctgctcgagtggtgccgagctatgactaagaagtacgaacacgttgatatacagaatttttccagctcttggtcttcaggaatggcattctgcgctctgatccataagttctttcccgatgcattcgattatgctgaactcgacccagccaaacggaggcacaactttactttggcattctccacagccgagaaactggccgactgtgctcagctgctggatgttgacgatatggtccgcttggcagtcccagactccaaatgcgtgtatacatacatacaagaactttatcgaagcctggtgcaaaagggactggtgaaaactaaaaagaagtag

SEQ ID NO: 41727 - DNA, 1374 bp, Artificial Sequence
  derived and/or modified sequence
atggagcagaaagagggaaagctgtctgaagatggcaccaccgttagccccgcagcagacaaccctgaaatgagtgggggaggcgctcctgctgaagaaaccaagggcactgccggaaaggctataaatgaaggacctcctacggaaagtggcaagcaggagaaggcccctgccgaggatgggatgtctgctgaattacagggcgaagcaaatggtcttgacgaggttaaagtagaatcccagcgggaagccggaggaaaggaagacgctgaagcggagctgaagaaagaggacggcgaaaaggaagaaacaactgtgggctcccaggagatgacgggacgcaaggaggagacaaagtcggaaccaaaggaggctgaggaaaaagaaagtacgttggcctctgaaaagcaaaaggccgaggaaaaagaggccaaacctgagtccggacagaaggcagatgcaaatgatagagacaaaccggagccaaaagcgactgtcgaggaggaagacgccaagacagcctcgcaagaggagacagtcgtggaggacgaagcaaaggcggaacccaaagaaccggatgggaaagaggaggccaaacacggtgccaaggaagaggccgatgaaccaggctctccttcggaggaacaggaacaggatgttgagaaggaacctgaaggtggagcgggtgtgatcccttcttcacctgaggagtggccggagagccccactggggaggggcacaacctctctacggatggccttggacccgattgtgttgcttccggccagacaagtccttctgcctccgaatccagcccctccgacgtcccccagtctccacccgagtccccatcgagcggcgaaaagaaggagaaggctccagagaggagggtttcagccccagctagaccacgcggacccagagcccagaatcgcaaggcaatagtggacaaatttgggggtgcggcaagcggaccaactgctctgtttagaaacacaaaggctgccggtgcggcaattggcggtgtgaagaatatgctcctcgagtggtgtagggccatgacaaagaagtatgaacatgtggatatccagaactttagtagctcatggtcaagcgggatggctttttgcgccctcattcacaaattttttcctgatgcatttgattatgccgagctggatcccgctaaacgacggcacaactttaccctggccttctcaactgctgagaagctggccgactgtgcacagctacttgacgtggacgatatggttcgtttggctgtccctgattcaaagtgcgtgtacacatacatccaggagctgtataggtccctcgttcaaaaaggcctggtgaagaccaaaaaaaaatag

SEQ ID NO: 41728 - DNA, 1539 bp, Artificial Sequence
  derived and/or modified sequence
atgctgcccggagctgtgggtgagagtgattgctcagcggaggcccgagagaaaatggagcagaaagagggcaaactgtctgaggatggcactactgtatcccctgcagccgataatcctgaaatgtccgggggaggagcacctgccgaagagaccaagggaactgccggtaaagccatcaacgagggccctccaacggagtctgggaagcaagaaaaggcccctgctgaggatggtatgtctgctgagctccagggtgaggccaacggattggacgaagtgaaagttgagtctcaacgagaagcgggaggtaaggaagatgctgaagctgaactaaagaaggaggatggggaaaaagaagaaaccactgtggggtcgcaggagatgacggggcgaaaggaagagactaaatctgagcctaaggaagccgaggagaaagaatcgacactcgcttccgaaaagcagaaagccgaggagaaggaggctaaaccagaaagcggacagaaagccgatgctaacgacagagacaaacccgagccgaaagcaacagtagaagaagaggacgctaaaacagcttctcaagaggagactggacagcgaaaagagtgtagtacagaacccaaagaaaaagcaacagatgaagaagccaaggctgagtcccaaaaagcagttgtggaggatgaggccaaagccgaacctaaagagcccgacggaaaagaagaggcaaagcacggtgcaaaggaggaagcggacgctaaggaggaggcagaggacgctgaagaagccgagccaggcagccctagtgaggagcaagaacaggacgtagaaaaggaacccgagggaggtgctggagtcataccctcctcgcctgaagaatggcctgagtcacccactggcgagggtcacaatctttcaactgatggcctgggaccagattgtgtcgctagtggacagacttcccctagcgcttctgagtcctcaccatctgacgttcctcagtctcctccggagagcccctcaagcggcgagaagaaagagaaagcacccgaaaggagagtgagcgccccagccaggcctcggggacctcgtgcccagaatcggaaagctattgtggacaagttcggcggagccgcatcgggtcccaccgcacttttcaggaacacgaaagctgccggtgcagccatcgggggagtaaagaacatgcttctggagtggtgcagagcaatgaccaaaaaatacgaacacgtcgatattcagaattttagctctagttggagttctggaatggcgttttgcgcactgatccataagtttttccccgatgcgttcgactacgctgagctggacccagccaaacgtcggcacaacttcacacttgccttctctacagcggagaagttggctgactgcgcacagctgctggacgtggatgacatggtgcggctagcagtcccagactccaagtgcgtctatacctatatccaggaactctatagatccctggttcagaaaggcctggtcaagaccaagaagaaatag

SEQ ID NO: 41729 - DNA, 1485 bp, Artificial Sequence
  derived and/or modified sequence
atggagcaaaaggagggcaagctgtctgaggatggcaccactgtatctcctgccgcagataatcccgagatgtctgggggaggcgcacctgcagaggagaccaaaggtactgccggaaaggccataaacgaggggcctcccaccgaaagcgggaaacaggagaaagctccagccgaagatggcatgtcagccgagctgcagggcgaagccaacggactggatgaggtcaaggttgagtctcagagggaggctgggggtaaagaggatgccgaggccgagctgaaaaaggaagacggcgagaaggaggaaaccacagtgggctcccaggaaatgactggaaggaaggaggagacgaagagtgagccgaaggaggccgaggaaaaggaatctaccttagcctcagagaaacaaaaagccgaagagaaagaggccaagcctgagagcggacagaaagctgatgccaatgatcgagacaagccagaaccaaaggccacagttgaagaggaagatgcaaaaactgccagtcaagaagaaaccggccagcgcaaggagtgtagcacagagccaaaggagaaagcgacggacgaggaggcaaaagccgagagtcagaaagctgttgtggaggacgaggccaaggcagaacctaaagagccagatggaaaagaggaagcaaaacacggtgctaaggaggaggctgatgccaaggaggaggcagaagacgcggaggaagctgaaccgggaagcccatcagaagaacaggaacaggacgtcgagaaggaacccgaaggcggtgccggtgtgatacctagttctcccgaggaatggcccgagtccccaaccggcgaaggacacaacctgtcgacagatggtctgggtcctgactgtgtcgcatctgggcagaccagtccctcagcttcggaaagctcacctagcgatgtgccacagtctccgccagaatctccatcttctggcgagaagaaggaaaaagctcctgagaggcgggtatccgccccagcacgacccagaggaccgcgagcgcagaatcggaaggccattgtggacaaatttggcggtgccgcttccggccctacggctctcttccgcaatactaaggccgctggagccgcaatcgggggagtgaagaatatgctgctggaatggtgcagggcaatgactaaaaagtatgagcatgtcgacatccagaattttagcagctcatggagcagcggcatggccttttgcgctctgattcataagttctttccagacgcctttgactacgctgagctcgatcccgcaaagcgcagacataattttaccttggcattttcaaccgcagaaaaactcgcagactgcgctcagctcctggacgtcgacgatatggtcaggctggccgtgcctgattctaaatgcgtgtacacctacatacaggagctgtatcgatccctggtacagaagggtctggtcaagactaagaaaaaatag

SEQ ID NO: 41730 - DNA, 1897 bp, Artificial Sequence
  derived and/or modified sequence
atggagcagaaggaagggaagctctctgaggatgggaccaccgtctccccagctgcggacaaccctgagatgtcaggaggtggagcccctgcagaggagaccaaaggcacagctggaaaggccatcaatgaggggcctcccactgagtcaggaaagcaggaaaaggcaccagccgaggacggcatgtcagcagaactccagggggaagcaaatggattagatgaggtcaaagtggaatctcagagggaggctggtgggaaagaggatgctgaggctgaacttaaaaaggaggatggtgagaaggaagagaccactgtgggttctcaggagatgactggcaggaaagaagagaccaaatctgaacccaaagaggctgaggaaaaggagagcacgctggcctctgagaagcagaaggctgaggagaaagaggccaaacctgaatctgggcagaaagccgatgccaatgacagagacaagcctgaacctaaggcaacagttgaggaggaggacgccaagacagcctctcaggaggagacagttgtggaggatgaggctaaggctgaacccaaggagcccgatgggaaagaggaggccaaacatggtgcaaaagaggaggctgatgagccaggcagtcccagcgaagagcaggagcaggacgtggaaaaagagccagagggaggggcaggggtgattcccagctccccagaggagtggcctgagagccccactggggaggggcacaacctcagcacagatgggctgggtccagactgtgtagcttccggacagaccagtccttcagccagtgagtcttcacccagcgacgtgccccagagtccccctgagtccccttcctcaggggagaagaaggagaaggcaccagagcgcagggtatcagcccctgctcggccccgggggccccgggcacagaaccgcaaagccatcgtggacaagtttggcggggcagcttccggccccacggccttgttccgcaacactaaggcagccggggcagccattggtggtgtcaagaacatgctcttggagtggtgccgagccatgacaaaaaaatacgagcatgtggacatccagaacttctcctccagctggagcagtggtatggccttctgtgccctcatccacaagttcttccctgacgcctttgactacgcagagctggatcccgcaaagcgccggcacaacttcaccctggccttctccacagcagagaaactggctgactgtgctcagctgctggacgtggatgacatggtgcggttggctgtgcccgactccaagtgcgtctacacatacatccaggaactgtaccgcagccttgtgcagaaaggactggtgaagaccaagaagaagtgaggaggtgactggctctgtgggcagagatgggcagggtgcccagctcagcagccacggcccgggggttcccttctgctccatggaggcaccagagccaggggcttaggcaagggtgtgtggcgttggttttaactgcattaaaagtacttttgtaaaatcctgtctggcccctcagtgctctctccatacttggcccaggaacctctgcactctgggataataaactctggccataggggattcctcacctgctgaggtctcaataactgcgcaaggtgtttgggaaaggacaatggcctggttcccaccactaaccagctgtgtgacacatacagttaacctctctgggccccagtttacagtctgaaaggggataatgagagttccaaccttatgaaggtgttgcaagagttaaacgagataatgaaatgggcaaaaagctttgcccagtcctgccactcaagtgttcagtaagtggtcgccaaaaataaaaaacttacattttgactctggtggcacttct

SEQ ID NO: 41731 - DNA, 2062 bp, Artificial Sequence
  derived and/or modified sequence
atgctcccgggggcagttggagagtcagattgctcagcagaggccagggagaagatggagcagaaggaagggaagctctctgaggatgggaccaccgtctccccagctgcggacaaccctgagatgtcaggaggtggagcccctgcagaggagaccaaaggcacagctggaaaggccatcaatgaggggcctcccactgagtcaggaaagcaggaaaaggcaccagccgaggacggcatgtcagcagaactccagggggaagcaaatggattagatgaggtcaaagtggaatctcagagggaggctggtgggaaagaggatgctgaggctgaacttaaaaaggaggatggtgagaaggaagagaccactgtgggttctcaggagatgactggcaggaaagaagagaccaaatctgaacccaaagaggctgaggaaaaggagagcacgctggcctctgagaagcagaaggctgaggagaaagaggccaaacctgaatctgggcagaaagccgatgccaatgacagagacaagcctgaacctaaggcaacagttgaggaggaggacgccaagacagcctctcaggaggagacaggccagaggaaagagtgcagcactgaacccaaggagaaggctactgatgaagaggccaaggctgaatcgcagaaggctgttgtggaggatgaggctaaggctgaacccaaggagcccgatgggaaagaggaggccaaacatggtgcaaaagaggaggctgatgcaaaagaggaggcggaggatgcagaggaggcagagccaggcagtcccagcgaagagcaggagcaggacgtggaaaaagagccagagggaggggcaggggtgattcccagctccccagaggagtggcctgagagccccactggggaggggcacaacctcagcacagatgggctgggtccagactgtgtagcttccggacagaccagtccttcagccagtgagtcttcacccagcgacgtgccccagagtccccctgagtccccttcctcaggggagaagaaggagaaggcaccagagcgcagggtatcagcccctgctcggccccgggggccccgggcacagaaccgcaaagccatcgtggacaagtttggcggggcagcttccggccccacggccttgttccgcaacactaaggcagccggggcagccattggtggtgtcaagaacatgctcttggagtggtgccgagccatgacaaaaaaatacgagcatgtggacatccagaacttctcctccagctggagcagtggtatggccttctgtgccctcatccacaagttcttccctgacgcctttgactacgcagagctggatcccgcaaagcgccggcacaacttcaccctggccttctccacagcagagaaactggctgactgtgctcagctgctggacgtggatgacatggtgcggttggctgtgcccgactccaagtgcgtctacacatacatccaggaactgtaccgcagccttgtgcagaaaggactggtgaagaccaagaagaagtgaggaggtgactggctctgtgggcagagatgggcagggtgcccagctcagcagccacggcccgggggttcccttctgctccatggaggcaccagagccaggggcttaggcaagggtgtgtggcgttggttttaactgcattaaaagtacttttgtaaaatcctgtctggcccctcagtgctctctccatacttggcccaggaacctctgcactctgggataataaactctggccataggggattcctcacctgctgaggtctcaataactgcgcaaggtgtttgggaaaggacaatggcctggttcccaccactaaccagctgtgtgacacatacagttaacctctctgggccccagtttacagtctgaaaggggataatgagagttccaaccttatgaaggtgttgcaagagttaaacgagataatgaaatgggcaaaaagctttgcccagtcctgccactcaagtgttcagtaagtggtcgccaaaaataaaaaacttacattttgactctggtggcacttct

SEQ ID NO: 41732 - DNA, 1649 bp, Artificial Sequence
  derived and/or modified sequence
agatggagcagaaggaagggaagctctctgaggatgggaccaccgtctccccagctgcggacaaccctgagatgtcaggaggtggagcccctgcagaggagaccaaaggcacagctggaaaggccatcaatgaggggcctcccactgagtcaggaaagcaggaaaaggcaccagccgaggacggcatgtcagcagaactccagggggaagcaaatggattagatgaggtcaaagtggaatctcagagggaggctggtgggaaagaggatgctgaggctgaacttaaaaaggaggatggtgagaaggaagagaccactgtgggttctcaggagatgactggcaggaaagaagagaccaaatctgaacccaaagaggctgaggaaaaggagagcacgctggcctctgagaagcagaaggctgaggagaaagaggccaaacctgaatctgggcagaaagccgatgccaatgacagagacaagcctgaacctaaggcaacagttgaggaggaggacgccaagacagcctctcaggaggagacaggccagaggaaagagtgcagcactgaacccaaggagaaggctactgatgaagaggccaaggctgaatcgcagaaggctgttgtggaggatgaggctaaggctgaacccaaggagcccgatgggaaagaggaggccaaacatggtgcaaaagaggaggctgatgcaaaagaggaggcggaggatgcagaggaggcagagccaggcagtcccagcgaagagcaggagcaggacgtggaaaaagagccagagggaggggcaggggtgattcccagctccccagaggagtggcctgagagccccactggggaggggcacaacctcagcacagatgggctgggtccagactgtgtagcttccggacagaccagtccttcagccagtgagtcttcacccagcgacgtgccccagagtccccctgagtccccttcctcaggggagaagaaggagaaggcaccagagcgcagggtatcagcccctgctcggccccgggggccccgggcacagaaccgcaaagccatcgtggacaagtttggcggggcagcttccggccccacggccttgttccgcaacactaaggcagccggggcagccattggtggtgtcaagaacatgctcttggagtggtgccgagccatgacaaaaaaatacgagcatgtggacatccagaacttctcctccagctggagcagtggtatggccttctgtgccctcatccacaagttcttccctgacgcctttgactacgcagagctggatcccgcaaagcgccggcacaacttcaccctggccttctccacagcagagaaactggctgactgtgctcagctgctggacgtggatgacatggtgcggttggctgtgcccgactccaagtgcgtctacacatacatccaggaactgtaccgcagccttgtgcagaaaggactggtgaagaccaagaagaagtgaggaggtgactggctctgtgggcagagatgggcagggtgcccagctcagcagccacggcccgggggttcccttctgctccatggaggcaccagagccaggggcttaggcaagggtgtgtggcgttggttttaactgcattaaaagtacttttgtaaaatcctg

SEQ ID NO: 41733 - DNA, 1374 bp, Artificial Sequence
  derived and/or modified sequence
atggagcagaaggagggcaagctgagcgaggacggcaccaccgtgagccccgccgccgacaaccccgagatgagcggcggcggcgcccccgccgaggagaccaagggcaccgccggcaaggccatcaacgagggcccccccaccgagagcggcaagcaggagaaggcccccgccgaggacggcatgagcgccgagctgcagggcgaggccaacggcctggacgaggtgaaggtggagagccagagagaggccggcggcaaggaggacgccgaggccgagctgaagaaggaggacggcgagaaggaggagaccaccgtgggcagccaggagatgaccggcagaaaggaggagaccaagagcgagcccaaggaggccgaggagaaggagagcaccctggccagcgagaagcagaaggccgaggagaaggaggccaagcccgagagcggccagaaggccgacgccaacgacagagacaagcccgagcccaaggccaccgtggaggaggaggacgccaagaccgccagccaggaggagaccgtggtggaggacgaggccaaggccgagcccaaggagcccgacggcaaggaggaggccaagcacggcgccaaggaggaggccgacgagcccggcagccccagcgaggagcaggagcaggacgtggagaaggagcccgagggcggcgccggcgtgatccccagcagccccgaggagtggcccgagagccccaccggcgagggccacaacctgagcaccgacggcctgggccccgactgcgtggccagcggccagaccagccccagcgccagcgagagcagccccagcgacgtgccccagagcccccccgagagccccagcagcggcgagaagaaggagaaggcccccgagagaagagtgagcgcccccgccagacccagaggccccagagcccagaacagaaaggccatcgtggacaagttcggcggcgccgccagcggccccaccgccctgttcagaaacaccaaggccgccggcgccgccatcggcggcgtgaagaacatgctgctggagtggtgcagagccatgaccaagaagtacgagcacgtggacatccagaacttcagcagcagctggagcagcggcatggccttctgcgccctgatccacaagttcttccccgacgccttcgactacgccgagctggaccccgccaagagaagacacaacttcaccctggccttcagcaccgccgagaagctggccgactgcgcccagctgctggacgtggacgacatggtgagactggccgtgcccgacagcaagtgcgtgtacacctacatccaggagctgtacagaagcctggtgcagaagggcctggtgaagaccaagaagaagtag

SEQ ID NO: 41734 - DNA, 1539 bp, Artificial Sequence
  derived and/or modified sequence
atgctgcccggcgccgtgggcgagagcgactgcagcgccgaggccagagagaagatggagcagaaggagggcaagctgagcgaggacggcaccaccgtgagccccgccgccgacaaccccgagatgagcggcggcggcgcccccgccgaggagaccaagggcaccgccggcaaggccatcaacgagggcccccccaccgagagcggcaagcaggagaaggcccccgccgaggacggcatgagcgccgagctgcagggcgaggccaacggcctggacgaggtgaaggtggagagccagagagaggccggcggcaaggaggacgccgaggccgagctgaagaaggaggacggcgagaaggaggagaccaccgtgggcagccaggagatgaccggcagaaaggaggagaccaagagcgagcccaaggaggccgaggagaaggagagcaccctggccagcgagaagcagaaggccgaggagaaggaggccaagcccgagagcggccagaaggccgacgccaacgacagagacaagcccgagcccaaggccaccgtggaggaggaggacgccaagaccgccagccaggaggagaccggccagagaaaggagtgcagcaccgagcccaaggagaaggccaccgacgaggaggccaaggccgagagccagaaggccgtggtggaggacgaggccaaggccgagcccaaggagcccgacggcaaggaggaggccaagcacggcgccaaggaggaggccgacgccaaggaggaggccgaggacgccgaggaggccgagcccggcagccccagcgaggagcaggagcaggacgtggagaaggagcccgagggcggcgccggcgtgatccccagcagccccgaggagtggcccgagagccccaccggcgagggccacaacctgagcaccgacggcctgggccccgactgcgtggccagcggccagaccagccccagcgccagcgagagcagccccagcgacgtgccccagagcccccccgagagccccagcagcggcgagaagaaggagaaggcccccgagagaagagtgagcgcccccgccagacccagaggccccagagcccagaacagaaaggccatcgtggacaagttcggcggcgccgccagcggccccaccgccctgttcagaaacaccaaggccgccggcgccgccatcggcggcgtgaagaacatgctgctggagtggtgcagagccatgaccaagaagtacgagcacgtggacatccagaacttcagcagcagctggagcagcggcatggccttctgcgccctgatccacaagttcttccccgacgccttcgactacgccgagctggaccccgccaagagaagacacaacttcaccctggccttcagcaccgccgagaagctggccgactgcgcccagctgctggacgtggacgacatggtgagactggccgtgcccgacagcaagtgcgtgtacacctacatccaggagctgtacagaagcctggtgcagaagggcctggtgaagaccaagaagaagtag

SEQ ID NO: 41735 - DNA, 1485 bp, Artificial Sequence
  derived and/or modified sequence
atggagcagaaggagggcaagctgagcgaggacggcaccaccgtgagccccgccgccgacaaccccgagatgagcggcggcggcgcccccgccgaggagaccaagggcaccgccggcaaggccatcaacgagggcccccccaccgagagcggcaagcaggagaaggcccccgccgaggacggcatgagcgccgagctgcagggcgaggccaacggcctggacgaggtgaaggtggagagccagagagaggccggcggcaaggaggacgccgaggccgagctgaagaaggaggacggcgagaaggaggagaccaccgtgggcagccaggagatgaccggcagaaaggaggagaccaagagcgagcccaaggaggccgaggagaaggagagcaccctggccagcgagaagcagaaggccgaggagaaggaggccaagcccgagagcggccagaaggccgacgccaacgacagagacaagcccgagcccaaggccaccgtggaggaggaggacgccaagaccgccagccaggaggagaccggccagagaaaggagtgcagcaccgagcccaaggagaaggccaccgacgaggaggccaaggccgagagccagaaggccgtggtggaggacgaggccaaggccgagcccaaggagcccgacggcaaggaggaggccaagcacggcgccaaggaggaggccgacgccaaggaggaggccgaggacgccgaggaggccgagcccggcagccccagcgaggagcaggagcaggacgtggagaaggagcccgagggcggcgccggcgtgatccccagcagccccgaggagtggcccgagagccccaccggcgagggccacaacctgagcaccgacggcctgggccccgactgcgtggccagcggccagaccagccccagcgccagcgagagcagccccagcgacgtgccccagagcccccccgagagccccagcagcggcgagaagaaggagaaggcccccgagagaagagtgagcgcccccgccagacccagaggccccagagcccagaacagaaaggccatcgtggacaagttcggcggcgccgccagcggccccaccgccctgttcagaaacaccaaggccgccggcgccgccatcggcggcgtgaagaacatgctgctggagtggtgcagagccatgaccaagaagtacgagcacgtggacatccagaacttcagcagcagctggagcagcggcatggccttctgcgccctgatccacaagttcttccccgacgccttcgactacgccgagctggaccccgccaagagaagacacaacttcaccctggccttcagcaccgccgagaagctggccgactgcgcccagctgctggacgtggacgacatggtgagactggccgtgcccgacagcaagtgcgtgtacacctacatccaggagctgtacagaagcctggtgcagaagggcctggtgaagaccaagaagaagtag

SEQ ID NO: 41736 - protein, 1770 aa, Artificial Sequence
  derived and/or modified sequence
MSDTKVKVAVRVRPMNRRELELNTKCVVEMEGNQTVLHPPPSNTKQGERRPSQVFAFDYCFWSMDESNTTKYAGQEVVFKCLGEGILEKAFQGYNACIFAYGQTGSGKSFSMMGHAEQLGLIPRLCCALFKRISLEQNESQTFKVEVSYMEIYNEKVRDLLDPKGSRQSLKVREHKVLGPYVDGLSQLAVTSFEDIESLMSEGNKSRTVAATNMNEESSRSHAVFNIIITQTLYDLQSGNSGEKVSKVSLVDLAGSERVSKTGAAGERLKEGSNINKSLTTLGLVISSLADQAAGKGKSKFVPYRDSVLTWLLKDNLGGNSQTSMIATISPAADNYEETLSTLRYADRAKRIVNHAVVNEDPNAKVIRELREEVEKLREQLSQAEAMKAPELKEKLEESEKLIKELTVTWEEKLRKTEEIAQERQRQLESMGISLEMSGIKVGDDKCYLVNLNADPALNELLVYYLKDHTRVGADTSQDIQLFGIGIQPQHCEIDIASDGDVTLTPKENARSCVNGTLVCSTTQLWHGDRILWGNNHFFRINLPKRKRRDWLKDFEKETGPPEHDLDAASEASSEPDYNYEFAQMEVIMKTLNSNDPVQNVVQVLEKQYLEEKRSALEEQRLMYERELEQLRQQLSPDRQPQSSGPDRLAYSSQTAQQKVTQWAEERDELFRQSLAKLREQLVKANTLVREANFLAEEMSKLTDYQVTLQIPAANLSANRKRGAIVSEPAIQVRRKGKSTQVWTIEKLENKLIDMRDLYQEWKEKVPEAKRLYGKRGDPFYEAQENHNLIGVANVFLECLFCDVKLQYAVPIISQQGEVAGRLHVEVMRVTGAVPERVVEDDSSENSSESGSLEVVDSSGEIIHRVKKLTCRVKIKEATGLPLNLSNFVFCQYTFWDQCESTVAAPVVDPEVPSPQSKDAQYTVTFSHCKDYVVNVTEEFLEFISDGALAIEVWGHRCAGNGSSIWEVDSLHAKTRTLHDRWNEVTRRIEMWISILELNELGEYAAVELHQAKDVNTGGIFQLRQGHSRRVQVTVKPVQHSGTLPLMVEAILSVSIGCVTARSTKLQRGLDSYQRDDEDGDDMDSYQEEDLNCVRERWSDALIKRREYLDEQIKKVSNKTEKTEDDVEREAQLVEQWVGLTEERNAVLVPAPGSGIPGAPADWIPPPGMETHIPVLFLDLNADDLSANEQLVGPHASGVNSILPKEHGSQFFYLPIIKHSDDEVSATASWDSSVHDSVHLNRVTPQNERIYLIVKTTVQLSHPAAMELVLRKRIAANIYNKQSFTQSLKRRISLKNIFYSCGVTYEIVSNIPKATEEIEDRETLALLAARSENEGTSDGETYIEKYTRGVLQVENILSLERLRQAVTVKEALSTKARHIRRSLSTPNVHNVSSSRPDLSGFDEDDKGWPENQLDMSDYSSSYQDVACYGTLPRDSPRRNKEGCTSETPHALTVSPFKAFSPQPPKFFKPLMPVKEEHKKRIALEARPLLSQEDSEEEENELEAINRKLISSQPYVPVEFADFSVYNASLENREWFSSKVDLSNSRVLEKEVSRSPTTSSITSGYFSHSASNATLSDMVVPSSDSSDQLAIQTKDADSTEHSTPSLVHDFRPSSNKELTEVEKGLVKDKIIVVPLKENSALAKGSPSSQSIPEKNSKSLCRTGSCSELDACPSKISQPARGFCPREVTVEHTTNILEDHSFTEFMGVSEGKDFDGLTDSSAGELSSRRSLPNKTGGKTVSDGLHHPSQLHSKLENDQVIIPEAAFWVLCCQ

SEQ ID NO: 41737 - protein, 1770 aa, Artificial Sequence
  derived and/or modified sequence
MSDTKVKVAVRVRPMNRRELELNTKCVVEMEGNQTVLHPPPSNTKQGERKPPKVFAFDYCFWSMDESNTTKYAGQEVVFKCLGEGILEKAFQGYNACIFAYGQTGSGKSFSMMGHAEQLGLIPRLCCALFKRISLEQNESQTFKVEVSYMEIYNEKVRDLLDPKGSRQSLKVREHKVLGPYVDGLSQLAVTSFEDIESLMSEGNKSRTVAATNMNEESSRSHAVFNIIITQTLYDLQSGNSGEKVSKVSLVDLAGSERVSKTGAAGERLKEGSNINKSLTTLGLVISSLADQAAGKGKSKFVPYRDSVLTWLLKDNLGGNSQTSMIATISPAADNYEETLSTLRYADRAKRIVNHAVVNEDPNAKVIRELREEVEKLREQLSQAEAMKAPELKEKLEESEKLIKELTVTWEEKLRKTEEIAQERQRQLESMGISLEMSGIKVGDDKCYLVNLNADPALNELLVYYLKDHTRVGADTSQDIQLFGIGIQPQHCEIDIASDGDVTLTPKENARSCVNGTLVCSTTQLWHGDRILWGNNHFFRINLPKRKRRDWLKDFEKETGPPEHDLDAASEASSEPDYNYEFAQMEVIMKTLNSNDPVQNVVQVLEKQYLEEKRSALEEQRLMYERELEQLRQQLSPDRQPQSSGPDRLAYSSQTAQQKVTQWAEERDELFRQSLAKLREQLVKANTLVREANFLAEEMSKLTDYQVTLQIPAANLSANRKRGAIVSEPAIQVRRKGKSTQVWTIEKLENKLIDMRDLYQEWKEKVPEAKRLYGKRGDPFYEAQENHNLIGVANVFLECLFCDVKLQYAVPIISQQGEVAGRLHVEVMRVTGAVPERVVEDDSSENSSESGSLEVVDSSGEIIHRVKKLTCRVKIKEATGLPLNLSNFVFCQYTFWDQCESTVAAPVVDPEVPSPQSKDAQYTVTFSHCKDYVVNVTEEFLEFISDGALAIEVWGHRCAGNGSSIWEVDSLHAKTRTLHDRWNEVTRRIEMWISILELNELGEYAAVELHQAKDVNTGGIFQLRQGHSRRVQVTVKPVQHSGTLPLMVEAILSVSIGCVTARSTKLQRGLDSYQRDDEDGDDMDSYQEEDLNCVRERWSDALIKRREYLDEQIKKVSNKTEKTEDDVEREAQLVEQWVGLTEERNAVLVPAPGSGIPGAPADWIPPPGMETHIPVLFLDLNADDLSANEQLVGPHASGVNSILPKEHGSQFFYLPIIKHSDDEVSATASWDSSVHDSVHLNRVTPQNERIYLIVKTTVQLSHPAAMELVLRKRIAANIYNKQSFTQSLKRRISLKNIFYSCGVTYEIVSNIPKATEEIEDRETLALLAARSENEGTSDGETYIEKYTRGVLQVENILSLERLRQAVTVKEALSTKARHIRRSLSTPNVHNVSSSRPDLSGFDEDDKGWPENQLDMSDYSSSYQDVACYGTLPRDSPRRNKEGCTSETPHALTVSPFKAFSPQPPKFFKPLMPVKEEHKKRIALEARPLLSQEDSEEEENELEAINRKLISSQPYVPVEFADFSVYNASLENREWFSSKVDLSNSRVLEKEVSRSPTTSSITSGYFSHSASNATLSDMVVPSSDSSDQLAIQTKDADSTEHSTPSLVHDFRPSSNKELTEVEKGLVKDKIIVVPLKENSALAKGSPSSQSIPEKNSKSLCRTGSCSELDACPSKISQPARGFCPREVTVEHTTNILEDHSFTEFMGVSEGKDFDGLTDSSAGELSSRRSLPNKTGGKTVSDGLHHPSQLHSKLENDQVIIPEAAFWVLCCQ

SEQ ID NO: 41738 - DNA, 5313 bp, Artificial Sequence
  derived and/or modified sequence
atgtctgataccaaggtgaaggtggctgtgagagtgagacctatgaatcgccgggagctggagctgaataccaaatgtgtcgtggagatggaagggaaccagacagtgttgcacccacctccctccaatacgaagcaaggagagcgtagaccaagccaggtcttcgcctttgattactgtttctggtcaatggacgagtcaaatacaaccaaatatgccggccaggaggtggtctttaagtgcctgggagagggtattctcgagaaagcttttcagggttataatgcgtgcatcttcgcttacggccagaccggtagcggtaagtcgttcagcatgatgggccatgccgagcaattgggccttatcccacgcctgtgttgtgctttgttcaaacgtatcagcttggagcagaatgagtcccagaccttcaaagttgaagtgtcctatatggaaatatacaatgaaaaagtgcgggatttgctggatcctaaggggtccaggcagagtttaaaagtgcgcgagcacaaggtgctgggcccttatgtggatggattgtctcaactcgccgtaacttccttcgaagatatcgagtccctcatgtcagaaggcaataagtctagaactgtggccgcgactaacatgaacgaggaatcatctcgatctcatgcagtttttaacataattatcacacagacactgtatgacctgcaatcaggcaacagcggcgaaaaggtgagtaaagtttcactcgttgacttagcgggatccgaacgggtgtctaagactggggcagccggcgagagactcaaggaaggctcaaatataaacaaatcccttaccaccctaggccttgttattagcagccttgccgaccaggctgccggcaagggaaagtctaaattcgtgccatacagggattccgtacttacctggctgcttaaagacaatctcgggggcaatagccaaacctccatgattgccacaatcagtcccgctgcagacaactatgaagagaccttgagtactctgagatacgcagacagggcgaaaagaatcgtcaatcacgccgtggtgaatgaggaccccaatgccaaagttattagggagctgcgtgaggaggttgagaagctgcgggaacagctgtctcaggctgaggctatgaaagctcccgaactgaaagagaagctggaagagagcgaaaagctcataaaagagctgaccgtgacctgggaggagaaactccgaaagacggaggaaattgctcaggaacgccagcggcaactggaatcgatgggtatttcactcgagatgagcgggattaaggtcggcgacgacaaatgttacctagtgaatctaaacgcagacccggctctgaacgagctccttgtgtactacctcaaggatcacacaagagttggagcagatacgagccaggatattcagctgtttggcattggcattcagccccaacactgtgagatcgatattgctagtgacggtgatgtgaccctcaccccaaaagagaacgcgaggtcctgtgttaatggcactctcgtgtgctctacaacccagctctggcacggcgatagaatattgtggggcaacaaccatttttttaggatcaatctcccaaagcgcaaaagaagagactggctgaaagactttgagaaagagactggcccccccgaacacgacctggacgccgcaagcgaggcttcgagcgagcccgactacaactatgagtttgcgcagatggaagtcatcatgaaaacccttaacagcaacgaccccgtccagaacgtagtgcaggtgttggagaagcagtacttggaggagaaaagaagcgctctcgaggagcagcgtttgatgtatgagcgcgagctagagcagttacggcagcagctgagccctgaccgccaaccacagtcgtcaggccccgaccggctcgcctacagctcccagaccgctcagcagaaagttacacagtgggctgaagagcgagatgaacttttccgacagtctttggccaaactgagggaacagctcgttaaagccaataccctcgtgcgggaggctaatttcctggcagaagaaatgagcaaactgaccgactaccaggttaccttgcagatacccgccgccaacctgagtgccaaccgcaaacgcggagccatcgtgtccgagcctgccatccaagtccgcagaaaaggcaaaagcactcaggtatggactattgaaaagctggaaaacaaattgatcgatatgcgtgatttataccaggagtggaaggagaaagttccggaagccaagcgactctacggcaagaggggagacccgttctacgaagcacaggagaaccacaatcttatcggagtggcaaacgtgttcttggagtgcttgttctgcgatgtgaagttacaatacgctgtgccgattataagtcagcagggagaagtggctggcagactgcatgttgaagtgatgcgcgtgactggcgcagtcccagaacgagtggtggaagacgactcaagcgagaactcttcagagtctgggtccctggaagtagtggactcttctggcgaaattatccatagggtgaaaaagctgacgtgcagagtcaaaattaaggaggctacggggttgcctctaaacctgtcgaatttcgtcttttgccaatataccttttgggaccagtgtgaaagtactgtcgcagcccctgtggtggatcctgaggttccctccccccaatcaaaggatgcccagtatacagtgacttttagccattgcaaagattacgtggtcaatgtcacggaggagtttctggagttcatttcagacggggcactggcgatcgaggtatggggccaccgctgcgcagggaacggatccagcatttgggaggtagatagcctgcatgcgaagactagaacactgcatgaccgctggaatgaagttacacgaagaattgagatgtggattagcatactggagctcaacgaactgggcgaatacgctgccgtggagctgcaccaggccaaggatgttaacaccggcggcatcttccagctaaggcagggacattccagacgagtgcaggtcacagtgaaaccggttcaacatagcggcaccctgcccctgatggtcgaagcaatcctttctgtgtccatcggttgtgtaaccgctcgatcaaccaaattacagcgggggctggacagctaccagcgtgatgacgaggacggggacgacatggactcctaccaggaggaggatctcaattgtgtccgagagcgctggtccgacgctctgatcaaacggagagagtatcttgacgaacaaatcaagaaagtaagtaacaagaccgagaaaactgaggacgacgttgaacgggaagcacagctcgtagagcagtgggttggactgactgaggagagaaatgcagtgctcgtccctgctcctgggtccggtatccccggcgctcccgccgattggatcccccctcctggaatggagacccacatacccgtcctgttcctggatctgaatgccgacgacctttctgccaacgaacagctcgtagggcctcatgcaagcggcgtgaatagcatccttccaaaagaacatggcagccagtttttctaccttcctattatcaaacactccgacgacgaagtgagtgcaacagcgagctgggattcttcagttcacgactctgtgcatttgaatagagtgaccccccagaacgaacggatataccttatcgtcaagaccacagtccaactgtcacacccagccgcaatggaactggtccttagaaagagaattgctgccaatatctataataagcaatcttttacacagtcgctgaagagaagaattagtctgaagaatattttttattcctgcggggtgacttacgaaatcgtgagtaacattcctaaagcaacagaggagattgaggatagggaaaccctcgcgttgctggccgctagatccgaaaacgagggcacttccgacggcgaaacgtacatagaaaaatatacacgcggagtcctgcaggtcgaaaatattctcagtctggaacgcttacgtcaggccgtaaccgtaaaggaagccctgtccacaaaggcccgacatattaggagaagcctgagcacccctaacgtccataatgtgagttctagtagacctgacttgagtggctttgacgaagatgacaaaggctggccagaaaatcagttggacatgagcgattattctagttcttaccaggatgttgcttgctacggcactctgcctcgcgatagtccaagaaggaataaggagggatgcacctctgagacaccccacgcgctgacagtatctcccttcaaggccttctctcctcagcctccaaaattttttaaaccgctgatgcctgttaaagaagagcataaaaagcggattgctctcgaagctaggcccttgctcagccaggaagattccgaagaagaggaaaacgagctggaggccatcaaccgaaaactaatctcttctcaaccgtacgtccccgtggaatttgctgacttttctgtctacaatgcaagtctggaaaatcgcgaatggtttagtagcaaggttgaccttagcaattctagagtgttggaaaaagaggtatctcgcagccctactacaagtagcatcacatcgggatatttttcccacagcgcaagtaatgcaacactgtccgacatggtcgtgccctctagcgactcaagcgaccagctcgcgatccagacgaaagacgctgactcgactgagcacagcactccttccttggtgcacgatttccgcccttcttctaacaaggagctgacggaagtagaaaagggactagtgaaggataaaatcattgtcgtgcccctgaaagagaattctgcacttgcgaagggtagtccctctagtcagtctatccctgaaaaaaactctaaatcgctgtgccgtaccggctcctgctctgagttagacgcttgtccctctaagatcagccagcccgcacgcggcttttgtccccgagaggtaacagtggagcacaccacaaacatcctcgaggaccattcctttacagaattcatgggagtttctgagggtaaggacttcgacggactgacagacagctctgctggggaactgagctcaagacgctcgttacccaataaaacaggaggaaaaactgtgagtgatgggttgcatcatccatcccagctacacagcaaactcgagaatgatcaagttatcatcccagaagccgcattctgggttctttgctgccaatag

SEQ ID NO: 41739 - DNA, 5313 bp, Artificial Sequence
  derived and/or modified sequence
atgagtgataccaaagtcaaagtggccgtgagggtccgaccaatgaacaggcgggagctggagctcaatacaaaatgtgtagtggaaatggagggtaatcagactgtgcttcaccccccccctagtaataccaagcagggcgaaaggaagccaccaaaggtatttgccttcgattactgcttttggtctatggacgagagcaacaccactaagtacgccggccaagaagtggtgttcaagtgcctgggggaaggcatcctagagaaagcattccagggatacaacgcgtgcatctttgcgtatggacaaacggggtccgggaaatcattcagtatgatggggcatgctgagcaactaggcctcatacctcgtctctgctgcgcgctgttcaagcgcatctcactggagcagaacgagagccaaaccttcaaggtcgaggtgtcgtatatggagatttacaacgagaaggtcagggatctattagatcctaaaggctcccgacagtcactgaaagtgagagaacacaaagtcctcgggccctacgtcgatggcctctcccagctcgcagtgaccagttttgaggatattgagtctttgatgtctgagggaaacaaatcccggacagttgccgccaccaacatgaatgaagagagttcacgatcgcacgctgtgtttaatatcattatcacacagactctgtatgaccttcagagcgggaacagcggcgagaaagtctctaaagtttcactggtagatctggcaggttccgagagagtttccaagactggggctgctggagagcggctgaaggagggctccaacattaacaagagcttgacaacgctgggattagtgatatctagcttggctgatcaggcagcaggcaagggtaaatccaagttcgtcccctatagggactccgttctcacatggctacttaaagacaatctcgggggcaactcccagacaagtatgatcgcaactatctccccggcggcggataattatgaagagaccctctcaactctgaggtacgccgacagagccaaaaggattgttaatcacgccgtcgtgaatgaggaccctaacgctaaggtcatcagggagcttcgggaggaggtggagaaattaagggagcagctctctcaggccgaggcaatgaaggccccagaactgaaagaaaagttggaggagtcagaaaaactcatcaaagaattaacagtgacctgggaagagaaactgcgaaagaccgaggaaattgcccaagaacggcagaggcaattggagtcgatgggcatcagtctggaaatgtcaggtatcaaagtgggcgacgacaagtgttacctggtgaatcttaatgctgatcctgcactgaatgaactgcttgtctattatctaaaagatcatacgcgcgtgggcgccgatacaagtcaggatattcagctttttggcatcggaattcagccacagcactgcgagatcgacatcgcgtctgacggggatgtgacccttacccccaaggagaatgcccgatcctgtgttaacgggacccttgtctgctctacgacacaactgtggcatggggataggatcctctggggtaacaatcacttcttcagaatcaatctacctaaaaggaagcgacgagactggctgaaagatttcgaaaaagagacaggtccacccgagcacgacctagacgcggcttcggaggcttctagcgagcccgattataactatgagttcgctcagatggaggtgatcatgaagaccctgaacagcaatgatcccgtgcagaacgtggtgcaggttctggaaaagcagtaccttgaagagaaaaggagcgccctggaggagcagcggctcatgtacgagagagagttagagcagctcagacagcaactctcaccagatcggcaacctcaaagctccgggccagaccggctggcatactcatcccaaaccgcccagcagaaggtcacccaatgggcagaggagagagacgagctcttcaggcaaagcctggctaaactgcgggaacagttggtgaaagcaaatacactggtcagggaggcgaatttcctagctgaagaaatgagcaagcttaccgactaccaagtaacattgcagatccccgccgcaaacctatcagctaataggaaacgcggcgccatcgtgagcgagcctgcaatccaggtcaggaggaaaggcaaaagtacacaggtatggacgattgaaaagctggaaaacaagctgattgacatgcgcgacctatatcaggagtggaaagaaaaggtgccagaggcaaagaggctgtacggcaaacggggcgatccattctacgaggcgcaggagaaccataatcttataggtgtggctaatgtgtttctagaatgcctgttctgtgacgtgaagctgcagtacgctgtgcccatcatatcacagcagggcgaagtcgcaggacggctgcacgtggaggtgatgagggttaccggtgcagttcccgaacgggttgttgaggatgactcgagcgaaaactcgtctgaatcagggtccttggaagtcgtcgattctagtggtgaaattattcatcgggtgaagaagctgacgtgccgtgtcaagatcaaagaggccaccgggcttcccctcaacttgtccaattttgtgttttgtcagtacactttctgggaccaatgtgaatccaccgtcgcagccccagtggtggaccctgaggtgccaagtccacagtctaaggacgcacaatatactgtcaccttctcgcattgtaaagattacgtggtgaatgtaaccgaagagtttctggagtttatatctgacggtgcactcgccatcgaagtgtgggggcatcgctgcgcagggaatggatcgagcatctgggaggttgacagtcttcacgcgaagactagaacattgcacgatcggtggaatgaggtgactaggcgcatcgaaatgtggatcagtattctcgaacttaatgaacttggtgagtacgccgctgtggagttgcatcaagctaaggatgtcaacacaggcggtatcttccagttgaggcagggccactccagacgggttcaggttacggtgaagccagtgcagcacagcggtacgctccctctgatggtcgaggctattttatcagtgagcattggttgcgttacggcccgcagcacaaagctgcaacgcggtctcgatagctaccagagggatgacgaagacggcgacgacatggacagttaccaagaagaggatctgaattgtgtgcgcgaaaggtggagcgacgctctgataaaaaggcgcgaatacttagacgagcagattaagaaggtctccaataagacagagaagaccgaagatgatgtggagagagaagcccagctggtggaacaatgggtcggcctcacggaggagagaaacgctgtgttagtgcctgcgcccggcagcgggatcccaggggcgcccgcagactggatcccaccccccgggatggaaacccacattcccgtgctgtttttagacctcaacgctgacgacttatccgctaatgaacaactcgtcggcccacatgcgagcggcgtcaactcaatcctccctaaagaacatggctcacaattcttttatctccctataatcaagcattccgacgatgaggtctcagccaccgctagttgggactcgagcgtccatgactccgttcacttgaatcgagtcactccacaaaacgagagaatttacctgatcgtgaaaacaacagttcagctttcacacccggcggcgatggaactagtcttgaggaagcgtatcgccgctaacatttacaataagcagtcattcacccagagtctcaagcgcagaataagcctgaagaacatcttctatagttgtggggtcacttatgagattgttagcaacatcccaaaagccacagaagagatcgaggatcgcgaaacactcgcactgctcgcagctcggtcagagaacgaaggaacatctgacggcgagacctatatcgaaaagtacaccaggggagtccttcaggtggaaaacatcctgagcctcgagagactccgtcaagctgtgacagtaaaggaggctctttctaccaaagctcgacatattcgcagaagcttgtcaacccctaatgtgcacaacgtgagcagctccagacctgacttgtctggcttcgacgaggatgacaagggctggccagaaaatcagctggacatgtccgactattcctcttcttatcaggatgtagcctgttatggtactctcccacgagattcaccgcggagaaataaagaaggctgtaccagcgagacaccccatgcccttacagtgtcgccattcaaagcctttagccctcagccccctaagttcttcaaacccctcatgcctgtaaaggaggagcacaagaaacgcatagcgttagaggctcgcccgcttttgtcccaggaggatagtgaagaggaagagaacgaactggaggcaataaataggaagctgatatcctcccagccttacgtccccgtcgaattcgctgatttctctgtctacaacgctagcctcgaaaatagagaatggttcagttcaaaggtagacctttccaattccagagtgttggagaaggaagtgagcagatccccaaccacgagcagtattacttcaggttatttcagccattcagcctcaaacgcaaccttaagcgacatggtcgttcctagctccgactccagtgatcagcttgcaatccagacaaaggatgccgattcaacagagcactctacgccatcactcgtccacgacttcagacctagctcaaacaaggaactgaccgaagtggagaagggcctggttaaggacaaaattatcgtggtgcccttgaaggagaactcagcgcttgccaaggggtccccgagctctcaatccattccagaaaagaacagcaagagcctctgtcgcacgggcagttgttctgaactcgacgcatgccctagcaaaatctcccaacctgccagaggtttttgcccccgggaggtgactgtggagcatactaccaatatcctagaggatcactcttttaccgagttcatgggtgttagcgaggggaaagactttgatgggctcactgattccagtgcaggagagctgtcctccagacgaagcctaccaaacaagacaggcgggaaaaccgtgagtgacgggcttcatcacccgagtcagttacactctaaactagagaacgaccaggtaattattccggaggccgcattctgggtgctgtgctgtcaatag

SEQ ID NO: 41740 - DNA, 5831 bp, Artificial Sequence
  derived and/or modified sequence
cggccgcgctcgaggggcgcgcggctgcagcggcggcggcgccgcgcgtgaggggccgcctaaggccgagcgggcgcggcgagcggccgggcgagcgcagccaacatgtcggataccaaggtaaaagttgccgtccgggtccggcccatgaaccgacgagaactggaactgaacaccaagtgcgtggtggagatggaagggaatcaaacggtcctgcaccctcctccttctaacaccaaacagggagaaaggaggccaagtcaggtatttgcctttgattattgcttttggtccatggatgaatctaacactacaaaatacgctggtcaagaagtggttttcaagtgccttggggaaggaattcttgaaaaagcctttcaggggtataatgcgtgtatttttgcatatggacagacaggttcgggaaaatccttttccatgatgggccatgctgagcagctgggccttattccaaggctctgctgtgctttatttaaaaggatctctttggagcaaaatgagtcacagacctttaaagttgaagtgtcctatatggaaatttataatgagaaagttcgggatcttttagaccccaaagggagtagacagtctcttaaagttcgagaacataaagttttgggaccatatgtagatggtttatctcaactagctgtcactagttttgaggatattgagtcattgatgtctgagggaaataagtctcgaacggtagctgctaccaacatgaacgaagaaagcagccgctcccatgctgtgttcaacatcataatcacacagacactttatgacctgcagtctgggaattccggggagaaagtcagtaaggtcagcttggtagacctggcgggtagcgaaagagtatctaaaacaggagctgcaggagagcgactgaaagaaggcagcaacattaacaaatcgcttacaaccttggggttggttatatcatcactggctgaccaggcagctggcaagggtaaaagcaaatttgtgccttatcgagattcagtcctcacttggctgcttaaggacaacttggggggcaacagccaaacctctatgatagccacaatcagcccagccgcagacaactatgaagagaccctctccacattaagatatgcagaccgagccaaaaggattgtgaaccatgctgttgtgaatgaggaccccaacgcaaaagtgatccgagaactgcgggaggaagtcgagaaactgagagagcagctctctcaggcagaggccatgaaggcccctgaactgaaggagaagctcgaagagtctgaaaagctgataaaagaactaacagtgacttgggaagagaagctgagaaaaacagaagagatagcacaggaaagacaacgacaacttgaaagcatggggatttccctggagatgtccggtatcaaggtgggggatgacaaatgctacttagtcaatctgaatgcagaccctgctcttaacgaacttctggtttattatttaaaggatcacaccagggtgggtgcagatacctctcaagatatccagctttttggcataggaattcagcctcagcactgtgagattgacattgcatctgatggagacgtcactctcactccaaaagaaaatgcaaggtcctgtgtgaacggcacccttgtgtgcagtaccacccagctgtggcatggtgaccgaatcctatggggaaataatcacttttttagaataaacttacctaagaggaaacgtcgagattggttgaaagactttgaaaaagaaacgggcccgccagagcatgacctggatgcagccagtgaggcttcctctgaaccagactataactatgaatttgcacagatggaagttatcatgaaaaccctgaatagtaatgacccagttcaaaatgtggttcaggtcctggagaaacaatacctagaagaaaagagaagtgccctagaggagcagcggctcatgtatgagcgggaactggagcaactccgccagcagctctcccccgacaggcagccacagagtagcggccctgaccgcctggcctacagcagccagacagcgcagcagaaggtgacccagtgggcagaagagagggatgaactcttccgacaaagcctggcaaaactgcgagagcagctggttaaagctaataccttggtgagggaagcaaacttcctggctgaggaaatgagcaaactcaccgattaccaagtgactcttcagatccctgctgcaaacctcagtgccaataggaagagaggtgcaatagtgagtgaaccagctatccaagtgaggaggaaaggaaagagcacccaagtgtggaccattgagaagctggagaataaattaattgacatgagagacctttaccaagaatggaaggaaaaagttcctgaggcaaagagactctacggaaaacgaggtgaccctttctatgaagcccaagaaaatcacaacctcatcggggtggcgaatgtattcttggaatgcctcttctgtgatgtgaaacttcagtatgcagtccctatcatcagccagcagggggaggttgcagggcgtctccacgtggaagtgatgcgtgttacaggagctgttccagagcgtgtggtggaggatgactcttcggagaattccagtgaaagtgggagccttgaagtcgtagacagcagcggggaaatcattcaccgagtcaaaaagctgacatgtcgggtaaaaattaaagaagcaacggggctgcccttaaacctctcaaattttgtcttctgtcaatacacattctgggaccagtgtgagtctacggtggctgccccggtggtggaccccgaggtgccttcaccacagtccaaggatgcccagtacacagtgaccttctcccactgtaaggactatgtggtgaatgtaacagaagaatttctggagttcatttcagatggagcactggccattgaagtatggggccaccggtgtgctggaaatggcagctccatctgggaggtcgattctcttcatgctaagacaagaacactgcatgacaggtggaatgaagtaacgcgaagaatagaaatgtggatctccatattagaattgaatgagttaggagagtatgctgcagtggaacttcatcaggcaaaagatgtcaacacaggaggcatctttcaacttagacagggtcattcccgtagagtacaagtcacggtgaaacctgtgcagcattcagggacactgccacttatggttgaagccatcctgtcagtatccatcggctgtgtaactgccaggtccaccaaactccaaagagggctggacagttaccagagagatgatgaggatggtgatgatatggatagttatcaggaagaagacttaaactgcgtaagggagaggtggtcagatgcactcattaaacgacgagaatacctggatgaacagataaaaaaagtcagcaataaaacagagaaaacagaggacgatgtggagcgggaagcccagcttgtggagcagtgggtagggctgactgaggaaaggaatgctgtgctggtgccagccccaggcagtgggattcctggggcacctgccgactggatcccacctcctggaatggaaacccacataccagttctcttcctcgatttgaatgcggatgacctcagtgccaatgagcagcttgttggcccccatgcatccggcgtgaactccatcctgcccaaggagcatggcagccagtttttctacctgcccatcataaagcacagtgatgatgaggtttcagccacagcctcttgggattcctcggtgcatgattctgttcacttgaatagggtcacaccacagaatgaaaggatttacctaattgtgaaaaccacagttcaactcagccaccctgctgctatggagttagtattacgaaaacgaattgcagccaatatttacaacaaacagagtttcacgcagagtttgaagaggagaatatccctgaaaaatatattttattcctgtggtgtaacctatgaaatagtatccaatataccaaaggcaactgaggagatagaggaccgggaaacgctggctctcctggcagcaaggagtgaaaacgaaggcacatcagatggggagacgtacattgagaagtacactcgaggcgtgctgcaggtggaaaacattctgagtcttgaacggctccggcaggccgtcacagtcaaagaagcactttccaccaaagcccggcacattcggaggagcctcagtacaccaaatgttcataatgtctcttccagccgaccggacctttctggctttgatgaagatgacaagggttggccagagaaccagttggacatgtctgactatagctccagttaccaagatgtagcatgttatggaactttacccagggattctcctcgaaggaataaagaaggttgtacatcagagactcctcatgccttaaccgtcagcccttttaaagcattctctcctcagccaccaaagtttttcaagcccctaatgcctgtaaaagaggagcataagaaaaggatagccctggaagcaaggcctcttctaagccaggaggactctgaggaggaagaaaatgagctggaagctattaacaggaagctaataagttcacagccttatgtacctgtggagtttgctgacttcagtgtttacaatgccagcttggagaacagggaatggttttcctctaaagtagatctgtcaaactcacgggtcttggagaaagaagtgtcccgtagccctaccaccagcagtattaccagtggctacttttcccacagtgcctccaatgccaccctgtctgacatggtggtcccttctagtgacagctcagaccagctggccattcagacgaaggatgcagactccaccgagcactccacaccatcgcttgtgcatgatttcaggccgtcctcaaacaaagagttgacagaagtcgaaaaaggcttggtaaaggacaagataattgtggtgccactcaaggaaaacagtgccttagccaaagggagcccatcatcccagagcatccctgagaaaaactccaaatcactgtgcaggactggctcatgttcagaactagatgcctgccccagcaaaattagccagccagccaggggattctgccccagggaggtgacggtagaacacaccaccaacatccttgaagaccattctttcacagaatttatgggagtgtcagagggaaaagattttgatggtttgacagattcttctgctggagagctttccagtaggaggagtctaccaaataaaacaggcggcaagactgtctccgatgggctccaccaccccagccagctgcattccaagttagagaatgaccaggtaataattccagaggcagccttttgggttctgtgctgtcaatgagtatgtctaactgtatgtcaaccccagaggcccttcaccgcaacaacttggtaggaaagattcatccagttgtttgtgacagcaaagatgagcccacagagaagcaggctcacttcctgcacagctgtctctgtcggagagcaagtctgttttgggaactagaacgcaattgtgaaattataagaccagtggatttttttacctggcacatgggttggtgttgaatgaagtgttcagatggataaggatcaatctcatattcattccctgggatgtttagttaccagttttcccaaagtgttctggtagcatctaccatatttcatcaaatctgtgattcctttgattattatatgaaccattattttatgtatcattaagaaaaaatactgccaattaaactctgtcatatc

SEQ ID NO: 41741 - DNA, 5747 bp, Artificial Sequence
  derived and/or modified sequence
ccgggcgagcgcagccaacatgtcggataccaaggtaaaagttgccgtccgggtccggcccatgaaccgacgagaactggaactgaacaccaagtgcgtggtggagatggaagggaatcaaacggtcctgcaccctcctccttctaacaccaaacagggagaaaggaaacctcccaaggtatttgcctttgattattgcttttggtccatggatgaatctaacactacaaaatacgctggtcaagaagtggttttcaagtgccttggggaaggaattcttgaaaaagcctttcaggggtataatgcgtgtatttttgcatatggacagacaggttcgggaaaatccttttccatgatgggccatgctgagcagctgggccttattccaaggctctgctgtgctttatttaaaaggatctctttggagcaaaatgagtcacagacctttaaagttgaagtgtcctatatggaaatttataatgagaaagttcgggatcttttagaccccaaagggagtagacagtctcttaaagttcgagaacataaagttttgggaccatatgtagatggtttatctcaactagctgtcactagttttgaggatattgagtcattgatgtctgagggaaataagtctcgaacggtagctgctaccaacatgaacgaagaaagcagccgctcccatgctgtgttcaacatcataatcacacagacactttatgacctgcagtctgggaattccggggagaaagtcagtaaggtcagcttggtagacctggcgggtagcgaaagagtatctaaaacaggagctgcaggagagcgactgaaagaaggcagcaacattaacaaatcgcttacaaccttggggttggttatatcatcactggctgaccaggcagctggcaagggtaaaagcaaatttgtgccttatcgagattcagtcctcacttggctgcttaaggacaacttggggggcaacagccaaacctctatgatagccacaatcagcccagccgcagacaactatgaagagaccctctccacattaagatatgcagaccgagccaaaaggattgtgaaccatgctgttgtgaatgaggaccccaacgcaaaagtgatccgagaactgcgggaggaagtcgagaaactgagagagcagctctctcaggcagaggccatgaaggcccctgaactgaaggagaagctcgaagagtctgaaaagctgataaaagaactaacagtgacttgggaagagaagctgagaaaaacagaagagatagcacaggaaagacaacgacaacttgaaagcatggggatttccctggagatgtccggtatcaaggtgggggatgacaaatgctacttagtcaatctgaatgcagaccctgctcttaacgaacttctggtttattatttaaaggatcacaccagggtgggtgcagatacctctcaagatatccagctttttggcataggaattcagcctcagcactgtgagattgacattgcatctgatggagacgtcactctcactccaaaagaaaatgcaaggtcctgtgtgaacggcacccttgtgtgcagtaccacccagctgtggcatggtgaccgaatcctatggggaaataatcacttttttagaataaacttacctaagaggaaacgtcgagattggttgaaagactttgaaaaagaaacgggcccgccagagcatgacctggatgcagccagtgaggcttcctctgaaccagactataactatgaatttgcacagatggaagttatcatgaaaaccctgaatagtaatgacccagttcaaaatgtggttcaggtcctggagaaacaatacctagaagaaaagagaagtgccctagaggagcagcggctcatgtatgagcgggaactggagcaactccgccagcagctctcccccgacaggcagccacagagtagcggccctgaccgcctggcctacagcagccagacagcgcagcagaaggtgacccagtgggcagaagagagggatgaactcttccgacaaagcctggcaaaactgcgagagcagctggttaaagctaataccttggtgagggaagcaaacttcctggctgaggaaatgagcaaactcaccgattaccaagtgactcttcagatccctgctgcaaacctcagtgccaataggaagagaggtgcaatagtgagtgaaccagctatccaagtgaggaggaaaggaaagagcacccaagtgtggaccattgagaagctggagaataaattaattgacatgagagacctttaccaagaatggaaggaaaaagttcctgaggcaaagagactctacggaaaacgaggtgaccctttctatgaagcccaagaaaatcacaacctcatcggggtggcgaatgtattcttggaatgcctcttctgtgatgtgaaacttcagtatgcagtccctatcatcagccagcagggggaggttgcagggcgtctccacgtggaagtgatgcgtgttacaggagctgttccagagcgtgtggtggaggatgactcttcggagaattccagtgaaagtgggagccttgaagtcgtagacagcagcggggaaatcattcaccgagtcaaaaagctgacatgtcgggtaaaaattaaagaagcaacggggctgcccttaaacctctcaaattttgtcttctgtcaatacacattctgggaccagtgtgagtctacggtggctgccccggtggtggaccccgaggtgccttcaccacagtccaaggatgcccagtacacagtgaccttctcccactgtaaggactatgtggtgaatgtaacagaagaatttctggagttcatttcagatggagcactggccattgaagtatggggccaccggtgtgctggaaatggcagctccatctgggaggtcgattctcttcatgctaagacaagaacactgcatgacaggtggaatgaagtaacgcgaagaatagaaatgtggatctccatattagaattgaatgagttaggagagtatgctgcagtggaacttcatcaggcaaaagatgtcaacacaggaggcatctttcaacttagacagggtcattcccgtagagtacaagtcacggtgaaacctgtgcagcattcagggacactgccacttatggttgaagccatcctgtcagtatccatcggctgtgtaactgccaggtccaccaaactccaaagagggctggacagttaccagagagatgatgaggatggtgatgatatggatagttatcaggaagaagacttaaactgcgtaagggagaggtggtcagatgcactcattaaacgacgagaatacctggatgaacagataaaaaaagtcagcaataaaacagagaaaacagaggacgatgtggagcgggaagcccagcttgtggagcagtgggtagggctgactgaggaaaggaatgctgtgctggtgccagccccaggcagtgggattcctggggcacctgccgactggatcccacctcctggaatggaaacccacataccagttctcttcctcgatttgaatgcggatgacctcagtgccaatgagcagcttgttggcccccatgcatccggcgtgaactccatcctgcccaaggagcatggcagccagtttttctacctgcccatcataaagcacagtgatgatgaggtttcagccacagcctcttgggattcctcggtgcatgattctgttcacttgaatagggtcacaccacagaatgaaaggatttacctaattgtgaaaaccacagttcaactcagccaccctgctgctatggagttagtattacgaaaacgaattgcagccaatatttacaacaaacagagtttcacgcagagtttgaagaggagaatatccctgaaaaatatattttattcctgtggtgtaacctatgaaatagtatccaatataccaaaggcaactgaggagatagaggaccgggaaacgctggctctcctggcagcaaggagtgaaaacgaaggcacatcagatggggagacgtacattgagaagtacactcgaggcgtgctgcaggtggaaaacattctgagtcttgaacggctccggcaggccgtcacagtcaaagaagcactttccaccaaagcccggcacattcggaggagcctcagtacaccaaatgttcataatgtctcttccagccgaccggacctttctggctttgatgaagatgacaagggttggccagagaaccagttggacatgtctgactatagctccagttaccaagatgtagcatgttatggaactttacccagggattctcctcgaaggaataaagaaggttgtacatcagagactcctcatgccttaaccgtcagcccttttaaagcattctctcctcagccaccaaagtttttcaagcccctaatgcctgtaaaagaggagcataagaaaaggatagccctggaagcaaggcctcttctaagccaggaggactctgaggaggaagaaaatgagctggaagctattaacaggaagctaataagttcacagccttatgtacctgtggagtttgctgacttcagtgtttacaatgccagcttggagaacagggaatggttttcctctaaagtagatctgtcaaactcacgggtcttggagaaagaagtgtcccgtagccctaccaccagcagtattaccagtggctacttttcccacagtgcctccaatgccaccctgtctgacatggtggtcccttctagtgacagctcagaccagctggccattcagacgaaggatgcagactccaccgagcactccacaccatcgcttgtgcatgatttcaggccgtcctcaaacaaagagttgacagaagtcgaaaaaggcttggtaaaggacaagataattgtggtgccactcaaggaaaacagtgccttagccaaagggagcccatcatcccagagcatccctgagaaaaactccaaatcactgtgcaggactggctcatgttcagaactagatgcctgccccagcaaaattagccagccagccaggggattctgccccagggaggtgacggtagaacacaccaccaacatccttgaagaccattctttcacagaatttatgggagtgtcagagggaaaagattttgatggtttgacagattcttctgctggagagctttccagtaggaggagtctaccaaataaaacaggcggcaagactgtctccgatgggctccaccaccccagccagctgcattccaagttagagaatgaccaggtaataattccagaggcagccttttgggttctgtgctgtcaatgagtatgtctaactgtatgtcaaccccagaggcccttcaccgcaacaacttggtaggaaagattcatccagttgtttgtgacagcaaagatgagcccacagagaagcaggctcacttcctgcacagctgtctctgtcggagagcaagtctgttttgggaactagaacgcaattgtgaaattataagaccagtggatttttttacctggcacatgggttggtgttgaatgaagtgttcagatggataaggatcaatctcatattcattccctgggatgtttagttaccagttttcccaaagtgttctggtagcatctaccatatttcatcaaatctgtgattcctttgattattatatgaaccattattttatgtatcattaagaaaaaatactgccaattaaactctgtcatatcaa

SEQ ID NO: 41742 - DNA, 5313 bp, Artificial Sequence
  derived and/or modified sequence
atgtctgacaccaaggtgaaggtggccgtgcgggtgcggcccatgaacagaagagagctggagctgaacaccaagtgtgtggtggagatggagggcaaccagacagtgctgcaccccccacccagcaacaccaagcagggcgagcggcggcccagccaggtgtttgcctttgactactgcttctggagcatggatgagagcaacaccaccaagtatgccggccaggaggtggtgttcaagtgcctgggggagggcatcctggagaaggccttccagggctacaatgcctgcatctttgcctacggccagacaggcagcggcaagagcttctccatgatgggccacgccgagcagctgggcctcatcccccggctgtgctgtgccctcttcaagaggatcagcctggagcagaatgaaagccagaccttcaaggtggaggtgtcctacatggagatctacaatgagaaggtgcgggacctgctggaccccaagggcagccggcagagcctgaaggtgcgggagcacaaggtgctgggcccctacgtggatggcctgagccagctggccgtgaccagctttgaggacatcgagagcctgatgtctgagggcaacaagagcaggacagtggccgccaccaacatgaatgaggagagcagccgcagccatgctgtgttcaacatcatcatcacccagaccctgtatgacctgcagagcggcaacagcggggagaaggtgtccaaggtgtccctggtggacctggccggcagcgagcgggtgtccaagacaggagctgctggggagcggctgaaggagggcagcaacatcaacaagagcctgaccaccctgggcctggtgatcagcagcctggccgaccaggccgccggcaagggcaagagcaagtttgtgccctacagagattctgtgctgacctggctgctgaaggacaacctgggcggcaacagccagacctccatgattgccaccatcagccctgctgctgacaactatgaggagaccctgagcaccctgcgctatgctgaccgggccaagagaattgtgaaccacgctgtggtgaatgaagaccccaatgccaaggtgatccgggagctgcgggaggaggtggagaagctgcgggagcagctgagccaggccgaggccatgaaggcccctgagctgaaggagaagctggaggagagcgagaagctgatcaaggagctgactgtgacctgggaggagaagctgaggaagacagaggagatcgcccaggagcggcagaggcagctggagagcatgggcatcagcctggagatgagcggcatcaaggtgggagatgacaagtgctacctggtgaacctgaatgctgaccctgccctgaatgagctgctggtgtactacctgaaggaccacaccagggtgggcgctgacaccagccaggacatccagctgtttggaattggcatccagccccagcactgtgaaattgacatcgccagtgatggagatgtgaccctgacccccaaggaaaatgcccggagctgtgtgaatggcaccctggtgtgcagcaccacccagctgtggcatggagaccgcatcctgtggggcaacaaccacttcttccgcatcaacctgcccaagaggaagaggcgggactggctgaaggactttgagaaggagactggacctcctgagcatgacctggatgctgccagcgaggccagcagcgagccagactacaactatgaatttgcccagatggaggtgatcatgaagaccctgaacagcaatgaccctgtgcagaatgtggtgcaggtgctggagaagcagtacctggaggagaagaggtctgccctggaggagcagaggctgatgtatgaaagagagctggagcagctgcggcagcagctgagcccagaccggcagccccagagcagcggccctgaccggctggcctacagcagccagacagcccagcagaaggtgacccagtgggccgaggagagagatgagctgttccggcagagcctggccaagctgcgggagcagctggtgaaggccaacaccctggtgcgggaggccaacttcctggccgaggagatgagcaagctgacagactaccaggtgaccctgcagatcccagctgccaacctgagcgccaacaggaagagaggagccatcgtgtctgagcccgccatccaggtgcggaggaagggcaagagcacccaggtgtggaccatcgagaagctggagaacaagctgattgacatgagggacctgtaccaggagtggaaggagaaggtgcctgaggccaagaggctgtatggcaagagaggagaccccttctatgaggcccaggagaaccacaacctgattggagtggccaacgtgttcctggagtgcctcttctgtgatgtgaagctgcagtatgctgtgcccatcatcagccagcagggcgaggtggccggccgcctgcacgtggaggtgatgagggtgactggagctgtgcctgagcgggtggtggaggatgacagcagcgagaacagcagcgagagcggcagcctggaggtggtggacagcagtggagagatcatccaccgggtgaagaagctgacctgccgggtgaagatcaaggaggccaccggcctgcccctgaacctgagcaactttgtgttctgccagtacaccttctgggaccagtgtgagagcacagtggccgcccctgtggtggaccctgaggtgcccagcccccagagcaaggatgcccagtacacagtgaccttcagccactgcaaggactatgtggtgaatgtgacagaggagttcctggagttcatcagtgatggagccctggccatcgaggtgtggggccaccgctgtgctggaaatggcagcagcatctgggaggtggacagcctgcacgccaagaccaggaccctgcatgaccgctggaatgaggtgaccaggagaattgagatgtggatcagcatcctggagctgaatgagctgggggagtatgctgctgtggagctgcaccaggccaaggatgtgaacacaggaggcatcttccagctgcggcagggccacagcagaagagtgcaggtgacagtgaagcctgtgcagcacagcggcaccctgcccctgatggtggaggccatcctgtctgtgtccatcggctgtgtgacagcccggagcaccaagctgcagaggggcctggacagctaccagagagatgatgaagatggagatgacatggacagctaccaggaggaggacctgaactgtgtgcgggagcgctggagcgatgccctgatcaagagaagagagtacctggatgagcagatcaagaaggtgagcaacaagacagagaagacagaagatgatgtggagcgggaggcccagctggtggagcagtgggtgggcctgacagaggagagaaatgctgtgctggtgcctgcccctggcagcggcatccctggggccccagctgactggatccccccacctggcatggagacccacatccctgtgctcttcctggacctgaatgctgatgacctgagcgccaatgagcagctggtgggcccccacgccagcggcgtgaacagcatcctgcccaaggagcacggcagccagttcttctacctgcccatcatcaagcacagtgatgatgaggtgtctgccacagcctcctgggacagctctgtgcatgattctgtgcacctgaacagagtgaccccccagaatgaaagaatctacctgattgtgaagaccaccgtgcagctgagccaccctgctgccatggagctggtgctgaggaagagaattgctgccaacatctacaacaagcagagcttcacccagagcctgaagaggcgcatcagcctgaagaacatcttctacagctgtggggtgacctatgaaattgtgagcaacatccccaaggccacagaggagattgaagatcgggagaccctggccctgctggccgcccggagtgaaaatgaaggcaccagtgatggagagacctacatcgagaagtacacccggggcgtgctgcaggtggagaacatcctgagcctggagcggctgcggcaggccgtgacagtgaaggaggccctgagcaccaaggcccggcacatccgccgcagcctgagcaccccaaatgtgcacaacgtgagcagcagcaggccagacctgagcggctttgatgaagatgacaagggctggccagagaaccagctggacatgtctgactacagcagcagctaccaggatgtggcctgctacggcaccctgccccgggacagccccaggaggaacaaggagggctgcaccagcgagacccctcatgccctgactgtgagccccttcaaggccttcagcccccagccccccaagttcttcaagcccctgatgcctgtgaaggaggagcacaagaagagaattgccctggaggcccggcccctgctgagccaggaggacagcgaggaggaggagaatgagctggaggccatcaacaggaagctgatcagcagccagccctacgtgcctgtggagtttgctgacttctctgtgtacaatgccagcctggagaaccgggagtggttcagcagcaaggtggacctgagcaacagccgggtgctggagaaggaggtgagccgcagccccaccaccagcagcatcaccagcggctacttcagccacagcgccagcaatgccaccctgagtgacatggtggtgcccagcagtgacagcagtgaccagctggccatccagaccaaggatgctgacagcacagagcacagcacccccagcctggtgcatgacttccggcccagcagcaacaaggagctgacagaggtggagaagggcctggtgaaggacaagatcatcgtggtgcccctgaaggagaacagcgccctggccaagggcagccccagcagccagagcatccctgagaagaacagcaagagcctgtgcaggacaggcagctgcagcgagctggatgcctgccccagcaagatcagccagcctgcccggggcttctgcccccgggaggtgacagtggagcacaccaccaacatcctggaggaccacagcttcacagagttcatgggcgtgtctgagggcaaggactttgatggcctgacagacagcagcgctggggagctgagcagccgccgcagcctgcccaacaagacaggaggcaagacagtgtctgatggcctgcaccaccccagccagctgcacagcaagctggagaatgaccaggtgatcatccctgaggccgccttctgggtgctgtgctgccagtag

SEQ ID NO: 41743 - DNA, 5313 bp, Artificial Sequence
  derived and/or modified sequence
atgtctgacaccaaggtgaaggtggccgtgcgggtgcggcccatgaacagaagagagctggagctgaacaccaagtgtgtggtggagatggagggcaaccagacagtgctgcaccccccacccagcaacaccaagcagggcgagaggaagccacccaaggtgtttgcctttgactactgcttctggagcatggatgagagcaacaccaccaagtatgccggccaggaggtggtgttcaagtgcctgggggagggcatcctggagaaggccttccagggctacaatgcctgcatctttgcctacggccagacaggcagcggcaagagcttctccatgatgggccacgccgagcagctgggcctcatcccccggctgtgctgtgccctcttcaagaggatcagcctggagcagaatgaaagccagaccttcaaggtggaggtgtcctacatggagatctacaatgagaaggtgcgggacctgctggaccccaagggcagccggcagagcctgaaggtgcgggagcacaaggtgctgggcccctacgtggatggcctgagccagctggccgtgaccagctttgaggacatcgagagcctgatgtctgagggcaacaagagcaggacagtggccgccaccaacatgaatgaggagagcagccgcagccatgctgtgttcaacatcatcatcacccagaccctgtatgacctgcagagcggcaacagcggggagaaggtgtccaaggtgtccctggtggacctggccggcagcgagcgggtgtccaagacaggagctgctggggagcggctgaaggagggcagcaacatcaacaagagcctgaccaccctgggcctggtgatcagcagcctggccgaccaggccgccggcaagggcaagagcaagtttgtgccctacagagattctgtgctgacctggctgctgaaggacaacctgggcggcaacagccagacctccatgattgccaccatcagccctgctgctgacaactatgaggagaccctgagcaccctgcgctatgctgaccgggccaagagaattgtgaaccacgctgtggtgaatgaagaccccaatgccaaggtgatccgggagctgcgggaggaggtggagaagctgcgggagcagctgagccaggccgaggccatgaaggcccctgagctgaaggagaagctggaggagagcgagaagctgatcaaggagctgactgtgacctgggaggagaagctgaggaagacagaggagatcgcccaggagcggcagaggcagctggagagcatgggcatcagcctggagatgagcggcatcaaggtgggagatgacaagtgctacctggtgaacctgaatgctgaccctgccctgaatgagctgctggtgtactacctgaaggaccacaccagggtgggcgctgacaccagccaggacatccagctgtttggaattggcatccagccccagcactgtgaaattgacatcgccagtgatggagatgtgaccctgacccccaaggaaaatgcccggagctgtgtgaatggcaccctggtgtgcagcaccacccagctgtggcatggagaccgcatcctgtggggcaacaaccacttcttccgcatcaacctgcccaagaggaagaggcgggactggctgaaggactttgagaaggagactggacctcctgagcatgacctggatgctgccagcgaggccagcagcgagccagactacaactatgaatttgcccagatggaggtgatcatgaagaccctgaacagcaatgaccctgtgcagaatgtggtgcaggtgctggagaagcagtacctggaggagaagaggtctgccctggaggagcagaggctgatgtatgaaagagagctggagcagctgcggcagcagctgagcccagaccggcagccccagagcagcggccctgaccggctggcctacagcagccagacagcccagcagaaggtgacccagtgggccgaggagagagatgagctgttccggcagagcctggccaagctgcgggagcagctggtgaaggccaacaccctggtgcgggaggccaacttcctggccgaggagatgagcaagctgacagactaccaggtgaccctgcagatcccagctgccaacctgagcgccaacaggaagagaggagccatcgtgtctgagcccgccatccaggtgcggaggaagggcaagagcacccaggtgtggaccatcgagaagctggagaacaagctgattgacatgagggacctgtaccaggagtggaaggagaaggtgcctgaggccaagaggctgtatggcaagagaggagaccccttctatgaggcccaggagaaccacaacctgattggagtggccaacgtgttcctggagtgcctcttctgtgatgtgaagctgcagtatgctgtgcccatcatcagccagcagggcgaggtggccggccgcctgcacgtggaggtgatgagggtgactggagctgtgcctgagcgggtggtggaggatgacagcagcgagaacagcagcgagagcggcagcctggaggtggtggacagcagtggagagatcatccaccgggtgaagaagctgacctgccgggtgaagatcaaggaggccaccggcctgcccctgaacctgagcaactttgtgttctgccagtacaccttctgggaccagtgtgagagcacagtggccgcccctgtggtggaccctgaggtgcccagcccccagagcaaggatgcccagtacacagtgaccttcagccactgcaaggactatgtggtgaatgtgacagaggagttcctggagttcatcagtgatggagccctggccatcgaggtgtggggccaccgctgtgctggaaatggcagcagcatctgggaggtggacagcctgcacgccaagaccaggaccctgcatgaccgctggaatgaggtgaccaggagaattgagatgtggatcagcatcctggagctgaatgagctgggggagtatgctgctgtggagctgcaccaggccaaggatgtgaacacaggaggcatcttccagctgcggcagggccacagcagaagagtgcaggtgacagtgaagcctgtgcagcacagcggcaccctgcccctgatggtggaggccatcctgtctgtgtccatcggctgtgtgacagcccggagcaccaagctgcagaggggcctggacagctaccagagagatgatgaagatggagatgacatggacagctaccaggaggaggacctgaactgtgtgcgggagcgctggagcgatgccctgatcaagagaagagagtacctggatgagcagatcaagaaggtgagcaacaagacagagaagacagaagatgatgtggagcgggaggcccagctggtggagcagtgggtgggcctgacagaggagagaaatgctgtgctggtgcctgcccctggcagcggcatccctggggccccagctgactggatccccccacctggcatggagacccacatccctgtgctcttcctggacctgaatgctgatgacctgagcgccaatgagcagctggtgggcccccacgccagcggcgtgaacagcatcctgcccaaggagcacggcagccagttcttctacctgcccatcatcaagcacagtgatgatgaggtgtctgccacagcctcctgggacagctctgtgcatgattctgtgcacctgaacagagtgaccccccagaatgaaagaatctacctgattgtgaagaccaccgtgcagctgagccaccctgctgccatggagctggtgctgaggaagagaattgctgccaacatctacaacaagcagagcttcacccagagcctgaagaggcgcatcagcctgaagaacatcttctacagctgtggggtgacctatgaaattgtgagcaacatccccaaggccacagaggagattgaagatcgggagaccctggccctgctggccgcccggagtgaaaatgaaggcaccagtgatggagagacctacatcgagaagtacacccggggcgtgctgcaggtggagaacatcctgagcctggagcggctgcggcaggccgtgacagtgaaggaggccctgagcaccaaggcccggcacatccgccgcagcctgagcaccccaaatgtgcacaacgtgagcagcagcaggccagacctgagcggctttgatgaagatgacaagggctggccagagaaccagctggacatgtctgactacagcagcagctaccaggatgtggcctgctacggcaccctgccccgggacagccccaggaggaacaaggagggctgcaccagcgagacccctcatgccctgactgtgagccccttcaaggccttcagcccccagccccccaagttcttcaagcccctgatgcctgtgaaggaggagcacaagaagagaattgccctggaggcccggcccctgctgagccaggaggacagcgaggaggaggagaatgagctggaggccatcaacaggaagctgatcagcagccagccctacgtgcctgtggagtttgctgacttctctgtgtacaatgccagcctggagaaccgggagtggttcagcagcaaggtggacctgagcaacagccgggtgctggagaaggaggtgagccgcagccccaccaccagcagcatcaccagcggctacttcagccacagcgccagcaatgccaccctgagtgacatggtggtgcccagcagtgacagcagtgaccagctggccatccagaccaaggatgctgacagcacagagcacagcacccccagcctggtgcatgacttccggcccagcagcaacaaggagctgacagaggtggagaagggcctggtgaaggacaagatcatcgtggtgcccctgaaggagaacagcgccctggccaagggcagccccagcagccagagcatccctgagaagaacagcaagagcctgtgcaggacaggcagctgcagcgagctggatgcctgccccagcaagatcagccagcctgcccggggcttctgcccccgggaggtgacagtggagcacaccaccaacatcctggaggaccacagcttcacagagttcatgggcgtgtctgagggcaaggactttgatggcctgacagacagcagcgctggggagctgagcagccgccgcagcctgcccaacaagacaggaggcaagacagtgtctgatggcctgcaccaccccagccagctgcacagcaagctggagaatgaccaggtgatcatccctgaggccgccttctgggtgctgtgctgccagtag

SEQ ID NO: 41744 - DNA, 5313 bp, Artificial Sequence
  derived and/or modified sequence
atgagcgacaccaaggtgaaggtggccgtgcgggtgcggcccatgaaccgcagagaactggagctgaacactaagtgcgttgtggaaatggagggtaatcagaccgtcctgcacccaccgccatcgaacactaagcaaggcgaacggaggccatctcaagtgttcgctttcgactactgtttctggtcgatggacgagtccaacaccacgaaatacgctggccaagaggtcgtcttcaagtgtctgggggaaggaattctcgaaaaagcctttcaagggtataatgcctgtattttcgcatatggccagactgggtctggaaagagtttctcgatgatgggccacgccgagcagttgggccttattccaagactgtgttgcgctctgtttaaacgcatcagtttagagcaaaacgaatcccaaacattcaaggtggaagtttcttatatggagatatataatgagaaggtgcgggatctattggacccgaagggatcacgccagagtctcaaagtgcgggagcacaaggtcttgggaccctacgtggacggcctgtcgcagcttgctgtgacctcattcgaggacatagagtcactgatgtcagaggggaacaaatccagaaccgtggccgcgacgaatatgaacgaagaatcttctcgctctcacgctgtgtttaatatcataattacccagacgctgtatgacctccagtcaggaaactctggcgaaaaggttagcaaggtatctctggttgatttggccgggtccgaacgggtctctaaaaccggagctgccggcgagaggctgaaagaaggtagcaatattaataaatcgcttaccacacttggtcttgttataagttctctcgccgatcaggcagcaggaaagggcaaatcaaagtttgttccttatcgggactctgtacttacctggctcctgaaggataatcttgggggaaatagtcagacgtccatgattgccaccattagccctgccgcggacaattacgaggaaaccttgtcaacactgaggtatgcagaccgggccaagcggattgtgaatcatgcagtagtaaatgaagatccaaacgccaaggtgattagggaactaagggaggaggtggagaagcttcgggagcagctatcacaagccgaggccatgaaggcccccgagctaaaggagaaactggaagagtccgagaagctcatcaaggagcttacagtgacctgggaagagaagctgcgcaagacagaggagatcgctcaggagcgccagaggcagttagagagcatgggcatcagcctggagatgagtggtataaaggtcggggatgataaatgttatcttgtcaatctgaacgcggatcccgctttgaatgagctgttggtatactaccttaaagatcatacaagagtgggcgctgatacctcccaagatattcagctgttcgggatagggatccaaccccaacattgcgaaattgatatcgcttcagatggagatgtgaccttgacccccaaagaaaatgctaggtcctgcgtcaacggaacgctggtatgttcaacaactcagctgtggcatggggacaggatcctctgggggaataaccatttctttcggatcaacctacccaagcgtaaacgcagagattggttaaaggacttcgaaaaagaaacgggtcctcccgaacatgacttggacgctgctagcgaagcctctagtgaacccgattacaattacgagtttgcgcagatggaggtcatcatgaagacattgaattcaaatgatccagtccagaacgtcgttcaggtcctggaaaagcaatacctggaagagaaacgcagcgctctggaagaacaacggctaatgtatgaacgggagctcgaacagctcaggcagcagctgtctcctgaccgccagccccagagctctggtcctgaccgcctcgcgtatagctcccagacagctcagcagaaggttacacaatgggcggaggagcgcgatgagcttttccgtcagtctttggccaagttacgggaacagctggtcaaggccaacacattagtacgggaagccaactttctcgcagaggaaatgagcaaactcaccgattatcaggttacactgcaaatccctgcagccaatctgagcgcgaataggaaacgcggagcgattgtctcagagcccgcaatccaagtgcggagaaagggcaagtcaacccaggtgtggacaattgaaaagttagagaacaagctcatagacatgagagacctgtaccaggagtggaaggagaaggtacccgaggctaaacgtttgtacggcaagaggggggatcccttttacgaggcccaggaaaaccacaacttgatcggcgtggcaaacgtgtttctggagtgtcttttctgcgacgtgaaactgcagtacgccgtgcctatcattagccagcagggcgaagtggccgggcggctgcatgtggaagtgatgcgggtcaccggagcagtgcctgaacgcgtggtggaggacgattccagcgaaaactcttccgagtcaggatccttggaggttgtggatagctccggagaaatcatccaccgggtcaaaaaactgacctgtagggtgaagatcaaagaagccaccggcctgccgcttaacttgagcaactttgttttctgtcagtataccttctgggatcagtgtgaatctaccgttgcagcgcctgtggtggatcccgaggtgcccagtccccagtctaaagacgcacagtacacagtgacttttagtcactgtaaggattatgtcgtgaatgtcaccgaagaattcctggagtttattagtgatggcgcacttgccattgaggtgtggggccacagatgcgccggaaacgggagttcaatatgggaagtggacagcctccacgccaaaacgcgcactcttcacgatagatggaatgaagtgacccggcgtatcgagatgtggattagtatactggagctgaatgaactgggggaatacgctgccgtcgagctgcatcaagccaaagatgtgaatacaggagggatctttcaactgcgccagggccacagccgacgcgtccaagttactgttaagccagtgcagcattcaggaaccttgcctctgatggtggaggctatcctgagtgtttctatcggatgcgtgaccgcccggtctaccaaactccagcgtggattggactcttaccagcgagatgatgaggacggggatgacatggatagctaccaggaggaggacctgaattgtgtgcgcgagcgctggtctgatgcgctaattaaacggagggaatatctggatgagcagatcaaaaaagtgagcaacaaaaccgagaagaccgaggatgacgtagagagggaagcccagctcgtggaacaatgggtgggccttaccgaagaaaggaatgcagtcctcgtgccggctcctggctctggtatccccggcgcgccagctgactggattccgccccccgggatggaaacccatatccctgttctcttcctcgacctgaacgctgatgatttaagtgccaacgagcagctggtgggtcctcacgctagcggcgtcaacagtattcttccaaaggaacacggtagtcaatttttctatttgcctattattaaacattctgatgacgaagtgtccgccaccgctagttgggacagcagcgtgcacgatagtgtacacctgaatagggtcacccctcagaacgaaaggatttatctgatagttaagactaccgtccagctgtctcatcccgcggccatggaactggtgctgcgcaaacgcatcgcggccaatatctataacaagcagagctttacccaaagcctgaagcggcgtatcagtctgaagaacattttctattcctgcggcgtcacctacgagatcgtctcaaacattcccaaagcaacagaggaaatagaggacagggaaacactcgccctgctcgctgccaggagcgaaaacgaaggtacctcagatggagagacctatatagagaagtacaccagaggggttctgcaggtcgaaaacattttgtcccttgaacggttgcgccaggccgtcaccgtgaaagaggcactttccacgaaagcaaggcacattcgaagaagcctaagcactccaaatgttcacaatgtctcctcttctcgccccgatctgtctggctttgatgaagatgacaagggatggccggaaaaccagctcgatatgtctgattactctagcagctaccaagacgtggcatgttatggaaccctacctcgggattccccgcgtaggaacaaagaaggctgtaccagtgaaactcctcatgcactgaccgtttcaccgtttaaggctttcagcccccagccgccaaaattcttcaaaccgctcatgccagtgaaagaggagcataagaaacggattgctctggaagccagaccactcctgtctcaggaggattctgaagaagaagagaatgaactcgaagcaatcaaccggaagttgatcagctcacaaccctacgtccctgtcgagtttgccgatttttcagtatataacgcctctcttgaaaatcgcgaatggtttagctcaaaggtagatctgtcaaactctcgagtacttgaaaaggaggtgtcccgctctcctaccaccagctccatcacctccggatattttagccacagcgcctctaacgcaacccttagtgatatggtcgtgccatcgtctgattctagtgatcagctggcaattcagacaaaagacgccgactcaacagagcactccacaccgtctctagtacacgactttaggccttcctcaaacaaagagttgactgaggtggagaaggggctggtcaaggacaagataattgtcgtacctctaaaagagaattctgccctggccaagggctcgccctctagtcagagtattcccgagaaaaattccaagtctttgtgtagaacagggagttgctcagagctggacgcttgcccctcgaagatctcgcagcccgcacgcggtttctgtcctcgcgaggtcaccgttgaacatactaccaacattcttgaagaccatagttttaccgagttcatgggagtgagcgagggcaaagatttcgatgggctcaccgattcgagcgcaggggaactgtctagccgccggtctcttcccaataaaacgggcggcaagaccgtatcagatggccttcaccatcccagccaattgcattctaagctcgagaatgatcaggtgatcataccagaggcagcattctgggtgctgtgctgtcagtag

SEQ ID NO: 41745 - DNA, 5313 bp, Artificial Sequence
  derived and/or modified sequence
atgagcgacaccaaggtgaaggtggccgtgcgggtgcggcccatgaataggagggaactcgagcttaacaccaagtgcgtggtcgagatggagggcaaccagaccgtactgcacccacccccttccaatactaaacagggcgaaaggaagcctccaaaggtgtttgcattcgactactgcttctggtctatggatgagtcaaatacaactaaatacgcgggccaggaggtggttttcaagtgcctaggcgaaggaattctggaaaaggctttccagggctacaacgcctgcatctttgcgtatgggcaaacaggatcaggtaagagcttttccatgatgggccacgccgagcagctgggactgattcccagactgtgttgcgctcttttcaagcgcataagcctggagcagaatgagtcacaaacctttaaagtagaggtgtcatacatggagatatacaatgaaaaagtgagggatcttctggacccaaaaggatcacgtcagtccctcaaggtcagggagcacaaggtcctcggcccttatgtggacggcctttcacagttggctgtgacttcattcgaggacattgagtcactgatgtcggaaggcaacaaatctcgaactgtcgccgcgaccaacatgaatgaagaatcatctcgctcccacgccgtcttcaatatcattattactcagacgttgtatgacctgcaatccggtaattcaggtgaaaaagtgtccaaggtctctttggtcgatctagcaggttctgagagggtcagtaagacaggcgccgccggtgagagactgaaggagggatcaaatatcaataagagtctaaccacactcggattagttatcagcagcctagccgaccaggcggccggcaaggggaagtccaaatttgtcccataccgtgattccgttctaacttggctcctcaaggacaatctcggggggaactcccagactagcatgatagctactataagccctgcagcagacaactatgaagaaacactgagtaccctgcggtacgccgatcgtgcaaagcgcattgtgaatcacgcggtagtaaatgaggatcctaacgcaaaagtgattagggagctgagggaggaagtggagaaactccgcgagcagttatctcaggcggaggcgatgaaagcaccagaactcaaggagaaattagaggagagcgagaagctgatcaaagagttgaccgtgacatgggaagagaagctgcgcaagacagaggagattgcacaggagcgccagcgacagctggaatccatggggatttctcttgagatgtcgggcattaaggtaggtgatgataaatgttatcttgtaaatctaaacgcagatcctgcccttaacgagcttttggtgtattatctgaaggatcatacacgtgtgggggctgacacatcacaggacatccagctgttcggtatcggaatccagccccagcattgcgagatcgacatcgcctccgatggtgatgtgaccctcactccgaaagagaacgccaggtcctgcgtgaacgggaccctcgtgtgcagtaccacgcagttatggcacggcgaccggatcctctggggcaataaccacttctttcgaataaacctccctaaacgtaagagacgcgactggctgaaggactttgagaaagaaactgggcccccagagcacgacctggatgccgctagcgaggcgagttccgagcccgattacaactacgagtttgcccagatggaggtgatcatgaagaccctgaattcgaacgacccagtacagaacgttgttcaagttctagagaagcaatacctggaggagaagcgctccgccctcgaggagcaacgccttatgtacgagagggaactagagcagttacgacagcagttgtctcccgaccgccaaccacagtcttctggaccagacaggttggcttactcctctcagacagctcagcagaaagtaacccagtgggccgaagaacgggacgagcttttcaggcagtctctcgctaaattgagagaacagctagtgaaggctaacaccttggtgagggaggccaacttcctggcggaagaaatgagcaaactgaccgactatcaagttacgctgcaaatcccagctgccaacttgagtgccaatagaaagaggggagctatcgtgtccgaacccgctattcaagtgcgacggaagggcaagtcaactcaggtgtggactattgagaaactggaaaataagctgattgacatgcgcgatctctaccaggagtggaaagagaaggtgcccgaggcaaaacgcctttacggaaagcggggggacccattttacgaagcgcaggaaaatcataaccttatcggtgtcgccaatgtgttcctggagtgtctgttttgtgacgtaaagttgcaatatgcagtccccattatttcccaacagggcgaggtggctggccggcttcatgtggaggtgatgagagttacaggagctgtgcccgagcgagtggtcgaggacgatagcagtgagaattcttccgagtccggctctttggaggtggtcgattcttccggcgagattatccatcgcgtgaaaaaactcacgtgtagagtgaaaattaaggaggctaccgggctgccactaaacctctcgaacttcgtgttctgtcagtataccttctgggaccaatgtgagtccaccgtggcagccccagtggtggaccccgaggtcccatcaccacagtcgaaagacgcccagtacactgtcacattctcacactgtaaagactacgtcgtcaatgttaccgaggaatttctggaatttatctctgacggtgccctggccattgaagtgtggggccacaggtgtgccgggaacgggagctctatttgggaagtggattctcttcacgcaaagacccgtactctgcacgacaggtggaatgaggtgacccgcaggattgagatgtggatcagtattctcgagcttaacgagctgggcgagtacgctgccgttgagttgcaccaagctaaggacgttaacaccggcggcatattccagttgcgccaagggcactctcgtagggtccaggtgaccgtgaaaccagtccagcattccggaacccttcccctgatggtggaggcgatactctccgtgagcatcggctgcgtgactgcaagatctaccaaactgcaacggggacttgactcataccagcgcgatgacgaggacggcgacgacatggatagctatcaagaagaagacctgaactgtgtgagagagcggtggagtgacgccctaatcaagagaagagaatatctggatgaacagattaaaaaggtttctaataagacagagaagaccgaagatgatgtcgagcgggaagcccagctggtggagcagtgggtggggctcaccgaagaaagaaatgctgtcctagtaccggcccccgggagtgggatccccggagcaccagccgactggattcctccccctggaatggaaacacacatcccggtgctgttcctggaccttaacgctgacgatcttagcgccaatgaacaactcgtaggccctcatgcttcgggggtgaactccatactgcctaaagagcacggaagtcagtttttctacctgcctattatcaagcattccgatgatgaagtgagcgcaacggcatcctgggattcgagtgtgcatgactcagttcatctgaaccgcgtgactccacagaacgagagaatctatctgattgtgaagacaacagtgcagctctcccaccccgctgcaatggaattggtccttaggaagcgaatcgccgccaatatctataacaagcagagttttacccagtctctcaagcggcgcatttcattaaagaatattttctactcctgcggagtgacatatgaaattgtctccaatatccccaaagccactgaagaaattgaggatcgggagactctggctttattggccgcgcgctccgaaaatgaggggaccagcgacggtgaaacttacattgaaaagtatactaggggagtgctgcaggtcgagaacatcctgtctttagaacgcttgaggcaagccgtgacggtgaaagaggccctatctacaaaagctaggcacatacgacgctcactcagtacacctaacgtccataacgtctcctcatccagacctgacctttcaggatttgacgaggacgataaaggttggccagagaatcagttggacatgtctgattatagcagctcttatcaggacgtggcttgctacggcaccctgcctcgtgactcccctaggcgcaacaaggagggctgcacgagtgagactcctcacgcattgaccgtatcgccgtttaaagcattttcaccacagccacccaagttctttaaacccctgatgccagtgaaagaggaacacaaaaagagaattgcactggaggctagacccctcctaagccaggaggattcagaagaggaggagaacgagctggaggccatcaatcggaagttgatctcaagccagccttatgttccggtcgaatttgctgatttcagtgtttacaacgccagcctggaaaatagggaatggttcagttccaaggtagatctgtccaattccagagttttggagaaggaggtcagcaggtctcctaccacatcgagcataacaagtggatatttctcccacagtgcttcaaatgctacgttatcagacatggtcgtgcccagctcagattcgagtgaccagctggctatacagacaaaagatgctgattccacagagcactccaccccatctttggtgcacgatttccgcccttcaagcaataaggagctcacagaggtcgagaaaggtctggtgaaagataaaatcatcgttgttccgctgaaggaaaattccgcccttgctaaaggatcccctagttctcaatctattcctgaaaagaatagcaagtccctgtgtagaaccgggtcttgctccgagctggacgcatgccccagcaagatctcacagccagctaggggtttctgtcctcgggaggtgaccgtcgagcatacaaccaacatactggaggaccacagcttcaccgaatttatgggtgtcagcgaggggaaagactttgacggcctcacagatagcagcgctggagaattgtctagcagaagatctctacctaataagactgggggaaagacagtctctgacggtcttcaccacccctcacagttgcatagtaagcttgaaaacgaccaggtgatcattccagaagccgccttctgggtgttatgctgccaatag

SEQ ID NO: 41746 - DNA, 5312 bp, Artificial Sequence
  derived and/or modified sequence
atgtccgatacaaaagtgaaggttgcggtccgcgtgcgtcccatgaatcggagagagctggaactcaatacaaagtgtgtcgtggagatggaagggaaccagacagtacttcatccacccccaagtaacacgaaacaaggtgaacgcaggccaagtcaggtcttcgcctttgactactgcttttggagtatggacgagtcaaataccacaaagtacgccggacaggaagtggtttttaaatgcctaggcgaggggatcctcgagaaggcgttccaaggctacaacgcttgcattttcgcgtacggacagacaggaagcgggaagtccttttcgatgatgggtcatgctgagcaattagggttaatcccacggctctgctgtgctctgttcaagcgcatctccctagagcagaatgagtcacagacatttaaggtggaagtgtcatatatggagatctacaacgaaaaggtacgcgacctgctggatcccaaggggtccagacagagcctcaaggtgagggagcataaggtgttaggaccatatgtggacggactcagtcagctggcagtgacaagtttcgaagacattgagtcacttatgtctgaaggaaacaaaagccgcacagttgctgccacgaacatgaacgaagaatcctctcggagtcatgctgtattcaatattataattactcagaccctttatgacctccagtccggcaacagtggggaaaaggtctctaaagtcagtctggtggatcttgcgggatcagaacgagtcagtaagactggggctgcaggcgaaagactgaaagaaggttccaatatcaacaagtcactcacaactctgggtctggtcatctctagtcttgctgaccaggctgctggaaagggaaagtcaaagttcgtcccctacagggacagcgttctgacgtggctgcttaaagataatctgggcggaaatagccagactagtatgattgctaccatatctcccgcagctgataattatgaggagaccctttcgaccttacgttatgcagatcgcgcaaagcgtatagtgaatcacgccgttgtgaatgaggatcccaacgcaaaagttattcgcgagctccgcgaggaagtggagaagttacgggagcaactttcacaggcagaagctatgaaggccccagagctgaaggaaaaactagaggagtccgagaagctcataaaggaattaaccgtcacatgggaggaaaaattaagaaagacagaggagatcgcccaagagagacaaaggcagcttgagtccatgggcatctccctcgagatgagcggcattaaggtgggagacgacaagtgctatctggtcaaccttaacgccgaccccgctctgaacgaattgctcgtgtattacctgaaggaccatactcgtgtgggggcagacacaagtcaggatatccagctctttggaattggcatccaaccccagcactgcgagatcgatatcgcaagcgatggtgatgtaacgttgactccaaaagagaacgcacgctcttgtgtgaatggaactctggtctgcagtacaacccagctgtggcatggcgacaggattttgtggggaaacaaccacttcttcagaatcaatctacccaaacgtaagagaagggactggctgaaagatttcgaaaaggagacagggcctcccgagcatgatctggacgctgcttccgaggcatctagcgaaccggattataattatgaatttgctcagatggaagtgatcatgaagaccctgaatagtaacgacccagttcagaatgttgtgcaagtcttggagaaacagtatctagaggaaaaacggagtgcactagaggagcagaggcttatgtacgagcgggagcttgagcaattgcggcagcagctgagtcctgaccgacagccccagtccagcgggccagacagactggcttactccagccagactgctcagcagaaggtaactcagtgggctgaagagagagacgaattgtttcggcagtcactcgctaagctccgcgagcagttggtgaaggcgaacacactggttcgagaagctaacttcctggctgaagaaatgagtaagctcaccgattatcaggttacactgcagataccggcagctaacttgagcgccaaccgaaagcggggagctatagtgtccgagcccgctatccaggtgcgacgtaagggcaagtccacccaggtgtggacaatcgagaagttggaaaacaagcttatcgatatgagggatctttatcaggaatggaaagaaaaggttccagaggctaagcgcctttacggaaagagaggggaccctttttatgaggctcaagagaaccacaacttgatcggagtggccaacgttttcctcgagtgcctcttctgcgatgttaagcttcagtatgccgtccccatcatctcgcagcaaggggaggtggcgggtagactgcacgttgaagtcatgagggtgacaggtgccgttcctgaacgggtggtggaggacgactcctctgagaacagttcagagtccgggtcattggaggtggtggactcatctggtgaaataatccaccgggtgaaaaagctgacatgccgggtcaagatcaaggaagcaactggtctgccgctgaacttgtccaacttcgtcttttgtcagtacacgttttgggatcagtgtgaatcaaccgtggccgcacctgtcgtggaccctgaggtgcctagtcctcagtcgaaggatgcccaatacacagtgactttttcgcattgtaaggactatgttgtgaatgtcaccgaagagttccttgagttcatttccgacggcgcattggccatcgaggtatggggacatcgctgcgctggcaacgggtcctctatctgggaggtcgatagcctgcatgctaagactaggactctgcatgaccgctggaatgaggttactaggcggatcgagatgtggatttccatccttgagctgaacgaactgggagaatatgccgctgtggagctccaccaggccaaggacgttaacacaggcggtatcttccaacttcggcagggccattcaagacgagtgcaagtcaccgtaaaacccgtgcagcattcggggactctcccgcttatggtggaagctatcctgtctgtgtctatcggctgcgtgacagcacgtagcactaagctgcagaggggtctggactcttatcaaagggatgacgaagacggcgatgacatggactcttaccaagaggaggacctgaattgtgttagagaaagatggagtgacgctctgatcaaaaggcgcgaatatctggatgagcagattaagaaggtgagcaacaagaccgagaagaccgaggatgacgtcgagagagaggcccagctagttgagcagtgggttggactgacagaggaacggaatgctgtacttgtgcctgcaccaggaagcggcattccaggggctcccgcagattggatcccgcctcccggtatggagacccacatacccgtcctgttcctggatcttaacgccgacgacctgtccgccaatgagcagctggtcggcccacacgcatctggggtgaattctattctacccaaagagcacgggagtcagttcttttatctgcccattattaagcattccgatgatgaggtatccgcaacagcaagctgggactcgtctgtccacgattccgtacatctgaaccgcgtcacaccccagaatgagcggatttatctgattgtgaaaacaactgtccagctttcacacccagcggcaatggaattggtcctccgcaaacgcatcgcagccaacatatacaacaagcaatcctttacccaatcccttaaaagaaggatcagcctcaagaacattttctattcatgtggagtgacctacgaaatcgtttcaaacatccctaaggcgactgaggaaattgaggacagagagaccctcgcccttctcgctgcaaggtccgaaaatgagggaacgagcgatggggaaacttatatcgaaaagtacacccgaggcgtgctgcaggtggagaacatcttgtcactggagaggttgcgccaggctgtcaccgtaaaagaggccctgtcgacgaaggccagacacatccgcagatctctgagcaccccgaatgtgcacaacgtgagcagcagcagacctgacttgtctgggttcgatgaggatgacaaggggtggccggaaaaccaactagatatgagcgactatagcagttcataccaggatgtagcctgttacggaaccctaccgagggatagcccacgcaggaataaagagggctgcacaagcgaaacaccccatgcactgacagtcagcccttttaaagccttttccccccagccccctaaattctttaagcccctaatgccagtcaaagaggaacacaagaaacgtattgccctcgaggcacggccattactcagccaggaggattccgaagaggaggagaatgaactcgaagctatcaatcgcaagcttatctcttctcagccgtatgtgcctgtggagtttgccgatttctcagtgtacaacgcttccctggaaaatagagaatggtttagcagtaaggtggacctgagcaatagcagggtgctggagaaggaggtgagccgatctccaacgacaagcagtattacgtcaggctacttctcccacagcgcgtctaacgctacactgtcagacatggtagtgccttcctctgacagctccgatcagctcgcaattcagacgaaggatgcagactctacagagcactctacaccatcactggtccacgactttcgaccaagctcaaataaagaactaaccgaggtcgaaaaagggctcgtgaaagacaaaataatagtcgttccactgaaagagaactccgctttagctaaaggctcaccaagtagtcaatcaatacctgagaaaaactccaaaagcctgtgccgtacaggatcatgcagtgaactcgacgcgtgtccatcaaagatctcccagcccgcacggggattctgcccgcgtgaggtcaccgttgagcacacaacaaacatactggaggaccatagctttaccgagttcatgggggttagtgaggggaaggactttgacggcctaacggattcttcagcaggcgagctgtcttcacgaaggtctctcccgaacaaaaccgggggaaaaacggttagtgatgggctgcaccacccatcccagctgcactctaaactggagaatgatcaggtgattatccccgaagctgcattctgggtactgtgttgtcagta

SEQ ID NO: 41747 - DNA, 5312 bp, Artificial Sequence
  derived and/or modified sequence
atgagcgataccaaagtcaaagtagcagttcgggtaaggccgatgaaccgcagagagctggaactcaatacaaagtgcgtcgttgagatggaaggaaaccaaactgtcctgcatcccccaccctccaatactaaacagggggagcgaaagccccctaaagtgttcgcctttgactactgcttctggtccatggacgagtcaaacacaacaaaatacgcaggacaggaggtggtattcaagtgcctcggggagggcatcctggaaaaagccttccaaggctacaatgcatgcatctttgcttatgggcagactggatctgggaagtcattctccatgatgggccatgctgaacagctcggtttgattcctcgtctgtgttgcgcactgttcaaacgcatttcgctggagcagaacgagtctcagacattcaaggtggaagtgtcctacatggagatttacaatgagaaggtgcgagacctgctggatccaaaaggctcacgccagagcctgaaagtgagagagcacaaagttctgggtccatatgtagatggactctcacagctggccgtgaccagcttcgaagacatcgagagcttgatgtccgaagggaataaatctagaacagttgctgcaacaaacatgaatgaagagtcctcaagatctcacgcagtgtttaatatcatcatcacacagaccctctatgacctgcagtcgggcaattccggcgagaaagtctccaaggtatccctggttgacctcgcagggtctgagagggtttcaaaaaccggcgcagccggagagagactcaaagaggggtctaacataaataaaagtcttaccactcttggactggttatctccagcctagccgatcaagcagccggaaaggggaagtctaagtttgtcccttaccgggattccgttttaacatggcttctgaaggataatctcggaggcaattcccagacatcaatgattgcaacaattagtcctgcagctgacaattatgaggaaacattatcgaccctgcgttatgctgaccgcgcaaagaggatcgtaaaccatgcagtggttaacgaggatccgaacgccaaggtaatccgcgagctccgggaagaggtagagaaactgagagaacagctctcgcaggcagaggcaatgaaagcccctgagctgaaagaaaaattagaggagagcgagaagctcatcaaggaactcacagttacatgggaggagaagctccgtaaaaccgaggaaatcgcgcaggagcgtcagcggcaattggaaagcatggggatttctcttgagatgagtggcattaaggtcggagacgataagtgctatcttgtgaatcttaatgcagatccagccctgaacgagttgttggtgtactaccttaaggatcacacgagagttggggctgacaccagccaggatatccagctgtttggcattggcattcagccccaacactgcgaaatagatattgcttctgacggagacgtaaccctgacacccaaagagaatgccagatcgtgtgtcaatggcacactggtttgcagcactacacagttgtggcatggcgacaggattctgtggggcaataaccactttttccggatcaatctgccaaaaagaaaacgcagggactggctaaaggacttcgaaaaagagaccggaccgcctgaacatgaccttgatgccgctagcgaagcgagttccgagcccgactacaattatgagtttgcgcaaatggaagtgatcatgaagacactgaatagtaacgatcccgtacagaacgttgtacaggtcttggaaaagcaataccttgaggaaaagcgctctgcactggaggagcagcggcttatgtacgaacgcgaattagaacagttacgtcagcagctgtctcctgaccgccagcctcagtcatccgggcctgatcggctggcttacagcagccagactgcccagcagaaagtcactcagtgggctgaagagcgggacgaactgttcaggcaatccctcgcaaagctgagagagcagctggtgaaagccaacacccttgtgcgcgaggccaattttttggccgaggagatgtcgaagctgacggattatcaagtgacactccagatacctgccgctaatctgtcagccaatagaaagagaggcgcaattgtgagtgaacccgctatccaggtgcgcagaaagggcaaaagcacccaagtttggacaattgaaaaattagaaaacaaacttatagacatgcgcgatttatatcaggagtggaaggagaaggttcccgaggccaaaaggctctatgggaaacgaggcgatcctttttacgaggcccaggaaaaccacaatctgatcggcgtagcaaatgtcttcctggagtgtctcttttgtgacgtgaagctgcaatacgcagtaccgattatctcccagcagggagaggtggccggacggctgcacgtggaggtgatgcgggtcacaggggcagtgcccgagcgggtggtagaagacgactcttctgaaaactcgagcgagagtgggtctttagaggtcgtggacagctcaggtgagattatccatagggttaagaaattgacgtgccgtgttaaaataaaggaggccaccggactgcccctgaacctgagcaacttcgtgttttgtcagtacacattttgggaccaatgtgagtcgaccgtggccgctcccgtcgtggaccctgaggtccctagtcctcagagcaaggatgctcagtacactgtgacattttcccactgcaaagattacgtagtgaacgttacggaggaatttctggaatttatttctgatggggctcttgcgattgaggtttggggtcatcgatgtgctgggaacgggtcatctatatgggaggttgatagcttacatgctaagacaaggacactccatgatagatggaacgaagtgacgcggcgtatagaaatgtggatctccatccttgagctcaacgagctcggcgagtatgctgcagtggagctgcaccaagctaaggatgtcaatacgggcggaatcttccaactcaggcagggacattcccgccgagtgcaagtgaccgtaaaaccagtccagcacagtggcaccctgcccctgatggtagaagccatcctctcagtatctatcggatgtgtcacagcgagatcaaccaaacttcagagaggcctagactcataccaaagagatgatgaggatggtgacgacatggatagctatcaggaggaggatcttaactgcgtgcgcgagagatggtccgacgctctgataaagcgcagagagtatctggatgagcaaatcaagaaggtctcaaataaaaccgaaaagacagaagacgacgtggaaagagaggcccagctggtcgaacagtgggttgggctcaccgaggagcgtaacgctgtcttggtgcccgcacctggcagtggaataccaggggcaccagccgactggattccacctccaggcatggagacccacatccctgtgctttttctggatttaaatgctgacgatctgtccgctaatgaacagttggtggggccacacgccagcggcgtcaactccattctgccaaaagaacacgggtctcagttcttttacctgccaatcatcaagcactcagacgatgaggtatctgccaccgcatcctgggactcttctgtccatgattcagtgcaccttaaccgagtgactcctcaaaacgaaaggatctaccttatagttaaaacgaccgtgcagctctctcaccccgcagcgatggagctggtgctccggaagaggattgccgcaaatatttataataaacaaagctttacccagtctcttaaaagacgcatctctctgaaaaatatcttttacagctgcggagtcacttatgagatagtttcaaatataccaaaggcgacagaagagatagaagatagggaaacccttgcactcttggctgctcgctctgagaatgaaggtaccagcgacggcgaaacttatatcgagaagtacactaggggggtgctgcaggtcgagaatatcctttctcttgagaggctgcgccaggccgtgaccgtcaaggaagcgctgagcactaaggcgaggcatattcgacgatctctgtctacccctaacgttcacaatgtttcttcctcacgtccggacctcagtggattcgacgaggatgacaaaggctggcccgagaatcagttagatatgtcagattattccagctcctaccaagacgttgcttgttacggcaccctgccaagggactcaccaaggcgaaacaaagaggggtgtacaagcgaaactcctcacgctctgacggtctcccccttcaaggctttctctccccagccccctaaattctttaaacccctgatgcccgtgaaggaagaacataaaaagagaattgccctggaggccaggcccctgctttctcaagaagactctgaagaagaagagaatgaattggaggctatcaatagaaaactaatcagctctcagccttatgttccggtggaattcgccgacttttccgtttacaatgcttctctggagaacagggaatggttctcctctaaggttgatctctctaacagcagggttcttgaaaaagaggtgagcaggtcacctaccacatcttcaattacttccggttacttctcacacagcgcctccaacgccaccttgtctgatatggtggtcccatccagtgattccagcgaccagcttgccatacagaccaaagacgcagatagcactgagcatagtacaccttcactggtgcacgatttcagacccagcagcaacaaggagctgacagaggtagagaaggggctcgtcaaagacaagattattgtggtgcctctgaaagagaattccgctctggccaaagggagtccctcttcacagagcatccccgagaaaaatagcaaatctttatgccgaacggggtcctgtagtgaactggacgcatgccctagtaagataagccagccagccaggggcttttgcccaagagaggtaacagtagagcacaccacaaatatcctagaagatcacagcttcactgagttcatgggcgtgtctgaaggtaaggatttcgacgggctcactgactcctcagctggggagctctccagccggcgttcccttcccaataagacgggtggcaagaccgtctcagatggccttcatcacccatctcagctgcacagcaaattagaaaatgatcaggtgatcatccctgaggctgctttctgggtgttgtgttgccagta

SEQ ID NO: 41748 - DNA, 5313 bp, Artificial Sequence
  derived and/or modified sequence
atgagcgacaccaaggtgaaggtggccgtgagagtgagacccatgaacagaagagagctggagctgaacaccaagtgcgtggtggagatggagggcaaccagaccgtgctgcaccccccccccagcaacaccaagcagggcgagagaagacccagccaggtgttcgccttcgactactgcttctggagcatggacgagagcaacaccaccaagtacgccggccaggaggtggtgttcaagtgcctgggcgagggcatcctggagaaggccttccagggctacaacgcctgcatcttcgcctacggccagaccggcagcggcaagagcttcagcatgatgggccacgccgagcagctgggcctgatccccagactgtgctgcgccctgttcaagagaatcagcctggagcagaacgagagccagaccttcaaggtggaggtgagctacatggagatctacaacgagaaggtgagagacctgctggaccccaagggcagcagacagagcctgaaggtgagagagcacaaggtgctgggcccctacgtggacggcctgagccagctggccgtgaccagcttcgaggacatcgagagcctgatgagcgagggcaacaagagcagaaccgtggccgccaccaacatgaacgaggagagcagcagaagccacgccgtgttcaacatcatcatcacccagaccctgtacgacctgcagagcggcaacagcggcgagaaggtgagcaaggtgagcctggtggacctggccggcagcgagagagtgagcaagaccggcgccgccggcgagagactgaaggagggcagcaacatcaacaagagcctgaccaccctgggcctggtgatcagcagcctggccgaccaggccgccggcaagggcaagagcaagttcgtgccctacagagacagcgtgctgacctggctgctgaaggacaacctgggcggcaacagccagaccagcatgatcgccaccatcagccccgccgccgacaactacgaggagaccctgagcaccctgagatacgccgacagagccaagagaatcgtgaaccacgccgtggtgaacgaggaccccaacgccaaggtgatcagagagctgagagaggaggtggagaagctgagagagcagctgagccaggccgaggccatgaaggcccccgagctgaaggagaagctggaggagagcgagaagctgatcaaggagctgaccgtgacctgggaggagaagctgagaaagaccgaggagatcgcccaggagagacagagacagctggagagcatgggcatcagcctggagatgagcggcatcaaggtgggcgacgacaagtgctacctggtgaacctgaacgccgaccccgccctgaacgagctgctggtgtactacctgaaggaccacaccagagtgggcgccgacaccagccaggacatccagctgttcggcatcggcatccagccccagcactgcgagatcgacatcgccagcgacggcgacgtgaccctgacccccaaggagaacgccagaagctgcgtgaacggcaccctggtgtgcagcaccacccagctgtggcacggcgacagaatcctgtggggcaacaaccacttcttcagaatcaacctgcccaagagaaagagaagagactggctgaaggacttcgagaaggagaccggcccccccgagcacgacctggacgccgccagcgaggccagcagcgagcccgactacaactacgagttcgcccagatggaggtgatcatgaagaccctgaacagcaacgaccccgtgcagaacgtggtgcaggtgctggagaagcagtacctggaggagaagagaagcgccctggaggagcagagactgatgtacgagagagagctggagcagctgagacagcagctgagccccgacagacagccccagagcagcggccccgacagactggcctacagcagccagaccgcccagcagaaggtgacccagtgggccgaggagagagacgagctgttcagacagagcctggccaagctgagagagcagctggtgaaggccaacaccctggtgagagaggccaacttcctggccgaggagatgagcaagctgaccgactaccaggtgaccctgcagatccccgccgccaacctgagcgccaacagaaagagaggcgccatcgtgagcgagcccgccatccaggtgagaagaaagggcaagagcacccaggtgtggaccatcgagaagctggagaacaagctgatcgacatgagagacctgtaccaggagtggaaggagaaggtgcccgaggccaagagactgtacggcaagagaggcgaccccttctacgaggcccaggagaaccacaacctgatcggcgtggccaacgtgttcctggagtgcctgttctgcgacgtgaagctgcagtacgccgtgcccatcatcagccagcagggcgaggtggccggcagactgcacgtggaggtgatgagagtgaccggcgccgtgcccgagagagtggtggaggacgacagcagcgagaacagcagcgagagcggcagcctggaggtggtggacagcagcggcgagatcatccacagagtgaagaagctgacctgcagagtgaagatcaaggaggccaccggcctgcccctgaacctgagcaacttcgtgttctgccagtacaccttctgggaccagtgcgagagcaccgtggccgcccccgtggtggaccccgaggtgcccagcccccagagcaaggacgcccagtacaccgtgaccttcagccactgcaaggactacgtggtgaacgtgaccgaggagttcctggagttcatcagcgacggcgccctggccatcgaggtgtggggccacagatgcgccggcaacggcagcagcatctgggaggtggacagcctgcacgccaagaccagaaccctgcacgacagatggaacgaggtgaccagaagaatcgagatgtggatcagcatcctggagctgaacgagctgggcgagtacgccgccgtggagctgcaccaggccaaggacgtgaacaccggcggcatcttccagctgagacagggccacagcagaagagtgcaggtgaccgtgaagcccgtgcagcacagcggcaccctgcccctgatggtggaggccatcctgagcgtgagcatcggctgcgtgaccgccagaagcaccaagctgcagagaggcctggacagctaccagagagacgacgaggacggcgacgacatggacagctaccaggaggaggacctgaactgcgtgagagagagatggagcgacgccctgatcaagagaagagagtacctggacgagcagatcaagaaggtgagcaacaagaccgagaagaccgaggacgacgtggagagagaggcccagctggtggagcagtgggtgggcctgaccgaggagagaaacgccgtgctggtgcccgcccccggcagcggcatccccggcgcccccgccgactggatccccccccccggcatggagacccacatccccgtgctgttcctggacctgaacgccgacgacctgagcgccaacgagcagctggtgggcccccacgccagcggcgtgaacagcatcctgcccaaggagcacggcagccagttcttctacctgcccatcatcaagcacagcgacgacgaggtgagcgccaccgccagctgggacagcagcgtgcacgacagcgtgcacctgaacagagtgaccccccagaacgagagaatctacctgatcgtgaagaccaccgtgcagctgagccaccccgccgccatggagctggtgctgagaaagagaatcgccgccaacatctacaacaagcagagcttcacccagagcctgaagagaagaatcagcctgaagaacatcttctacagctgcggcgtgacctacgagatcgtgagcaacatccccaaggccaccgaggagatcgaggacagagagaccctggccctgctggccgccagaagcgagaacgagggcaccagcgacggcgagacctacatcgagaagtacaccagaggcgtgctgcaggtggagaacatcctgagcctggagagactgagacaggccgtgaccgtgaaggaggccctgagcaccaaggccagacacatcagaagaagcctgagcacccccaacgtgcacaacgtgagcagcagcagacccgacctgagcggcttcgacgaggacgacaagggctggcccgagaaccagctggacatgagcgactacagcagcagctaccaggacgtggcctgctacggcaccctgcccagagacagccccagaagaaacaaggagggctgcaccagcgagaccccccacgccctgaccgtgagccccttcaaggccttcagcccccagccccccaagttcttcaagcccctgatgcccgtgaaggaggagcacaagaagagaatcgccctggaggccagacccctgctgagccaggaggacagcgaggaggaggagaacgagctggaggccatcaacagaaagctgatcagcagccagccctacgtgcccgtggagttcgccgacttcagcgtgtacaacgccagcctggagaacagagagtggttcagcagcaaggtggacctgagcaacagcagagtgctggagaaggaggtgagcagaagccccaccaccagcagcatcaccagcggctacttcagccacagcgccagcaacgccaccctgagcgacatggtggtgcccagcagcgacagcagcgaccagctggccatccagaccaaggacgccgacagcaccgagcacagcacccccagcctggtgcacgacttcagacccagcagcaacaaggagctgaccgaggtggagaagggcctggtgaaggacaagatcatcgtggtgcccctgaaggagaacagcgccctggccaagggcagccccagcagccagagcatccccgagaagaacagcaagagcctgtgcagaaccggcagctgcagcgagctggacgcctgccccagcaagatcagccagcccgccagaggcttctgccccagagaggtgaccgtggagcacaccaccaacatcctggaggaccacagcttcaccgagttcatgggcgtgagcgagggcaaggacttcgacggcctgaccgacagcagcgccggcgagctgagcagcagaagaagcctgcccaacaagaccggcggcaagaccgtgagcgacggcctgcaccaccccagccagctgcacagcaagctggagaacgaccaggtgatcatccccgaggccgccttctgggtgctgtgctgccagtag

SEQ ID NO: 41749 - DNA, 5313 bp, Artificial Sequence
  derived and/or modified sequence
atgagcgacaccaaggtgaaggtggccgtgagagtgagacccatgaacagaagagagctggagctgaacaccaagtgcgtggtggagatggagggcaaccagaccgtgctgcaccccccccccagcaacaccaagcagggcgagagaaagccccccaaggtgttcgccttcgactactgcttctggagcatggacgagagcaacaccaccaagtacgccggccaggaggtggtgttcaagtgcctgggcgagggcatcctggagaaggccttccagggctacaacgcctgcatcttcgcctacggccagaccggcagcggcaagagcttcagcatgatgggccacgccgagcagctgggcctgatccccagactgtgctgcgccctgttcaagagaatcagcctggagcagaacgagagccagaccttcaaggtggaggtgagctacatggagatctacaacgagaaggtgagagacctgctggaccccaagggcagcagacagagcctgaaggtgagagagcacaaggtgctgggcccctacgtggacggcctgagccagctggccgtgaccagcttcgaggacatcgagagcctgatgagcgagggcaacaagagcagaaccgtggccgccaccaacatgaacgaggagagcagcagaagccacgccgtgttcaacatcatcatcacccagaccctgtacgacctgcagagcggcaacagcggcgagaaggtgagcaaggtgagcctggtggacctggccggcagcgagagagtgagcaagaccggcgccgccggcgagagactgaaggagggcagcaacatcaacaagagcctgaccaccctgggcctggtgatcagcagcctggccgaccaggccgccggcaagggcaagagcaagttcgtgccctacagagacagcgtgctgacctggctgctgaaggacaacctgggcggcaacagccagaccagcatgatcgccaccatcagccccgccgccgacaactacgaggagaccctgagcaccctgagatacgccgacagagccaagagaatcgtgaaccacgccgtggtgaacgaggaccccaacgccaaggtgatcagagagctgagagaggaggtggagaagctgagagagcagctgagccaggccgaggccatgaaggcccccgagctgaaggagaagctggaggagagcgagaagctgatcaaggagctgaccgtgacctgggaggagaagctgagaaagaccgaggagatcgcccaggagagacagagacagctggagagcatgggcatcagcctggagatgagcggcatcaaggtgggcgacgacaagtgctacctggtgaacctgaacgccgaccccgccctgaacgagctgctggtgtactacctgaaggaccacaccagagtgggcgccgacaccagccaggacatccagctgttcggcatcggcatccagccccagcactgcgagatcgacatcgccagcgacggcgacgtgaccctgacccccaaggagaacgccagaagctgcgtgaacggcaccctggtgtgcagcaccacccagctgtggcacggcgacagaatcctgtggggcaacaaccacttcttcagaatcaacctgcccaagagaaagagaagagactggctgaaggacttcgagaaggagaccggcccccccgagcacgacctggacgccgccagcgaggccagcagcgagcccgactacaactacgagttcgcccagatggaggtgatcatgaagaccctgaacagcaacgaccccgtgcagaacgtggtgcaggtgctggagaagcagtacctggaggagaagagaagcgccctggaggagcagagactgatgtacgagagagagctggagcagctgagacagcagctgagccccgacagacagccccagagcagcggccccgacagactggcctacagcagccagaccgcccagcagaaggtgacccagtgggccgaggagagagacgagctgttcagacagagcctggccaagctgagagagcagctggtgaaggccaacaccctggtgagagaggccaacttcctggccgaggagatgagcaagctgaccgactaccaggtgaccctgcagatccccgccgccaacctgagcgccaacagaaagagaggcgccatcgtgagcgagcccgccatccaggtgagaagaaagggcaagagcacccaggtgtggaccatcgagaagctggagaacaagctgatcgacatgagagacctgtaccaggagtggaaggagaaggtgcccgaggccaagagactgtacggcaagagaggcgaccccttctacgaggcccaggagaaccacaacctgatcggcgtggccaacgtgttcctggagtgcctgttctgcgacgtgaagctgcagtacgccgtgcccatcatcagccagcagggcgaggtggccggcagactgcacgtggaggtgatgagagtgaccggcgccgtgcccgagagagtggtggaggacgacagcagcgagaacagcagcgagagcggcagcctggaggtggtggacagcagcggcgagatcatccacagagtgaagaagctgacctgcagagtgaagatcaaggaggccaccggcctgcccctgaacctgagcaacttcgtgttctgccagtacaccttctgggaccagtgcgagagcaccgtggccgcccccgtggtggaccccgaggtgcccagcccccagagcaaggacgcccagtacaccgtgaccttcagccactgcaaggactacgtggtgaacgtgaccgaggagttcctggagttcatcagcgacggcgccctggccatcgaggtgtggggccacagatgcgccggcaacggcagcagcatctgggaggtggacagcctgcacgccaagaccagaaccctgcacgacagatggaacgaggtgaccagaagaatcgagatgtggatcagcatcctggagctgaacgagctgggcgagtacgccgccgtggagctgcaccaggccaaggacgtgaacaccggcggcatcttccagctgagacagggccacagcagaagagtgcaggtgaccgtgaagcccgtgcagcacagcggcaccctgcccctgatggtggaggccatcctgagcgtgagcatcggctgcgtgaccgccagaagcaccaagctgcagagaggcctggacagctaccagagagacgacgaggacggcgacgacatggacagctaccaggaggaggacctgaactgcgtgagagagagatggagcgacgccctgatcaagagaagagagtacctggacgagcagatcaagaaggtgagcaacaagaccgagaagaccgaggacgacgtggagagagaggcccagctggtggagcagtgggtgggcctgaccgaggagagaaacgccgtgctggtgcccgcccccggcagcggcatccccggcgcccccgccgactggatccccccccccggcatggagacccacatccccgtgctgttcctggacctgaacgccgacgacctgagcgccaacgagcagctggtgggcccccacgccagcggcgtgaacagcatcctgcccaaggagcacggcagccagttcttctacctgcccatcatcaagcacagcgacgacgaggtgagcgccaccgccagctgggacagcagcgtgcacgacagcgtgcacctgaacagagtgaccccccagaacgagagaatctacctgatcgtgaagaccaccgtgcagctgagccaccccgccgccatggagctggtgctgagaaagagaatcgccgccaacatctacaacaagcagagcttcacccagagcctgaagagaagaatcagcctgaagaacatcttctacagctgcggcgtgacctacgagatcgtgagcaacatccccaaggccaccgaggagatcgaggacagagagaccctggccctgctggccgccagaagcgagaacgagggcaccagcgacggcgagacctacatcgagaagtacaccagaggcgtgctgcaggtggagaacatcctgagcctggagagactgagacaggccgtgaccgtgaaggaggccctgagcaccaaggccagacacatcagaagaagcctgagcacccccaacgtgcacaacgtgagcagcagcagacccgacctgagcggcttcgacgaggacgacaagggctggcccgagaaccagctggacatgagcgactacagcagcagctaccaggacgtggcctgctacggcaccctgcccagagacagccccagaagaaacaaggagggctgcaccagcgagaccccccacgccctgaccgtgagccccttcaaggccttcagcccccagccccccaagttcttcaagcccctgatgcccgtgaaggaggagcacaagaagagaatcgccctggaggccagacccctgctgagccaggaggacagcgaggaggaggagaacgagctggaggccatcaacagaaagctgatcagcagccagccctacgtgcccgtggagttcgccgacttcagcgtgtacaacgccagcctggagaacagagagtggttcagcagcaaggtggacctgagcaacagcagagtgctggagaaggaggtgagcagaagccccaccaccagcagcatcaccagcggctacttcagccacagcgccagcaacgccaccctgagcgacatggtggtgcccagcagcgacagcagcgaccagctggccatccagaccaaggacgccgacagcaccgagcacagcacccccagcctggtgcacgacttcagacccagcagcaacaaggagctgaccgaggtggagaagggcctggtgaaggacaagatcatcgtggtgcccctgaaggagaacagcgccctggccaagggcagccccagcagccagagcatccccgagaagaacagcaagagcctgtgcagaaccggcagctgcagcgagctggacgcctgccccagcaagatcagccagcccgccagaggcttctgccccagagaggtgaccgtggagcacaccaccaacatcctggaggaccacagcttcaccgagttcatgggcgtgagcgagggcaaggacttcgacggcctgaccgacagcagcgccggcgagctgagcagcagaagaagcctgcccaacaagaccggcggcaagaccgtgagcgacggcctgcaccaccccagccagctgcacagcaagctggagaacgaccaggtgatcatccccgaggccgccttctgggtgctgtgctgccagtag

SEQ ID NO: 41750 - protein, 1757 aa, Artificial Sequence
  derived and/or modified sequence
MSDTKVKVAVRVRPMNRRELELNTKCVVEMEGNQTVLHPPPSNTKQGERKPPKVFAFDYCFWSMDESNTTKYAGQEVVFKCLGEGILEKAFQGYNACIFAYGQTGSGKSFSMMGHAEQLGLIPRLCCALFKRISLEQNESQTFKVEVSYMEIYNEKVRDLLDPKGSRQSLKVREHKVLGPYVDGLSQLAVTSFEDIESLMSEGNKSRTVAATNMNEESSRSHAVFNIIITQTLYDLQSGNSGEKVSKVSLVDLAGSERVSKTGAAGERLKEGSNINKSLTTLGLVISSLADQAAGKGKSKFVPYRDSVLTWLLKDNLGGNSQTSMIATISPAADNYEETLSTLRYADRAKRIVNHAVVNEDPNAKVIRELREEVEKLREQLSQAEAMKAPELKEKLEESEKLIKELTVTWEEKLRKTEEIAQERQRQLESMGISLEMSGIKVGDDKCYLVNLNADPALNELLVYYLKDHTRVGADTSQDIQLFGIGIQPQHCEIDIASDGDVTLTPKENARSCVNGTLVCSTTQLWHGDRILWGNNHFFRINLPKRKRRDWLKDFEKETGPPEHDLDAASEASSEPDYNYEFAQMEVIMKTLNSNDPVQNVVQVLEKQYLEEKRSALEEQRLMYERELEQLRQQLSPDRQPQSSGPDRLAYSSQTAQQKVTQWAEERDELFRQSLAKLREQLVKANTLVREANFLAEEMSKLTDYQVTLQIPAANLSANRKRGAIVSEPAIQVRRKGKSTQVWTIEKLENKLIDMRDLYQEWKEKVPEAKRLYGKRGDPFYEAQENHNLIGVANVFLECLFCDVKLQYAVPIISQQGEVAGRLHVEVMRVTGAVPERVVEDDSSENSSESGSLEVVDSSGEIIHRVKKLTCRVKIKEATGLPLNLSNFVFCQYTFWDQCESTVAAPVVDPEVPSPQSKDAQYTVTFSHCKDYVVNVTEEFLEFISDGALAIEVWGHRCAGNGSSIWEVDSLHAKTRTLHDRWNEVTRRIEMWISILELNELGEYAAVELHQAKDVNTGGIFQLRQGHSRRVQVTVKPVQHSGTLPLMVEAILSVSIGCVTARSTKLQRGLDSYQEEDLNCVRERWSDALIKRREYLDEQIKKVSNKTEKTEDDVEREAQLVEQWVGLTEERNAVLVPAPGSGIPGAPADWIPPPGMETHIPVLFLDLNADDLSANEQLVGPHASGVNSILPKEHGSQFFYLPIIKHSDDEVSATASWDSSVHDSVHLNRVTPQNERIYLIVKTTVQLSHPAAMELVLRKRIAANIYNKQSFTQSLKRRISLKNIFYSCGVTYEIVSNIPKATEEIEDRETLALLAARSENEGTSDGETYIEKYTRGVLQVENILSLERLRQAVTVKEALSTKARHIRRSLSTPNVHNVSSSRPDLSGFDEDDKGWPENQLDMSDYSSSYQDVACYGTLPRDSPRRNKEGCTSETPHALTVSPFKAFSPQPPKFFKPLMPVKEEHKKRIALEARPLLSQEDSEEEENELEAINRKLISSQPYVPVEFADFSVYNASLENREWFSSKVDLSNSRVLEKEVSRSPTTSSITSGYFSHSASNATLSDMVVPSSDSSDQLAIQTKDADSTEHSTPSLVHDFRPSSNKELTEVEKGLVKDKIIVVPLKENSALAKGSPSSQSIPEKNSKSLCRTGSCSELDACPSKISQPARGFCPREVTVEHTTNILEDHSFTEFMGVSEGKDFDGLTDSSAGELSSRRSLPNKTGGKTVSDGLHHPSQLHSKLENDQVIIPEAAFWVLCCQ

SEQ ID NO: 41751 - DNA, 5274 bp, Artificial Sequence
  derived and/or modified sequence
atgagtgacacaaaagtgaaggtagccgtgcgcgtaaggccaatgaatcgtcgcgagctggaactcaacaccaagtgtgtggtcgagatggaagggaaccagaccgtcttgcatcccccaccatcgaataccaaacagggtgagcgcaagccccctaaggtgtttgcgttcgattactgtttctggtcaatggatgagagtaacaccactaagtacgctggacaagaggtggtgttcaaatgcctcggagagggcattctggagaaggcctttcagggttacaatgcatgtatctttgcttatggtcagaccggatcagggaagtcatttagcatgatggggcacgctgaacagctggggctaataccaaggctgtgttgcgcgctcttcaaacggatttctttggaacaaaatgaaagtcagacctttaaggtagaggtgtcctacatggagatatacaatgaaaaagttcgagacctacttgatcccaagggttcccgacagtcacttaaggttcgggaacacaaggtgctaggaccatacgtggatggtctatcacagctcgctgtgacctccttcgaagacatcgagagcctcatgtcagaaggaaacaagtccaggactgtggctgccacgaacatgaacgaggaatctagcagaagccatgcagtgttcaatataattatcacacagacactgtatgatctacagtcaggcaacagtggggaaaaggtgtcaaaagtgtctctcgtcgacctcgcggggtctgagagggtgtcaaaaaccggggccgccggcgaacgacttaaagaaggctctaacattaacaagagcctcacaaccctcggtttggttatctcaagcttggcagaccaggcagccgggaaaggtaagtccaagttcgtgccatacagggattcagtgttaacctggctccttaaagataacttaggaggtaattcccagacctccatgatcgcaaccatctcgccagcagccgacaactatgaggaaaccctgagcaccctgagatatgcagaccgcgcgaaacgcattgtgaatcacgctgtagtcaatgaagatcctaacgccaaggtgatcagggagctccgcgaagaagtggagaagctgcgcgagcagttatcgcaagccgaggctatgaaggccccggagctgaaggaaaagcttgaagaaagcgagaagctcatcaaggagttgactgtgacctgggaagagaagctgcgcaaaaccgaagagatagcccaggaacgccagaggcagctggaaagtatgggtatcagtctcgagatgtccgggataaaggtcggtgatgacaagtgttatctggtgaatttgaacgccgaccccgccctaaacgaactgctagtttattatctgaaggatcacacgcgcgttggagcagatacatctcaggacatacagctgtttgggattgggatccagccccagcattgtgagatcgatattgcgtctgatggtgacgtcaccctcactcctaaggaaaatgctcgttcttgtgtgaatggcacacttgtgtgctccaccacgcaattgtggcacggagaccgtatcctctggggcaacaaccacttcttccgcatcaatctgcccaagcggaagcggcgggactggctgaaagattttgaaaaggagacaggtcctcccgagcacgatcttgatgcggcctcggaggccagctctgaacctgactataactacgaattcgcccagatggaggttattatgaagacacttaactctaacgaccccgtgcagaatgtggtgcaggtactggagaaacagtatttagaagagaaaaggtctgcgctagaagagcagcgtctcatgtacgagcgagaactcgagcagctccgccagcagttgagcccagaccgtcagccacagagcagcgggcccgataggctggcctactcatctcaaactgcgcagcagaaagtgacgcagtgggcggaggagagagacgagctgttccggcagagtctagcgaagctcagagaacagcttgttaaggccaacactcttgtacgtgaggcgaatttcctggctgaagagatgtctaaattaactgactatcaggtcactctccaaatccccgccgcaaacctgagcgctaaccgtaaaagaggagctatcgtgtcggagcctgccatccaagtgaggcgcaagggcaaatcaactcaagtctggaccattgagaaacttgagaataagctgattgacatgcgagacctataccaggagtggaaagaaaaggtgccagaagccaaacgactttacggcaaacgaggcgacccgttttacgaggctcaggagaatcacaatttgatcggagtcgccaacgtgtttctggaatgcctgttctgcgatgtgaagttacagtacgccgtgcctattatttcacagcaaggagaggtcgccgggcggctgcatgtagaagtgatgagggtgacgggggccgttccagagcgggtcgtggaagatgatagttctgaaaattccagtgagtctggctccctcgaggtcgtggatagctcgggggaaatcatccatagagttaagaaactgacctgccgtgttaagattaaagaagcaaccgggttgcctttgaacctcagcaatttcgttttttgtcagtatactttctgggatcaatgcgagagcacggtggccgctccagtggtagaccccgaagttccctccccacagtctaaggacgcccagtataccgttaccttttcccattgtaaagattacgtggttaacgtaaccgaagagttcctggagtttatctcagatggagccctggcgatcgaggtctggggacaccggtgcgcgggtaacggctctagcatctgggaggtggactcactccacgccaaaactaggacactgcacgaccgatggaacgaggtgaccagacgtattgaaatgtggatatccatcttggagctaaatgagttgggcgaatacgccgctgtggagttgcatcaggccaaggatgtaaacacaggcggaattttccagctgcgccagggccattctcggagggtgcaggtaactgtgaaacctgtccagcacagtggaacgctcccattgatggttgaagctattctgagtgtatccattggctgcgtaacggctaggtccaccaaactacaaaggggcctcgacagctaccaggaggaagacttgaattgtgtccgagagaggtggagcgacgccctcataaagcgccgggagtacctcgatgaacagatcaaaaaggtgagcaataagactgaaaagacggaggacgacgtggagcgtgaggcccagctagtggagcagtgggtcgggttgacggaagagaggaatgccgtcctggtgccagctccgggatccggtatcccaggcgctccagctgattggattcccccccctggtatggagacacatattcccgtactcttcctggatctgaacgcggacgacttatctgctaatgagcagctcgtcggccctcacgcttccggtgtgaattcaattctcccaaaggaacatggtagtcagtttttctacctgcccatcatcaaacatagtgacgacgaagttagcgctacagcatcttgggattctagtgtgcatgactctgtacatctgaaccgtgtgactccgcagaatgagcggatttacctcatcgttaaaaccacagtgcagctctcccacccagccgccatggagcttgtcctccggaaacgcatcgctgctaatatttataataaacagtcttttacccaaagcctgaagagaaggatcagcctcaaaaacatcttttattcttgcggagtaacttatgagatcgtgagtaacatacccaaggcgacagaagagatcgaagacagagaaacgcttgcactcctggcagccagaagcgaaaacgaaggaacatcagacggggaaacttatattgagaaatatacacgcggcgtccttcaagtggaaaacatactaagcctcgagagactgaggcaagcagttacagtgaaggaggccctttcaaccaaggctaggcatattagaaggagcctaagtacacctaatgtgcacaacgtttcaagttcacgccccgatctttccggtttcgatgaggatgacaaaggttggccggaaaatcaacttgacatgagcgattacagctcttcataccaggatgtcgcctgctacggtactttgcccagagacagtcctagacggaataaagagggttgtacctccgagaccccgcatgcactgacggtgagcccttttaaggcatttagcccccagccccctaagttttttaaacctcttatgccagttaaggaagaacacaagaaaagaattgctctggaggccaggccactgctcagccaagaggatagcgaggaagaggaaaacgaattagaagctattaataggaagctcatctcctcccaaccttacgtaccagtggagtttgcggatttcagcgtgtacaacgccagtctggagaatcgggagtggttctcgagtaaggtcgacctgtccaactccagagtcctcgagaaagaggtttcgcgttctccaaccacatcctccatcacctcaggttatttcagtcactctgcctcaaatgccacactctcagacatggtggtgcccagcagcgactccagtgatcaacttgcaatccagactaaagatgccgacagcaccgaacactccaccccaagcttggtccacgattttcgcccttcttcaaataaggagctcactgaagtcgagaaaggccttgtcaaggataaaatcattgtggtgcccttgaaggaaaactcagcccttgcgaaggggtctccctccagtcagtccatccctgagaagaacagcaaatcgctctgccgcacagggtcttgctcggaacttgatgcatgcccctccaagataagtcagccagcccgagggttctgtccgagggaggtgaccgtggaacacaccaccaatatccttgaagaccacagttttaccgagttcatgggtgtgagcgagggcaaggatttcgatggcttgactgattcctccgcaggtgaactgtcaagcaggaggagcctcccaaacaagaccggcggcaaaaccgtgtccgatggtcttcatcacccatctcaactccattctaaactggagaatgatcaagttatcatacctgaagccgccttttgggtgctgtgttgccagtag

SEQ ID NO: 41752 - DNA, 5707 bp, Artificial Sequence
  derived and/or modified sequence
cgggcgagcgcagccaacatgtcggataccaaggtaaaagttgccgtccgggtccggcccatgaaccgacgagaactggaactgaacaccaagtgcgtggtggagatggaagggaatcaaacggtcctgcaccctcctccttctaacaccaaacagggagaaaggaaacctcccaaggtatttgcctttgattattgcttttggtccatggatgaatctaacactacaaaatacgctggtcaagaagtggttttcaagtgccttggggaaggaattcttgaaaaagcctttcaggggtataatgcgtgtatttttgcatatggacagacaggttcgggaaaatccttttccatgatgggccatgctgagcagctgggccttattccaaggctctgctgtgctttatttaaaaggatctctttggagcaaaatgagtcacagacctttaaagttgaagtgtcctatatggaaatttataatgagaaagttcgggatcttttagaccccaaagggagtagacagtctcttaaagttcgagaacataaagttttgggaccatatgtagatggtttatctcaactagctgtcactagttttgaggatattgagtcattgatgtctgagggaaataagtctcgaacggtagctgctaccaacatgaacgaagaaagcagccgctcccatgctgtgttcaacatcataatcacacagacactttatgacctgcagtctgggaattccggggagaaagtcagtaaggtcagcttggtagacctggcgggtagcgaaagagtatctaaaacaggagctgcaggagagcgactgaaagaaggcagcaacattaacaaatcgcttacaaccttggggttggttatatcatcactggctgaccaggcagctggcaagggtaaaagcaaatttgtgccttatcgagattcagtcctcacttggctgcttaaggacaacttggggggcaacagccaaacctctatgatagccacaatcagcccagccgcagacaactatgaagagaccctctccacattaagatatgcagaccgagccaaaaggattgtgaaccatgctgttgtgaatgaggaccccaacgcaaaagtgatccgagaactgcgggaggaagtcgagaaactgagagagcagctctctcaggcagaggccatgaaggcccctgaactgaaggagaagctcgaagagtctgaaaagctgataaaagaactaacagtgacttgggaagagaagctgagaaaaacagaagagatagcacaggaaagacaacgacaacttgaaagcatggggatttccctggagatgtccggtatcaaggtgggggatgacaaatgctacttagtcaatctgaatgcagaccctgctcttaacgaacttctggtttattatttaaaggatcacaccagggtgggtgcagatacctctcaagatatccagctttttggcataggaattcagcctcagcactgtgagattgacattgcatctgatggagacgtcactctcactccaaaagaaaatgcaaggtcctgtgtgaacggcacccttgtgtgcagtaccacccagctgtggcatggtgaccgaatcctatggggaaataatcacttttttagaataaacttacctaagaggaaacgtcgagattggttgaaagactttgaaaaagaaacgggcccgccagagcatgacctggatgcagccagtgaggcttcctctgaaccagactataactatgaatttgcacagatggaagttatcatgaaaaccctgaatagtaatgacccagttcaaaatgtggttcaggtcctggagaaacaatacctagaagaaaagagaagtgccctagaggagcagcggctcatgtatgagcgggaactggagcaactccgccagcagctctcccccgacaggcagccacagagtagcggccctgaccgcctggcctacagcagccagacagcgcagcagaaggtgacccagtgggcagaagagagggatgaactcttccgacaaagcctggcaaaactgcgagagcagctggttaaagctaataccttggtgagggaagcaaacttcctggctgaggaaatgagcaaactcaccgattaccaagtgactcttcagatccctgctgcaaacctcagtgccaataggaagagaggtgcaatagtgagtgaaccagctatccaagtgaggaggaaaggaaagagcacccaagtgtggaccattgagaagctggagaataaattaattgacatgagagacctttaccaagaatggaaggaaaaagttcctgaggcaaagagactctacggaaaacgaggtgaccctttctatgaagcccaagaaaatcacaacctcatcggggtggcgaatgtattcttggaatgcctcttctgtgatgtgaaacttcagtatgcagtccctatcatcagccagcagggggaggttgcagggcgtctccacgtggaagtgatgcgtgttacaggagctgttccagagcgtgtggtggaggatgactcttcggagaattccagtgaaagtgggagccttgaagtcgtagacagcagcggggaaatcattcaccgagtcaaaaagctgacatgtcgggtaaaaattaaagaagcaacggggctgcccttaaacctctcaaattttgtcttctgtcaatacacattctgggaccagtgtgagtctacggtggctgccccggtggtggaccccgaggtgccttcaccacagtccaaggatgcccagtacacagtgaccttctcccactgtaaggactatgtggtgaatgtaacagaagaatttctggagttcatttcagatggagcactggccattgaagtatggggccaccggtgtgctggaaatggcagctccatctgggaggtcgattctcttcatgctaagacaagaacactgcatgacaggtggaatgaagtaacgcgaagaatagaaatgtggatctccatattagaattgaatgagttaggagagtatgctgcagtggaacttcatcaggcaaaagatgtcaacacaggaggcatctttcaacttagacagggtcattcccgtagagtacaagtcacggtgaaacctgtgcagcattcagggacactgccacttatggttgaagccatcctgtcagtatccatcggctgtgtaactgccaggtccaccaaactccaaagagggctggacagttaccaggaagaagacttaaactgcgtaagggagaggtggtcagatgcactcattaaacgacgagaatacctggatgaacagataaaaaaagtcagcaataaaacagagaaaacagaggacgatgtggagcgggaagcccagcttgtggagcagtgggtagggctgactgaggaaaggaatgctgtgctggtgccagccccaggcagtgggattcctggggcacctgccgactggatcccacctcctggaatggaaacccacataccagttctcttcctcgatttgaatgcggatgacctcagtgccaatgagcagcttgttggcccccatgcatccggcgtgaactccatcctgcccaaggagcatggcagccagtttttctacctgcccatcataaagcacagtgatgatgaggtttcagccacagcctcttgggattcctcggtgcatgattctgttcacttgaatagggtcacaccacagaatgaaaggatttacctaattgtgaaaaccacagttcaactcagccaccctgctgctatggagttagtattacgaaaacgaattgcagccaatatttacaacaaacagagtttcacgcagagtttgaagaggagaatatccctgaaaaatatattttattcctgtggtgtaacctatgaaatagtatccaatataccaaaggcaactgaggagatagaggaccgggaaacgctggctctcctggcagcaaggagtgaaaacgaaggcacatcagatggggagacgtacattgagaagtacactcgaggcgtgctgcaggtggaaaacattctgagtcttgaacggctccggcaggccgtcacagtcaaagaagcactttccaccaaagcccggcacattcggaggagcctcagtacaccaaatgttcataatgtctcttccagccgaccggacctttctggctttgatgaagatgacaagggttggccagagaaccagttggacatgtctgactatagctccagttaccaagatgtagcatgttatggaactttacccagggattctcctcgaaggaataaagaaggttgtacatcagagactcctcatgccttaaccgtcagcccttttaaagcattctctcctcagccaccaaagtttttcaagcccctaatgcctgtaaaagaggagcataagaaaaggatagccctggaagcaaggcctcttctaagccaggaggactctgaggaggaagaaaatgagctggaagctattaacaggaagctaataagttcacagccttatgtacctgtggagtttgctgacttcagtgtttacaatgccagcttggagaacagggaatggttttcctctaaagtagatctgtcaaactcacgggtcttggagaaagaagtgtcccgtagccctaccaccagcagtattaccagtggctacttttcccacagtgcctccaatgccaccctgtctgacatggtggtcccttctagtgacagctcagaccagctggccattcagacgaaggatgcagactccaccgagcactccacaccatcgcttgtgcatgatttcaggccgtcctcaaacaaagagttgacagaagtcgaaaaaggcttggtaaaggacaagataattgtggtgccactcaaggaaaacagtgccttagccaaagggagcccatcatcccagagcatccctgagaaaaactccaaatcactgtgcaggactggctcatgttcagaactagatgcctgccccagcaaaattagccagccagccaggggattctgccccagggaggtgacggtagaacacaccaccaacatccttgaagaccattctttcacagaatttatgggagtgtcagagggaaaagattttgatggtttgacagattcttctgctggagagctttccagtaggaggagtctaccaaataaaacaggcggcaagactgtctccgatgggctccaccaccccagccagctgcattccaagttagagaatgaccaggtaataattccagaggcagccttttgggttctgtgctgtcaatgagtatgtctaactgtatgtcaaccccagaggcccttcaccgcaacaacttggtaggaaagattcatccagttgtttgtgacagcaaagatgagcccacagagaagcaggctcacttcctgcacagctgtctctgtcggagagcaagtctgttttgggaactagaacgcaattgtgaaattataagaccagtggatttttttacctggcacatgggttggtgttgaatgaagtgttcagatggataaggatcaatctcatattcattccctgggatgtttagttaccagttttcccaaagtgttctggtagcatctaccatatttcatcaaatctgtgattcctttgattattatatgaaccattattttatgtatcattaagaaaaaatactgccaattaaactctgtcatatcaa

SEQ ID NO: 41753 - DNA, 5274 bp, Artificial Sequence
  derived and/or modified sequence
atgtctgacaccaaggtgaaggtggccgtgcgggtgcggcccatgaacagaagagagctggagctgaacaccaagtgtgtggtggagatggagggcaaccagacagtgctgcaccccccacccagcaacaccaagcagggcgagaggaagccacccaaggtgtttgcctttgactactgcttctggagcatggatgagagcaacaccaccaagtatgccggccaggaggtggtgttcaagtgcctgggggagggcatcctggagaaggccttccagggctacaatgcctgcatctttgcctacggccagacaggcagcggcaagagcttctccatgatgggccacgccgagcagctgggcctcatcccccggctgtgctgtgccctcttcaagaggatcagcctggagcagaatgaaagccagaccttcaaggtggaggtgtcctacatggagatctacaatgagaaggtgcgggacctgctggaccccaagggcagccggcagagcctgaaggtgcgggagcacaaggtgctgggcccctacgtggatggcctgagccagctggccgtgaccagctttgaggacatcgagagcctgatgtctgagggcaacaagagcaggacagtggccgccaccaacatgaatgaggagagcagccgcagccatgctgtgttcaacatcatcatcacccagaccctgtatgacctgcagagcggcaacagcggggagaaggtgtccaaggtgtccctggtggacctggccggcagcgagcgggtgtccaagacaggagctgctggggagcggctgaaggagggcagcaacatcaacaagagcctgaccaccctgggcctggtgatcagcagcctggccgaccaggccgccggcaagggcaagagcaagtttgtgccctacagagattctgtgctgacctggctgctgaaggacaacctgggcggcaacagccagacctccatgattgccaccatcagccctgctgctgacaactatgaggagaccctgagcaccctgcgctatgctgaccgggccaagagaattgtgaaccacgctgtggtgaatgaagaccccaatgccaaggtgatccgggagctgcgggaggaggtggagaagctgcgggagcagctgagccaggccgaggccatgaaggcccctgagctgaaggagaagctggaggagagcgagaagctgatcaaggagctgactgtgacctgggaggagaagctgaggaagacagaggagatcgcccaggagcggcagaggcagctggagagcatgggcatcagcctggagatgagcggcatcaaggtgggagatgacaagtgctacctggtgaacctgaatgctgaccctgccctgaatgagctgctggtgtactacctgaaggaccacaccagggtgggcgctgacaccagccaggacatccagctgtttggaattggcatccagccccagcactgtgaaattgacatcgccagtgatggagatgtgaccctgacccccaaggaaaatgcccggagctgtgtgaatggcaccctggtgtgcagcaccacccagctgtggcatggagaccgcatcctgtggggcaacaaccacttcttccgcatcaacctgcccaagaggaagaggcgggactggctgaaggactttgagaaggagactggacctcctgagcatgacctggatgctgccagcgaggccagcagcgagccagactacaactatgaatttgcccagatggaggtgatcatgaagaccctgaacagcaatgaccctgtgcagaatgtggtgcaggtgctggagaagcagtacctggaggagaagaggtctgccctggaggagcagaggctgatgtatgaaagagagctggagcagctgcggcagcagctgagcccagaccggcagccccagagcagcggccctgaccggctggcctacagcagccagacagcccagcagaaggtgacccagtgggccgaggagagagatgagctgttccggcagagcctggccaagctgcgggagcagctggtgaaggccaacaccctggtgcgggaggccaacttcctggccgaggagatgagcaagctgacagactaccaggtgaccctgcagatcccagctgccaacctgagcgccaacaggaagagaggagccatcgtgtctgagcccgccatccaggtgcggaggaagggcaagagcacccaggtgtggaccatcgagaagctggagaacaagctgattgacatgagggacctgtaccaggagtggaaggagaaggtgcctgaggccaagaggctgtatggcaagagaggagaccccttctatgaggcccaggagaaccacaacctgattggagtggccaacgtgttcctggagtgcctcttctgtgatgtgaagctgcagtatgctgtgcccatcatcagccagcagggcgaggtggccggccgcctgcacgtggaggtgatgagggtgactggagctgtgcctgagcgggtggtggaggatgacagcagcgagaacagcagcgagagcggcagcctggaggtggtggacagcagtggagagatcatccaccgggtgaagaagctgacctgccgggtgaagatcaaggaggccaccggcctgcccctgaacctgagcaactttgtgttctgccagtacaccttctgggaccagtgtgagagcacagtggccgcccctgtggtggaccctgaggtgcccagcccccagagcaaggatgcccagtacacagtgaccttcagccactgcaaggactatgtggtgaatgtgacagaggagttcctggagttcatcagtgatggagccctggccatcgaggtgtggggccaccgctgtgctggaaatggcagcagcatctgggaggtggacagcctgcacgccaagaccaggaccctgcatgaccgctggaatgaggtgaccaggagaattgagatgtggatcagcatcctggagctgaatgagctgggggagtatgctgctgtggagctgcaccaggccaaggatgtgaacacaggaggcatcttccagctgcggcagggccacagcagaagagtgcaggtgacagtgaagcctgtgcagcacagcggcaccctgcccctgatggtggaggccatcctgtctgtgtccatcggctgtgtgacagcccggagcaccaagctgcagaggggcctggacagctaccaggaggaggacctgaactgtgtgcgggagcgctggagcgatgccctgatcaagaggcgggagtacctggatgagcagatcaagaaggtgagcaacaagacagagaagacagaagatgatgtggagcgggaggcccagctggtggagcagtgggtgggcctgacagaggagagaaatgctgtgctggtgcctgcccctggcagcggcatccctggggccccagctgactggatccccccacctggcatggagacccacatccctgtgctcttcctggacctgaatgctgatgacctgagcgccaatgagcagctggtgggcccccacgccagcggcgtgaacagcatcctgcccaaggagcacggcagccagttcttctacctgcccatcatcaagcacagtgatgatgaggtgtctgccacagcctcctgggacagctctgtgcatgacagcgtgcacctgaacagagtgaccccccagaatgaaagaatctacctgattgtgaagaccaccgtgcagctgagccaccctgctgccatggagctggtgctgaggaagagaattgctgccaacatctacaacaagcagagcttcacccagagcctgaagaggcgcatcagcctgaagaacatcttctacagctgtggggtgacctatgagatcgtgagcaacatccccaaggccacagaggagattgaggaccgggagaccctggccctgctggccgcccggagtgaaaatgaaggcaccagtgatggagagacctacatcgagaagtacacccggggcgtgctgcaggtggagaacatcctgagcctggagcggctgcggcaggccgtgacagtgaaggaggccctgagcaccaaggcccggcacatcagaagaagcctgagcacccccaacgtgcacaacgtgagcagcagcaggccagacctgagcggctttgatgaagatgacaagggctggccagagaaccagctggacatgtctgactacagcagcagctaccaggatgtggcctgctacggcaccctgccccgggacagccccaggaggaacaaggagggctgcaccagcgagaccccccacgccctgactgtgagccccttcaaggccttcagcccccagccccccaagttcttcaagcccctgatgcctgtgaaggaggagcacaagaagagaattgccctggaggcccggcccctgctgagccaggaggacagcgaggaggaggagaatgagctggaggccatcaacaggaagctgatcagcagccagccctacgtgcctgtggagtttgctgacttctctgtgtacaatgccagcctggagaaccgggagtggttcagcagcaaggtggacctgagcaacagccgggtgctggagaaggaggtgagccgcagccccaccaccagcagcatcaccagcggctacttcagccacagcgccagcaatgccaccctgagtgacatggtggtgcccagcagtgacagcagtgaccagctggccatccagaccaaggatgctgacagcacagagcacagcacccccagcctggtgcatgacttccggcccagcagcaacaaggagctgacagaggtggagaagggcctggtgaaggacaagatcatcgtggtgcccctgaaggaaaattctgccctggccaagggcagccccagcagccagagcatccctgagaagaacagcaagagcctgtgcaggacaggcagctgcagcgagctggatgcctgccccagcaagatcagccagcctgcccggggcttctgcccccgggaggtgacagtggagcacaccaccaacatcctggaggaccacagcttcacagagttcatgggcgtgtctgagggcaaggactttgatggcctgacagacagcagcgctggggagctgagcagcagaagaagcctgcccaacaagacaggaggcaagacagtgtctgatggcctgcaccaccccagccagctgcacagcaagctggagaatgaccaggtgatcatccctgaggccgccttctgggtgctgtgctgccagtag

SEQ ID NO: 41754 - DNA, 5274 bp, Artificial Sequence
  derived and/or modified sequence
atgagcgacaccaaggtgaaggtggccgtgcgggtgcggcccatgaatagaagggagctcgagctcaatactaaatgcgtagtggaaatggagggaaatcagaccgtgctccatccccctccatccaacactaagcaaggagagaggaaaccccctaaagtgttcgcgtttgattattgtttctggagcatggatgagagcaacaccaccaagtacgccgggcaggaagtcgtttttaaatgcttgggcgagggaatattagaaaaggcctttcagggatataacgcctgtatcttcgcatacggacagacaggtagtggcaagtccttcagtatgatgggtcacgcagagcagctggggctaatcccaaggctctgttgtgccctgttcaaaagaatctccctggaacagaatgagagccaaaccttcaaagttgaggtgagctacatggagatctacaatgagaaagttcgtgatctcttggaccccaagggctcccgacagagccttaaggttcgcgaacataaggtgttaggcccctatgtggacggtcttagccagcttgcagtcacctcctttgaagacatcgaaagtctgatgtcagagggcaataaaagtcgcaccgtggcagccactaacatgaacgaggagagcagccggtcccatgccgtgtttaacattattataacccagaccttatatgaccttcaatccggcaacagcggagaaaaggtgtccaaggtgtccctagtggacctggccgggtcagaacgagtgagtaagaccggcgcagcaggagagcgcctgaaggaggggagcaatatcaataagagccttacaactctggggttggtcatttctagtttggccgatcaggccgccggcaagggcaaatctaagtttgtgccgtatagggacagtgtgttaacctggctcctgaaggataacttgggcggcaactcgcaaacatcaatgatcgctacaatcagcccagctgcagacaattatgaggaaaccttgtctacgctccgctacgccgatcgggccaaacgcattgtaaaccacgctgtagtcaacgaggatccgaatgctaaggtaatccgcgagctgcgcgaagaagtggagaagcttcgtgaacagctgtcgcaggctgaagcgatgaaggcccctgaacttaaggaaaagctggaggaaagcgagaagctcattaaggaactaaccgtaacatgggaagagaagctgagaaagactgaagagattgctcaggaacgccagcgccagttggagagtatgggtataagtcttgagatgtccgggattaaggttggcgacgacaagtgctacttagtgaacctgaacgccgaccccgcattgaatgagctcctcgtatactatttaaaagaccatactcgagtaggagcagataccagtcaggatattcaacttttcggtattggtatccagccacagcactgcgagattgatatagcttctgatggggacgttaccctgacccccaaagagaacgctcgcagctgcgtcaacggcaccctcgtttgtagtacaacacagctgtggcatggtgatcgaatcctctggggcaataatcactttttccggatcaacctcccgaaacgcaagaggcgtgattggctgaaggacttcgaaaaggagacaggccctcctgaacacgacctggatgctgctagtgaggccagcagcgagcccgattacaattatgaattcgcccagatggaagtaataatgaaaacgctgaactctaacgatccagtccagaacgtggtgcaggtgctggagaaacagtacctggaggagaaacgcagcgcgttggaggaacagcggttaatgtacgagcgggagttagagcaacttcggcagcagctcagccctgacaggcaaccccagtcatccggtccagaccgcctagcgtatagtagtcagaccgcccagcagaaggtgacccagtgggccgaagagagggacgagctatttcgccagagcctggctaaactccgggaacagctagttaaggccaatactttggtcagagaagcaaattttctggccgaggagatgagtaaactaaccgactaccaggtcacattacagataccagccgcaaacctcagcgcaaacagaaagcggggtgctatcgtaagcgaacctgccatccaggtgaggaggaaaggcaaatctacccaggtgtggacgatcgagaagctcgaaaacaagctgatagacatgagggacctctatcaagaatggaaggagaaggttcctgaagcgaagaggctgtacggtaaacgaggagatcctttctacgaggcccaggagaatcataatcttatcggcgtcgccaatgtttttttggaatgtctattttgcgacgtgaagctgcagtatgccgtgccaatcatctcccaacagggggaggtggccggcagattacatgtggaagtgatgcgggttaccggcgccgtccctgagcgggtggttgaggatgactccagcgaaaactcgtctgagagcggatctttggaggttgtggattcctcaggcgagataatacaccgggtgaaaaaattgacatgccgagtaaagattaaagaggcaaccggactgcccctgaatctttctaacttcgtgttttgtcagtatactttttgggaccaatgcgaatctaccgtggctgcacctgtcgtcgaccccgaagtcccatcccctcagtccaaggacgcgcagtacacagtgacttttagccactgtaaggactatgtggtcaatgtaaccgaggagttcttggagttcatatctgatggggctcttgcaattgaggtgtggggtcaccggtgtgctggcaacggcagttctatttgggaggtggactcacttcacgccaagactcggaccttacacgaccgttggaacgaagtgaccagacggattgagatgtggatctccatactggaactgaatgagctgggcgaatacgccgcagtcgaactgcaccaggcaaaggacgtcaatactgggggcatcttccaattaagacaaggacactctaggagagtccaagtgacagtgaaaccggtacagcatagcggcaccctgccgttaatggttgaggccatcctctcagtgagcatcggctgtgttacggcgaggagcacaaagttgcaaagagggttggactcctatcaggaagaagacctcaattgtgtcagagagaggtggtccgacgcgctcataaagcgtcgggagtacctcgacgaacagataaaaaaagtctccaacaagaccgagaagacggaggacgacgtcgagagagaggcgcaacttgtggagcagtgggtgggattgactgaagagaggaatgcagtgctcgtaccagctcctggctctgggataccaggggcacccgccgactggatccctcctccaggcatggaaacacacatacccgtgctttttctagatctcaacgctgatgacctgtctgccaacgagcagctggtgggtccgcatgcttccggagtgaattcaattctccctaaggaacatgggtctcaatttttctacctgccaattattaagcacagcgacgacgaggtgtccgccacagcctcgtgggattcatccgttcatgattccgttcatttaaacagggtgaccccccagaacgagcgaatctatttgatagtaaagactaccgtacagctttcccaccctgcggcgatggagctggtgctgcggaagcgaatcgcggccaacatctataacaagcaatcgttcacacaaagcctcaagcgtcggattagcttgaagaacatcttctattcttgcggtgttacttacgaaatcgtgtctaatataccaaaggccacagaggaaatcgaggaccgggagacccttgctctgctggccgctcggagcgagaatgagggcacatcagacggggaaacatacatcgaaaagtacactcggggggtgcttcaggtagaaaacatactgagtctcgaacggttacgtcaggctgttactgtcaaggaggccctcagcactaaggcccgccatattcgaagatctctcagcactccgaacgtacataacgtaagcagcagccggcccgacctgtcaggcttcgatgaggatgataaagggtggcctgaaaatcagttagacatgtctgattattccagcagttaccaagacgtcgcctgctacgggaccttaccaagagattcccctagacggaacaaggagggttgcacctccgaaacccctcatgctctaacagtgtctccgtttaaggcattctctccccagccccccaagttcttcaaacccttaatgcccgttaaagaggaacacaagaaacgcatcgccctggaggcacgaccactgctctcccaggaagattcagaagaggaggaaaacgagttagaggccatcaataggaaactgatcagctctcaaccgtatgttccggttgaatttgccgatttttcagtgtacaatgcatcattggaaaacagggaatggttctcgtcaaaagtggacctgtctaatagcagagtcctggagaaagaagtgtccaggtcccctaccactagtagcattacatctggctatttttcccactcagcttccaatgcaacactttcagatatggttgtccccagtagtgactcctcagatcagcttgccatccagacaaaagatgccgatagtacagagcatagtacccctagcctggtgcatgatttccgccccagctctaacaaggaacttactgaggtggagaagggcctagttaaagacaagatcatcgtggttccgctcaaagaaaattcagccttggctaagggttctccctccagtcagagcattccagaaaagaactctaaatcactgtgcaggacgggcagttgctctgagttggatgcttgcccctccaaaattagtcaaccggcgcgaggattctgtccgcgtgaagttaccgtcgagcacacgaccaatatcctggaggaccactcctttaccgagttcatgggtgtctctgagggcaaagatttcgatggtctgacggattcttccgctggcgagttaagttctaggagatccctaccaaataagaccggaggaaagacagtgtccgatggcttgcatcacccatctcagctccacagcaaactggagaatgatcaagtgatcattccggaagccgctttctgggttttatgctgtcagtag

SEQ ID NO: 41755 - DNA, 5273 bp, Artificial Sequence
  derived and/or modified sequence
atgagcgacaccaaggtgaaggtcgcggttagagtcaggccaatgaatcgcagggagctagaactgaataccaagtgcgtcgtcgagatggaaggcaatcagacagtcctgcatccacctccctcgaatacaaaacagggggaacgcaaaccgcctaaggtgtttgcctttgactactgtttctggtctatggacgaatctaatacaacgaaatacgccggacaggaagtcgtatttaagtgcctcggagagggcatcctggagaaagcctttcagggctacaatgcatgtatcttcgcctatggccagacgggctcggggaagtcgttttcaatgatgggccacgctgaacagctcgggctgattccgcgtctgtgttgtgccctgttcaagcgcatttctttggaacagaacgagtcccaaacattcaaggtcgaagtaagttacatggaaatctacaacgagaaagtgcgggacctgctggacccaaaggggtctaggcaatcattaaaggtaagggagcacaaagtcctcggaccttacgtagatgggctgtcccaattggccgtgacctccttcgaggacatcgagagcctgatgtcagaaggtaataagtcccggactgtcgccgcaacgaatatgaacgaggagtcttcccgttcacatgcggtgttcaacattatcatcacacagactctgtatgatctgcagtccgggaactcaggtgagaaggtaagtaaggtttccctggtcgatctggccggaagcgagcgcgttagcaaaaccggcgcagccggtgagcggctcaaggagggatctaatatcaacaaatcgctgaccacactcggtctcgttatctcctctctggcagaccaggccgctggtaaaggaaagagtaagttcgtgccctaccgcgacagtgttctaacctggctgctcaaggacaacctcggagggaacagccagacatcgatgatagccactatcagtcccgcagcagataactatgaagagactctgagtactctccggtatgcagatagagctaagaggatcgtcaaccacgcagtggtgaatgaagacccaaacgccaaagtgatcagggagctgagggaggaggtggagaagctgcgggagcagctgtcccaggccgaagcaatgaaagctcccgaacttaaagagaagctggaagagtctgaaaagcttatcaaggagctaaccgtgacctgggaagagaagctgaggaagaccgaggaaatcgctcaggaacgccaaagacaactagagagcatgggcatcagtctagaaatgagcggcatcaaggtgggggatgacaagtgttatctagttaatctaaacgccgacccggctctgaacgaactgttagtatattacctcaaggatcacaccagggtcggcgcagatacatcccaggatatccagctttttggtatcggtatacagcctcagcactgtgaaatcgacatcgcttctgacggtgatgtgaccttgacccctaaagagaatgcgaggagctgcgttaacggtactctggtctgctccacaactcaactctggcatggtgaccgaatcctatggggcaacaatcacttcttccgaatcaacctgcctaaaaggaagcgtcgcgactggttaaaagactttgagaaggaaaccggacctccggagcacgatctcgatgcagcaagcgaggcctcaagtgaacccgactacaattacgaatttgcccagatggaggtaatcatgaagacactaaactctaacgatcctgtccaaaatgtagttcaggtactcgagaagcagtacctcgaggagaaaagaagcgccctagaagaacagagactgatgtacgagcgagaattagagcagttgagacagcagttaagccctgatagacagccacagagttcaggaccagatagactggcctatagcagccaaacggctcagcagaaagtgactcagtgggcagaagagagggatgagctattccgccagagcctcgctaaattgcgggaacagctggtcaaggccaataccctcgtcagagaggccaatttcctggcagaagagatgtcaaagttaacagattatcaagtgacactccaaatccccgcagccaacctctcagccaacaggaagagaggtgcgattgtgagtgagccagcaatccaggtccgcaggaagggcaagtcaacacaggtctggaccatcgagaagctggagaacaagttgatcgatatgcgagacctgtaccaggagtggaaagagaaagtgcccgaggctaagagactctacggaaaacggggagaccctttttatgaggcccaggaaaatcacaacctgattggagtagccaacgtatttctggagtgcctcttctgcgatgtcaagcttcaatatgcagtccccatcatctcccaacagggcgaggtagccggaaggctgcacgtggaagtgatgcgggtcacgggtgccgtgccagaacgggtggtagaggacgatagttcagagaatagctctgagtcgggctccttggaggtcgtcgatagttccggagaaatcatccatcgcgtaaaaaagcttacatgtcgggtcaagatcaaagaagcaaccgggctgcccctgaatttatcaaactttgttttttgccagtatactttttgggaccagtgcgaatccaccgtagccgctccagtggtggatccggaagtaccgagcccacagtcgaaggatgcccagtatacggtcaccttttctcactgtaaggactatgtagtgaacgtgacagaagagtttctggagtttataagcgacggagcactcgccattgaggtgtggggccatcggtgtgccggaaacgggagctccatatgggaggtcgactccttgcatgctaagacaaggaccttgcatgatagatggaacgaagtaacacggaggatcgagatgtggatatctatcctggagctcaacgaactgggcgagtacgctgccgtggagctgcaccaggctaaagacgttaataccggtggaatttttcagctccgacagggacatagtcgaagggtacaggttaccgtaaagcctgttcagcacagtggcactcttcctcttatggtggaagccatcctctccgtctcaattgggtgtgtcacagccaggtcaactaagctacagcgtgggctggactcttatcaagaggaagacctgaactgtgtgcgggagaggtggtcagatgctctgattaagcgaagggaatacctggatgaacaaatcaagaaagtgtcgaataagaccgaaaagactgaggacgacgtggaacgcgaggcacagctggtggagcagtgggtgggtttgacggaagaacgcaacgctgtactagttcccgcaccaggttccgggatcccgggagccccagcagactggatacctccacctggcatggaaactcacatccccgtgctattcttggacctgaacgcagatgaccttagtgctaacgagcagctggtcggcccacatgcgtctggcgtaaattctattctccccaaagagcacggttcgcagttcttctaccttcccattatcaaacactccgatgatgaggtgtctgccactgcctcgtgggattcatccgtgcacgattcggtccacctaaaccgagtaacaccccagaatgagaggatctacttgatcgtaaaaacaactgtgcagttaagtcacccagctgccatggaactggtgctaagaaaacgtatcgctgccaatatctataacaaacagtcgttcacccaatctcttaagcgacggatctctctcaagaatattttttactcgtgtggggtgacctatgagatagtgtcaaacattccaaaagcaacagaggagatagaagaccgggaaacactagcactgcttgccgctaggagcgaaaacgaaggaacatcagacggcgaaacatacatagaaaaatatacaaggggggtcttacaggtagagaacattttgtccctggaaaggcttcgccaagccgtcaccgttaaggaggctttgagtaccaaggccaggcatatcagaagatcactgtccacgcctaatgttcacaatgtgtcttcatcacggcctgatctgagcggcttcgatgaagacgacaagggttggcctgagaaccagttggatatgagcgattatagctctagttaccaggacgtggcctgctacggtacactgccaagggacagcccccgaagaaacaaagagggctgcacttccgaaactccccacgccctgacggtgagcccattcaaggccttttcaccccagcctcctaagttctttaaacccttgatgcctgtgaaggaagagcataagaagcgcattgctctggaggctagacccctgttaagtcaagaggattccgaagaggaggagaacgagttagaggcaataaataggaaactcatctcttcccagccatacgtcccggtggaatttgcagattttagtgtgtataacgcatcgctcgagaaccgtgaatggtttagctctaaggttgacttgtctaattctcgcgtcctcgagaaggaggtctcaaggagtccaaccacttcctccattacctccggatatttctcacactctgcctctaacgctaccctgtctgacatggttgtcccatctagcgatagcagtgaccaactggctatccagactaaagatgccgactcaacagagcacagtacaccaagtctggtgcatgatttccggccaagctcaaacaaggagctgaccgaggtggaaaaaggccttgtgaaggacaagattatcgtggtccccctaaaggaaaacagcgcattagcaaaaggaagcccctctagtcagagcatccccgagaagaattccaaatcgttatgtcggaccggctcatgcagcgagctggacgcgtgtccatccaaaatcagccagcccgctaggggtttctgccctcgcgaggtgacagtagagcataccaccaatattctggaggaccacagtttcactgagtttatgggtgtctctgaaggaaaggactttgacggcctcaccgactcctccgccggtgagctgtcatcaaggcgttctctacccaacaaaacggggggtaagaccgtgagtgatggcctgcaccatccgtctcagctacacagtaagctcgagaacgatcaggttattattccagaagcagccttctgggtcctctgttgccagta

SEQ ID NO: 41756 - DNA, 5274 bp, Artificial Sequence
  derived and/or modified sequence
atgagcgacaccaaggtgaaggtggccgtgagagtgagacccatgaacagaagagagctggagctgaacaccaagtgcgtggtggagatggagggcaaccagaccgtgctgcaccccccccccagcaacaccaagcagggcgagagaaagccccccaaggtgttcgccttcgactactgcttctggagcatggacgagagcaacaccaccaagtacgccggccaggaggtggtgttcaagtgcctgggcgagggcatcctggagaaggccttccagggctacaacgcctgcatcttcgcctacggccagaccggcagcggcaagagcttcagcatgatgggccacgccgagcagctgggcctgatccccagactgtgctgcgccctgttcaagagaatcagcctggagcagaacgagagccagaccttcaaggtggaggtgagctacatggagatctacaacgagaaggtgagagacctgctggaccccaagggcagcagacagagcctgaaggtgagagagcacaaggtgctgggcccctacgtggacggcctgagccagctggccgtgaccagcttcgaggacatcgagagcctgatgagcgagggcaacaagagcagaaccgtggccgccaccaacatgaacgaggagagcagcagaagccacgccgtgttcaacatcatcatcacccagaccctgtacgacctgcagagcggcaacagcggcgagaaggtgagcaaggtgagcctggtggacctggccggcagcgagagagtgagcaagaccggcgccgccggcgagagactgaaggagggcagcaacatcaacaagagcctgaccaccctgggcctggtgatcagcagcctggccgaccaggccgccggcaagggcaagagcaagttcgtgccctacagagacagcgtgctgacctggctgctgaaggacaacctgggcggcaacagccagaccagcatgatcgccaccatcagccccgccgccgacaactacgaggagaccctgagcaccctgagatacgccgacagagccaagagaatcgtgaaccacgccgtggtgaacgaggaccccaacgccaaggtgatcagagagctgagagaggaggtggagaagctgagagagcagctgagccaggccgaggccatgaaggcccccgagctgaaggagaagctggaggagagcgagaagctgatcaaggagctgaccgtgacctgggaggagaagctgagaaagaccgaggagatcgcccaggagagacagagacagctggagagcatgggcatcagcctggagatgagcggcatcaaggtgggcgacgacaagtgctacctggtgaacctgaacgccgaccccgccctgaacgagctgctggtgtactacctgaaggaccacaccagagtgggcgccgacaccagccaggacatccagctgttcggcatcggcatccagccccagcactgcgagatcgacatcgccagcgacggcgacgtgaccctgacccccaaggagaacgccagaagctgcgtgaacggcaccctggtgtgcagcaccacccagctgtggcacggcgacagaatcctgtggggcaacaaccacttcttcagaatcaacctgcccaagagaaagagaagagactggctgaaggacttcgagaaggagaccggcccccccgagcacgacctggacgccgccagcgaggccagcagcgagcccgactacaactacgagttcgcccagatggaggtgatcatgaagaccctgaacagcaacgaccccgtgcagaacgtggtgcaggtgctggagaagcagtacctggaggagaagagaagcgccctggaggagcagagactgatgtacgagagagagctggagcagctgagacagcagctgagccccgacagacagccccagagcagcggccccgacagactggcctacagcagccagaccgcccagcagaaggtgacccagtgggccgaggagagagacgagctgttcagacagagcctggccaagctgagagagcagctggtgaaggccaacaccctggtgagagaggccaacttcctggccgaggagatgagcaagctgaccgactaccaggtgaccctgcagatccccgccgccaacctgagcgccaacagaaagagaggcgccatcgtgagcgagcccgccatccaggtgagaagaaagggcaagagcacccaggtgtggaccatcgagaagctggagaacaagctgatcgacatgagagacctgtaccaggagtggaaggagaaggtgcccgaggccaagagactgtacggcaagagaggcgaccccttctacgaggcccaggagaaccacaacctgatcggcgtggccaacgtgttcctggagtgcctgttctgcgacgtgaagctgcagtacgccgtgcccatcatcagccagcagggcgaggtggccggcagactgcacgtggaggtgatgagagtgaccggcgccgtgcccgagagagtggtggaggacgacagcagcgagaacagcagcgagagcggcagcctggaggtggtggacagcagcggcgagatcatccacagagtgaagaagctgacctgcagagtgaagatcaaggaggccaccggcctgcccctgaacctgagcaacttcgtgttctgccagtacaccttctgggaccagtgcgagagcaccgtggccgcccccgtggtggaccccgaggtgcccagcccccagagcaaggacgcccagtacaccgtgaccttcagccactgcaaggactacgtggtgaacgtgaccgaggagttcctggagttcatcagcgacggcgccctggccatcgaggtgtggggccacagatgcgccggcaacggcagcagcatctgggaggtggacagcctgcacgccaagaccagaaccctgcacgacagatggaacgaggtgaccagaagaatcgagatgtggatcagcatcctggagctgaacgagctgggcgagtacgccgccgtggagctgcaccaggccaaggacgtgaacaccggcggcatcttccagctgagacagggccacagcagaagagtgcaggtgaccgtgaagcccgtgcagcacagcggcaccctgcccctgatggtggaggccatcctgagcgtgagcatcggctgcgtgaccgccagaagcaccaagctgcagagaggcctggacagctaccaggaggaggacctgaactgcgtgagagagagatggagcgacgccctgatcaagagaagagagtacctggacgagcagatcaagaaggtgagcaacaagaccgagaagaccgaggacgacgtggagagagaggcccagctggtggagcagtgggtgggcctgaccgaggagagaaacgccgtgctggtgcccgcccccggcagcggcatccccggcgcccccgccgactggatccccccccccggcatggagacccacatccccgtgctgttcctggacctgaacgccgacgacctgagcgccaacgagcagctggtgggcccccacgccagcggcgtgaacagcatcctgcccaaggagcacggcagccagttcttctacctgcccatcatcaagcacagcgacgacgaggtgagcgccaccgccagctgggacagcagcgtgcacgacagcgtgcacctgaacagagtgaccccccagaacgagagaatctacctgatcgtgaagaccaccgtgcagctgagccaccccgccgccatggagctggtgctgagaaagagaatcgccgccaacatctacaacaagcagagcttcacccagagcctgaagagaagaatcagcctgaagaacatcttctacagctgcggcgtgacctacgagatcgtgagcaacatccccaaggccaccgaggagatcgaggacagagagaccctggccctgctggccgccagaagcgagaacgagggcaccagcgacggcgagacctacatcgagaagtacaccagaggcgtgctgcaggtggagaacatcctgagcctggagagactgagacaggccgtgaccgtgaaggaggccctgagcaccaaggccagacacatcagaagaagcctgagcacccccaacgtgcacaacgtgagcagcagcagacccgacctgagcggcttcgacgaggacgacaagggctggcccgagaaccagctggacatgagcgactacagcagcagctaccaggacgtggcctgctacggcaccctgcccagagacagccccagaagaaacaaggagggctgcaccagcgagaccccccacgccctgaccgtgagccccttcaaggccttcagcccccagccccccaagttcttcaagcccctgatgcccgtgaaggaggagcacaagaagagaatcgccctggaggccagacccctgctgagccaggaggacagcgaggaggaggagaacgagctggaggccatcaacagaaagctgatcagcagccagccctacgtgcccgtggagttcgccgacttcagcgtgtacaacgccagcctggagaacagagagtggttcagcagcaaggtggacctgagcaacagcagagtgctggagaaggaggtgagcagaagccccaccaccagcagcatcaccagcggctacttcagccacagcgccagcaacgccaccctgagcgacatggtggtgcccagcagcgacagcagcgaccagctggccatccagaccaaggacgccgacagcaccgagcacagcacccccagcctggtgcacgacttcagacccagcagcaacaaggagctgaccgaggtggagaagggcctggtgaaggacaagatcatcgtggtgcccctgaaggagaacagcgccctggccaagggcagccccagcagccagagcatccccgagaagaacagcaagagcctgtgcagaaccggcagctgcagcgagctggacgcctgccccagcaagatcagccagcccgccagaggcttctgccccagagaggtgaccgtggagcacaccaccaacatcctggaggaccacagcttcaccgagttcatgggcgtgagcgagggcaaggacttcgacggcctgaccgacagcagcgccggcgagctgagcagcagaagaagcctgcccaacaagaccggcggcaagaccgtgagcgacggcctgcaccaccccagccagctgcacagcaagctggagaacgaccaggtgatcatccccgaggccgccttctgggtgctgtgctgccagtag

SEQ ID NO: 41757 - protein, 1749 aa, Artificial Sequence
  derived and/or modified sequence
MSDTKVKVAVRVRPMNRRELELNTKCVVEMEGNQTVLHPPPSNTKQGERKPPKVFAFDYCFWSMDESNTTKYAGQEVVFKCLGEGILEKAFQGYNACIFAYGQTGSGKSFSMMGHAEQLGLIPRLCCALFKRISLEQNESQTFKVEVSYMEIYNEKVRDLLDPKGSRQSLKVREHKVLGPYVDGLSQLAVTSFEDIESLMSEGNKSRTVAATNMNEESSRSHAVFNIIITQTLYDLQSGNSGEKVSKVSLVDLAGSERVSKTGAAGERLKEGSNINKSLTTLGLVISSLADQAAGKGKSKFVPYRDSVLTWLLKDNLGGNSQTSMIATISPAADNYEETLSTLRYADRAKRIVNHAVVNEDPNAKVIRELREEVEKLREQLSQAEAMKAPELKEKLEESEKLIKELTVTWEEKLRKTEEIAQERQRQLESMGISLEMSGIKVGDDKCYLVNLNADPALNELLVYYLKDHTRVGADTSQDIQLFGIGIQPQHCEIDIASDGDVTLTPKENARSCVNGTLVCSTTQLWHGDRILWGNNHFFRINLPKRKRRDWLKDFEKETGPPEHDLDAASEASSEPDYNYEFAQMEVIMKTLNSNDPVQNVVQVLEKQYLEEKRSALEEQRLMYERELEQLRQQLSPDRQPQSSGPDRLAYSSQTAQQKVTQWAEERDELFRQSLAKLREQLVKANTLVREANFLAEEMSKLTDYQVTLQIPAANLSANRKRGAIVSEPAIQVRRKGKSTQVWTIEKLENKLIDMRDLYQEWKEKVPEAKRLYGKRGDPFYEAQENHNLIGVANVFLECLFCDVKLQYAVPIISQQGEVAGRLHVEVMRVTGAVPERVVEDDSSENSSESGSLEVVDSSGEIIHRVKKLTCRVKIKEATGLPLNLSNFVFCQYTFWDQCESTVAAPVVDPEVPSPQSKDAQYTVTFSHCKDYVVNVTEEFLEFISDGALAIEVWGHRCAGNGSSIWEVDSLHAKTRTLHDRWNEVTRRIEMWISILELNELGEYAAVELHQAKDVNTGGIFQLRQGHSRRVQVTVKPVQHSGTLPLMVEAILSVSIGCVTARSTKLQRGLDSYQEEDLNCVRERWSDALIKRREYLDEQIKKVSNKTEKTEDDVEREAQLVEQWVGLTEERNAVLVPAPGSGIPGAPADWIPPPGMETHIPVLFLDLNADDLSANEQLVGPHASGVNSILPKEHGSQFFYLPIIKHSDDEVSATASWDSSVHDSVHLNRVTPQNERIYLIVKTTVQLSHPAAMELVLRKRIAANIYNKQSFTQSLKRRISLKNIFYSCGVTYEIVSNIPKATEEIEDRETLALLAARSENEGTSDGETYIEKYTRGVLQVENILSLERLRQAVTVKEALSTKARHIRRSLSTPNVHNVSSSRPDLSGFDEDDKGWPENQLDMSDYSSSYQDVACYGTLPRDSPRRNKEGCTSETPHALTVSPFKAFSPQPPKFFKPLMPVKEEHKKRIALEARPLLSQEDSEEEENELEAINRKLISSQPYVPVEFADFSVYNASLENREWFSSKVDLSNSRVLEKEVSRSPTTSSITSGYFSHSASNATLSDMVVPSSDSSDQLAIQTKDADSTEHSTPSLVHDFRPSSNKELTEVEKGLVKDKIIVVPLKENSALAKGSPSSQSIPEKNSKSLCRTGSCSELDACPSKISQPARGFCPREVTVEHTTNILEDHSFTEFMGVSEGKDFDGLTDSSAGELSSRRSLPNKTGGKTVSDGLHHPSQLHSKLENDQGGTTSR

SEQ ID NO: 41758 - DNA, 5250 bp, Artificial Sequence
  derived and/or modified sequence
atgtctgacacaaaagtcaaagtggcagtccgtgttcgccctatgaatcggagagaactcgagctgaacaccaaatgtgtcgtggagatggagggtaaccagacggttctgcacccaccgccctcaaacacaaaacagggtgaaaggaagccgccaaaagtcttcgcatttgactactgcttttggtcaatggatgaatcaaacacaacaaagtatgctggacaggaggtggtctttaagtgcctgggggaaggcatcctggaaaaagcattccagggttataacgcatgtatatttgcctatggacagaccggctctggtaagtcattcagtatgatgggacatgccgagcagttgggacttattccacgcctttgctgcgcattgtttaaacggatttctctggaacagaacgaatcccaaacatttaaggtggaggtctcttatatggagatctataacgagaaagtccgggatctgcttgatccgaaaggttctagacaatctcttaaggttagggagcacaaggtgctgggcccctacgtagacggacttagtcagctggctgttacaagctttgaagatatcgagagtctcatgtccgaaggtaataaatcccgtaccgttgctgctacaaacatgaatgaggagtcaagcaggtcacacgctgtgttcaatattatcatcactcaaactctatacgatctgcagagcggtaacagtggtgagaaagtgagcaaagttagccttgtcgacttagccggcagcgaacgcgtgtccaagacaggcgccgccggggaacgtctgaaagaaggatcaaatataaataagagtctgacaaccttgggactcgtgatcagttccctggcagaccaggcagccgggaagggcaagagcaagtttgtcccttaccgcgactccgtgctgacatggcttttaaaagataatttaggcggtaattcccagacgtctatgattgcgacaatctcccctgctgccgataattacgaagagaccctgtcgacacttagatacgccgaccgtgctaaaaggatcgtaaatcacgcagtcgtgaatgaagacccgaatgccaaagttatacgggaactgagagaggaggtcgagaagctcagagaacagttgtctcaggccgaagcaatgaaggcgccagagctgaaggaaaagttggaggagtcagagaagctcattaaggaactgactgtgacctgggaggagaaactgagaaaaaccgaggaaatcgcccaagagcggcagcgccagctagagagtatgggcatctcgttagagatgagcggcatcaaagtgggagacgacaaatgctacctagtgaacctaaatgctgatccggccttgaacgaacttttggtctactacctcaaggatcacacgcgcgtcggcgccgacacatctcaagatatccaactttttggtataggtattcagccccagcactgtgagatcgacattgccagtgacggagacgttaccctgactcccaaggaaaacgccagaagctgcgtgaacggtaccctggtgtgctcaacaacgcagctctggcacggtgatcgaattctctgggggaataatcacttctttcggatcaacctgccaaagaggaagcggcgcgattggcttaaggacttcgaaaaagagactggcccccccgaacatgacctagatgcagcctcggaggctagcagcgagcctgactataattacgaatttgctcagatggaagtcatcatgaagacccttaactctaatgaccctgtccagaacgttgtgcaagttctagagaaacagtacttagaagagaaacgctccgcactggaagagcagaggcttatgtacgaacgggagctcgagcagttaagacagcagttaagtccagataggcagcctcagtcctcaggcccggataggctggcctatagttcccagactgctcagcagaaagtgacccaatgggccgaggagcgtgacgaattgttccggcaatccctggcaaagcttcgcgagcagctcgtgaaggccaacacactagtccgcgaagctaactttctggcagaggagatgagcaaactgaccgattaccaggtgaccctacagattcctgccgccaatctgtcagcgaatcgcaaaagaggagccattgtgtctgagccagcaatccaagtgcggcgcaagggaaaaagtacacaagtttggacgatcgaaaaattggagaacaagctcatcgacatgcgtgacctttaccaagaatggaaggagaaggtcccagaggctaagagactgtacggtaagagaggagatcccttttacgaagcccaggagaaccacaaccttatcggagtcgctaacgtctttctggagtgtctcttctgcgacgtcaaactgcagtacgccgtacccatcatcagtcaacagggagaagtggccggacgcctacatgtggaggtgatgcgcgtgacaggagccgtgccagagcgcgtagtggaggatgactcctccgaaaactccagcgaaagcggttcccttgaggtggttgacagcagcggagaaatcatccatcgtgttaaaaagctcacctgccgggtcaaaattaaagaggctaccggactgccactgaacctctccaattttgtcttttgtcagtacactttctgggatcagtgtgagtcaacagtggccgctcccgtggtggaccctgaagtcccaagccctcaaagtaaggatgctcagtacaccgtgacttttagccactgtaaggactacgtggttaacgtgactgaggagttcctcgaattcatttccgatggtgctctcgccatcgaggtgtggggccatagatgtgcgggcaatggatccagtatctgggaggtggactctctccacgctaaaacacgcactttgcacgaccgatggaatgaagtgacgcgacgaatcgagatgtggattagcatattggagctcaacgaactgggagaatacgcagctgttgagctccatcaggccaaagatgtaaacacaggcggaatattccagcttcgccagggtcactctcgacgtgtgcaagttacagttaaaccggttcagcactccggaactctgccactgatggtggaggctatcttatccgtctctattggatgtgtgactgcacgctctacgaaactgcagaggggtttggatagctatcaggaggaggacttgaactgtgtgcgcgaacggtggtccgacgcactcattaaacgaagagagtatttggatgaacaaataaaaaaagtctccaacaaaaccgagaaaacagaggacgatgttgaaagggaggctcagctcgtcgaacagtgggtgggcttgactgaagaacgcaacgctgtgctggttcctgctccggggtctggcatcccgggagcacctgctgactggatcccaccccccggaatggaaacccatatccccgtgctttttctggaccttaatgcagacgacctgtcagctaacgaacagctggttgggccccatgcctccggcgtgaacagtatccttcccaaggagcatggcagtcagttcttttacctccccattatcaaacacagtgatgacgaagtttccgcaacggcatcctgggactcttccgtgcacgatagcgtgcacctcaatagagtgactccacagaatgagcgcatttatcttattgtgaagaccaccgtccagctgagccatcccgctgccatggagctcgtgctgagaaagcggatcgcagccaatatttacaacaagcaatcgtttacgcagagcttgaaacgccgaatctccctgaaaaacatcttttactcttgcggagtgacatatgagatcgtcagtaatattcccaaagctaccgaagagatagaagatcgcgagacattagctctgctggcggccaggtccgaaaatgagggaacatccgacggcgaaacgtatatcgagaagtatactcgcggggtgctgcaggtggaaaatatcttgtctctggagcggctacggcaggccgtcacagtgaaagaagcgctgagcaccaaagccaggcatataagacggagcctgagtacgccgaacgtgcataacgtatcttccagtcgtcctgatttatcaggctttgacgaagatgataaggggtggcccgagaaccagctggatatgtccgattattcctcctcctatcaggatgtggcttgctacggcacgctaccacgagactccccgcgccgcaataaagaaggctgcacctcggaaaccccgcacgccctgacagtgtcaccttttaaggcattttccccccagccgcccaagtttttcaagccactgatgccggttaaagaggagcacaagaaacggatcgctttggaggctcgccctctgctctcccaggaggattctgaagaagaagagaacgaactggaggcgatcaatcggaagcttatctcctcacagccatatgtgcccgttgaattcgccgacttcagtgtttataatgccagtctggaaaaccgagagtggttctcaagcaaagttgatttgagcaatagtcgagtgctcgagaaagaagtctcccgctccccaactacatcttctattacctcgggctacttctcacacagtgccagtaacgcaacactcagcgatatggtggtcccgagctccgactcctccgatcagttggccatccagacaaaagatgcagattccacagagcattcaacgccctcactagtgcacgattttaggccctcctccaataaggagctgacggaagtcgagaagggactggtgaaagacaaaatcatagtggttcctctgaaggaaaatagcgcgttggccaagggctctccttccagccagtcaatcccagaaaaaaactccaagtcgctgtgccgcacagggagttgctccgagttggacgcctgtccttctaagatcagccaacctgcacgaggcttctgtcctagagaagtgacagtggaacacacaacaaacatcttagaagatcacagctttactgaatttatgggagtctctgaggggaaggattttgacggtctgacagactcctccgctggggaactaagttcccggaggtctcttccaaacaagactggaggtaaaacagtgagcgatggcttgcaccacccaagtcaactgcatagcaagcttgaaaatgatcaggggggtacaacaagcaggtag

SEQ ID NO: 41759 - DNA, 6924 bp, Artificial Sequence
  derived and/or modified sequence
atgtcggataccaaggtaaaagttgccgtccgggtccggcccatgaaccgacgagaactggaactgaacaccaagtgcgtggtggagatggaagggaatcaaacggtcctgcaccctcctccttctaacaccaaacagggagaaaggaaacctcccaaggtatttgcctttgattattgcttttggtccatggatgaatctaacactacaaaatacgctggtcaagaagtggttttcaagtgccttggggaaggaattcttgaaaaagcctttcaggggtataatgcgtgtatttttgcatatggacagacaggttcgggaaaatccttttccatgatgggccatgctgagcagctgggccttattccaaggctctgctgtgctttatttaaaaggatctctttggagcaaaatgagtcacagacctttaaagttgaagtgtcctatatggaaatttataatgagaaagttcgggatcttttagaccccaaagggagtagacagtctcttaaagttcgagaacataaagttttgggaccatatgtagatggtttatctcaactagctgtcactagttttgaggatattgagtcattgatgtctgagggaaataagtctcgaacggtagctgctaccaacatgaacgaagaaagcagccgctcccatgctgtgttcaacatcataatcacacagacactttatgacctgcagtctgggaattccggggagaaagtcagtaaggtcagcttggtagacctggcgggtagcgaaagagtatctaaaacaggagctgcaggagagcgactgaaagaaggcagcaacattaacaaatcgcttacaaccttggggttggttatatcatcactggctgaccaggcagctggcaagggtaaaagcaaatttgtgccttatcgagattcagtcctcacttggctgcttaaggacaacttggggggcaacagccaaacctctatgatagccacaatcagcccagccgcagacaactatgaagagaccctctccacattaagatatgcagaccgagccaaaaggattgtgaaccatgctgttgtgaatgaggaccccaacgcaaaagtgatccgagaactgcgggaggaagtcgagaaactgagagagcagctctctcaggcagaggccatgaaggcccctgaactgaaggagaagctcgaagagtctgaaaagctgataaaagaactaacagtgacttgggaagagaagctgagaaaaacagaagagatagcacaggaaagacaacgacaacttgaaagcatggggatttccctggagatgtccggtatcaaggtgggggatgacaaatgctacttagtcaatctgaatgcagaccctgctcttaacgaacttctggtttattatttaaaggatcacaccagggtgggtgcagatacctctcaagatatccagctttttggcataggaattcagcctcagcactgtgagattgacattgcatctgatggagacgtcactctcactccaaaagaaaatgcaaggtcctgtgtgaacggcacccttgtgtgcagtaccacccagctgtggcatggtgaccgaatcctatggggaaataatcacttttttagaataaacttacctaagaggaaacgtcgagattggttgaaagactttgaaaaagaaacgggcccgccagagcatgacctggatgcagccagtgaggcttcctctgaaccagactataactatgaatttgcacagatggaagttatcatgaaaaccctgaatagtaatgacccagttcaaaatgtggttcaggtcctggagaaacaatacctagaagaaaagagaagtgccctagaggagcagcggctcatgtatgagcgggaactggagcaactccgccagcagctctcccccgacaggcagccacagagtagcggccctgaccgcctggcctacagcagccagacagcgcagcagaaggtgacccagtgggcagaagagagggatgaactcttccgacaaagcctggcaaaactgcgagagcagctggttaaagctaataccttggtgagggaagcaaacttcctggctgaggaaatgagcaaactcaccgattaccaagtgactcttcagatccctgctgcaaacctcagtgccaataggaagagaggtgcaatagtgagtgaaccagctatccaagtgaggaggaaaggaaagagcacccaagtgtggaccattgagaagctggagaataaattaattgacatgagagacctttaccaagaatggaaggaaaaagttcctgaggcaaagagactctacggaaaacgaggtgaccctttctatgaagcccaagaaaatcacaacctcatcggggtggcgaatgtattcttggaatgcctcttctgtgatgtgaaacttcagtatgcagtccctatcatcagccagcagggggaggttgcagggcgtctccacgtggaagtgatgcgtgttacaggagctgttccagagcgtgtggtggaggatgactcttcggagaattccagtgaaagtgggagccttgaagtcgtagacagcagcggggaaatcattcaccgagtcaaaaagctgacatgtcgggtaaaaattaaagaagcaacggggctgcccttaaacctctcaaattttgtcttctgtcaatacacattctgggaccagtgtgagtctacggtggctgccccggtggtggaccccgaggtgccttcaccacagtccaaggatgcccagtacacagtgaccttctcccactgtaaggactatgtggtgaatgtaacagaagaatttctggagttcatttcagatggagcactggccattgaagtatggggccaccggtgtgctggaaatggcagctccatctgggaggtcgattctcttcatgctaagacaagaacactgcatgacaggtggaatgaagtaacgcgaagaatagaaatgtggatctccatattagaattgaatgagttaggagagtatgctgcagtggaacttcatcaggcaaaagatgtcaacacaggaggcatctttcaacttagacagggtcattcccgtagagtacaagtcacggtgaaacctgtgcagcattcagggacactgccacttatggttgaagccatcctgtcagtatccatcggctgtgtaactgccaggtccaccaaactccaaagagggctggacagttaccaggaagaagacttaaactgcgtaagggagaggtggtcagatgcactcattaaacgacgagaatacctggatgaacagataaaaaaagtcagcaataaaacagagaaaacagaggacgatgtggagcgggaagcccagcttgtggagcagtgggtagggctgactgaggaaaggaatgctgtgctggtgccagccccaggcagtgggattcctggggcacctgccgactggatcccacctcctggaatggaaacccacataccagttctcttcctcgatttgaatgcggatgacctcagtgccaatgagcagcttgttggcccccatgcatccggcgtgaactccatcctgcccaaggagcatggcagccagtttttctacctgcccatcataaagcacagtgatgatgaggtttcagccacagcctcttgggattcctcggtgcatgattctgttcacttgaatagggtcacaccacagaatgaaaggatttacctaattgtgaaaaccacagttcaactcagccaccctgctgctatggagttagtattacgaaaacgaattgcagccaatatttacaacaaacagagtttcacgcagagtttgaagaggagaatatccctgaaaaatatattttattcctgtggtgtaacctatgaaatagtatccaatataccaaaggcaactgaggagatagaggaccgggaaacgctggctctcctggcagcaaggagtgaaaacgaaggcacatcagatggggagacgtacattgagaagtacactcgaggcgtgctgcaggtggaaaacattctgagtcttgaacggctccggcaggccgtcacagtcaaagaagcactttccaccaaagcccggcacattcggaggagcctcagtacaccaaatgttcataatgtctcttccagccgaccggacctttctggctttgatgaagatgacaagggttggccagagaaccagttggacatgtctgactatagctccagttaccaagatgtagcatgttatggaactttacccagggattctcctcgaaggaataaagaaggttgtacatcagagactcctcatgccttaaccgtcagcccttttaaagcattctctcctcagccaccaaagtttttcaagcccctaatgcctgtaaaagaggagcataagaaaaggatagccctggaagcaaggcctcttctaagccaggaggactctgaggaggaagaaaatgagctggaagctattaacaggaagctaataagttcacagccttatgtacctgtggagtttgctgacttcagtgtttacaatgccagcttggagaacagggaatggttttcctctaaagtagatctgtcaaactcacgggtcttggagaaagaagtgtcccgtagccctaccaccagcagtattaccagtggctacttttcccacagtgcctccaatgccaccctgtctgacatggtggtcccttctagtgacagctcagaccagctggccattcagacgaaggatgcagactccaccgagcactccacaccatcgcttgtgcatgatttcaggccgtcctcaaacaaagagttgacagaagtcgaaaaaggcttggtaaaggacaagataattgtggtgccactcaaggaaaacagtgccttagccaaagggagcccatcatcccagagcatccctgagaaaaactccaaatcactgtgcaggactggctcatgttcagaactagatgcctgccccagcaaaattagccagccagccaggggattctgccccagggaggtgacggtagaacacaccaccaacatccttgaagaccattctttcacagaatttatgggagtgtcagagggaaaagattttgatggtttgacagattcttctgctggagagctttccagtaggaggagtctaccaaataaaacaggcggcaagactgtctccgatgggctccaccaccccagccagctgcattccaagttagagaatgaccagggaggcacaacctcacggtgagagcagcaagcacccctcctcaggccacagcttggcgtctttgttcgcctggtcaccttgggcaagcaccagccccatctctaaaacatgctgccgcctggctggacctcagaccagaagctggagaatccacaccgtgcacttcctgggccacctcctttcccctccccagtgggagaagcggcactttgtcacttgggtgaatcaacagcctctgctttttccagaaagcaagagaactgaaaatcctggattaactaagtgacagtatttttttttgcacttactacacacctccactgtatagaaacctctacagattccaacagactttattcttgtacaattttaatcagttcttactgtagaatctggagtcaatgctctaatctgttttttataaataatatatattatgtatatgaaatgtgtatctatagtatgtctggagacagacaaggctgcacactaaaatgcagataaaggtgatttgtagaaaatcataaggtactggacttcgttacaaagcaacttgggcgatctcttatacatgagcagatgaaaaatattttattgcctaagaatgagcttgcaaatccctctttgcagaaaaggttatagaatgctgttctttataaccaaagaacttacataagacaacatttttgctgtccactcttttgtgtgaacatgtatgtttgactgcaagtttggtgccataattcccttggctaccaagccacgtgctgccattctctgtcctttgtttcataagcacactgagaaatctcacagctatattctttggtcttccacctgcccctccacctgctgacttgacattgtattataactgttgacaatgactggggtcctgactccacagttgcctggaccgtggctcagcccagctgggcaggtggaatgaagagagccgtattactgtaagaaaacacaaggacagccaggagtagtggtggggtgggtggggtgggaggtgttgatttttgtgtgtttctgtgtgtgtggttttgttttggattggtaggtttcactgtggcgtggttttgctgttgttattttgcttgattctggaaaatgctgaggagatggactgagctatgaagttcaatggttcaccctttaccatgtttgcaggagatgatcgaatacagatgaccctgctgtcgtgtcttcatttgtaaaattctcctacaaatggagacattgaaggattatgtgtatggaaatttttacaaaattcctttctgtacctattctgtagatgcctgtataatcggtctggatgtacagctataaatgtgttgtgagagcaagagagagagaatgggtagagcctgctgtaccttttttcttttaaattcttcgagttggtaaatgagtaagatattggaaaccttaatgaaaagctgctgttcatgatttgtgtgtatagtgagctgactgtagtattttactattgtctgttaaaaaaagaaaaactgtaatttatatcccctttgaactttattgtgtttaattggtacacatttctgtgtgtgtgtgtgtgtatgtgttttagaatacaaactgtgtaattcagattttaaaacactaatcatttgtctttaataaccctgcctttagtttcaaatctaacttaccatatttcta

SEQ ID NO: 41760 - DNA, 5250 bp, Artificial Sequence
  derived and/or modified sequence
atgtctgacaccaaggtgaaggtggccgtgcgggtgcggcccatgaacagaagagagctggagctgaacaccaagtgtgtggtggagatggagggcaaccagacagtgctgcaccccccacccagcaacaccaagcagggcgagaggaagccacccaaggtgtttgcctttgactactgcttctggagcatggatgagagcaacaccaccaagtatgccggccaggaggtggtgttcaagtgcctgggggagggcatcctggagaaggccttccagggctacaatgcctgcatctttgcctacggccagacaggcagcggcaagagcttctccatgatgggccacgccgagcagctgggcctcatcccccggctgtgctgtgccctcttcaagaggatcagcctggagcagaatgaaagccagaccttcaaggtggaggtgtcctacatggagatctacaatgagaaggtgcgggacctgctggaccccaagggcagccggcagagcctgaaggtgcgggagcacaaggtgctgggcccctacgtggatggcctgagccagctggccgtgaccagctttgaggacatcgagagcctgatgtctgagggcaacaagagcaggacagtggccgccaccaacatgaatgaggagagcagccgcagccatgctgtgttcaacatcatcatcacccagaccctgtatgacctgcagagcggcaacagcggggagaaggtgtccaaggtgtccctggtggacctggccggcagcgagcgggtgtccaagacaggagctgctggggagcggctgaaggagggcagcaacatcaacaagagcctgaccaccctgggcctggtgatcagcagcctggccgaccaggccgccggcaagggcaagagcaagtttgtgccctacagagattctgtgctgacctggctgctgaaggacaacctgggcggcaacagccagacctccatgattgccaccatcagccctgctgctgacaactatgaggagaccctgagcaccctgcgctatgctgaccgggccaagagaattgtgaaccacgctgtggtgaatgaagaccccaatgccaaggtgatccgggagctgcgggaggaggtggagaagctgcgggagcagctgagccaggccgaggccatgaaggcccctgagctgaaggagaagctggaggagagcgagaagctgatcaaggagctgactgtgacctgggaggagaagctgaggaagacagaggagatcgcccaggagcggcagaggcagctggagagcatgggcatcagcctggagatgagcggcatcaaggtgggagatgacaagtgctacctggtgaacctgaatgctgaccctgccctgaatgagctgctggtgtactacctgaaggaccacaccagggtgggcgctgacaccagccaggacatccagctgtttggaattggcatccagccccagcactgtgaaattgacatcgccagtgatggagatgtgaccctgacccccaaggaaaatgcccggagctgtgtgaatggcaccctggtgtgcagcaccacccagctgtggcatggagaccgcatcctgtggggcaacaaccacttcttccgcatcaacctgcccaagaggaagaggcgggactggctgaaggactttgagaaggagactggacctcctgagcatgacctggatgctgccagcgaggccagcagcgagccagactacaactatgaatttgcccagatggaggtgatcatgaagaccctgaacagcaatgaccctgtgcagaatgtggtgcaggtgctggagaagcagtacctggaggagaagaggtctgccctggaggagcagaggctgatgtatgaaagagagctggagcagctgcggcagcagctgagcccagaccggcagccccagagcagcggccctgaccggctggcctacagcagccagacagcccagcagaaggtgacccagtgggccgaggagagagatgagctgttccggcagagcctggccaagctgcgggagcagctggtgaaggccaacaccctggtgcgggaggccaacttcctggccgaggagatgagcaagctgacagactaccaggtgaccctgcagatcccagctgccaacctgagcgccaacaggaagagaggagccatcgtgtctgagcccgccatccaggtgcggaggaagggcaagagcacccaggtgtggaccatcgagaagctggagaacaagctgattgacatgagggacctgtaccaggagtggaaggagaaggtgcctgaggccaagaggctgtatggcaagagaggagaccccttctatgaggcccaggagaaccacaacctgattggagtggccaacgtgttcctggagtgcctcttctgtgatgtgaagctgcagtatgctgtgcccatcatcagccagcagggcgaggtggccggccgcctgcacgtggaggtgatgagggtgactggagctgtgcctgagcgggtggtggaggatgacagcagcgagaacagcagcgagagcggcagcctggaggtggtggacagcagtggagagatcatccaccgggtgaagaagctgacctgccgggtgaagatcaaggaggccaccggcctgcccctgaacctgagcaactttgtgttctgccagtacaccttctgggaccagtgtgagagcacagtggccgcccctgtggtggaccctgaggtgcccagcccccagagcaaggatgcccagtacacagtgaccttcagccactgcaaggactatgtggtgaatgtgacagaggagttcctggagttcatcagtgatggagccctggccatcgaggtgtggggccaccgctgtgctggaaatggcagcagcatctgggaggtggacagcctgcacgccaagaccaggaccctgcatgaccgctggaatgaggtgaccaggagaattgagatgtggatcagcatcctggagctgaatgagctgggggagtatgctgctgtggagctgcaccaggccaaggatgtgaacacaggaggcatcttccagctgcggcagggccacagcagaagagtgcaggtgacagtgaagcctgtgcagcacagcggcaccctgcccctgatggtggaggccatcctgtctgtgtccatcggctgtgtgacagcccggagcaccaagctgcagaggggcctggacagctaccaggaggaggacctgaactgtgtgcgggagcgctggagcgatgccctgatcaagaggcgggagtacctggatgagcagatcaagaaggtgagcaacaagacagagaagacagaagatgatgtggagcgggaggcccagctggtggagcagtgggtgggcctgacagaggagagaaatgctgtgctggtgcctgcccctggcagcggcatccctggggccccagctgactggatccccccacctggcatggagacccacatccctgtgctcttcctggacctgaatgctgatgacctgagcgccaatgagcagctggtgggcccccacgccagcggcgtgaacagcatcctgcccaaggagcacggcagccagttcttctacctgcccatcatcaagcacagtgatgatgaggtgtctgccacagcctcctgggacagctctgtgcatgacagcgtgcacctgaacagagtgaccccccagaatgaaagaatctacctgattgtgaagaccaccgtgcagctgagccaccctgctgccatggagctggtgctgaggaagagaattgctgccaacatctacaacaagcagagcttcacccagagcctgaagaggcgcatcagcctgaagaacatcttctacagctgtggggtgacctatgagatcgtgagcaacatccccaaggccacagaggagattgaggaccgggagaccctggccctgctggccgcccggagtgaaaatgaaggcaccagtgatggagagacctacatcgagaagtacacccggggcgtgctgcaggtggagaacatcctgagcctggagcggctgcggcaggccgtgacagtgaaggaggccctgagcaccaaggcccggcacatcagaagaagcctgagcacccccaacgtgcacaacgtgagcagcagcaggccagacctgagcggctttgatgaagatgacaagggctggccagagaaccagctggacatgtctgactacagcagcagctaccaggatgtggcctgctacggcaccctgccccgggacagccccaggaggaacaaggagggctgcaccagcgagaccccccacgccctgactgtgagccccttcaaggccttcagcccccagccccccaagttcttcaagcccctgatgcctgtgaaggaggagcacaagaagagaattgccctggaggcccggcccctgctgagccaggaggacagcgaggaggaggagaatgagctggaggccatcaacaggaagctgatcagcagccagccctacgtgcctgtggagtttgctgacttctctgtgtacaatgccagcctggagaaccgggagtggttcagcagcaaggtggacctgagcaacagccgggtgctggagaaggaggtgagccgcagccccaccaccagcagcatcaccagcggctacttcagccacagcgccagcaatgccaccctgagtgacatggtggtgcccagcagtgacagcagtgaccagctggccatccagaccaaggatgctgacagcacagagcacagcacccccagcctggtgcatgacttccggcccagcagcaacaaggagctgacagaggtggagaagggcctggtgaaggacaagatcatcgtggtgcccctgaaggaaaattctgccctggccaagggcagccccagcagccagagcatccctgagaagaacagcaagagcctgtgcaggacaggcagctgcagcgagctggatgcctgccccagcaagatcagccagcctgcccggggcttctgcccccgggaggtgacagtggagcacaccaccaacatcctggaggaccacagcttcacagagttcatgggcgtgtctgagggcaaggactttgatggcctgacagacagcagcgctggggagctgagcagcagaagaagcctgcccaacaagacaggaggcaagacagtgtctgatggcctgcaccaccccagccagctgcacagcaagctggagaatgaccagggcggcaccaccagcaggtag

SEQ ID NO: 41761 - DNA, 5250 bp, Artificial Sequence
  derived and/or modified sequence
atgagcgacaccaaggtgaaggtggccgtgcgggtgcggcccatgaaccggagagagctggagctcaatactaaatgtgtggttgagatggagggtaatcagacagtcctgcaccccccgccttcgaatacaaaacagggggagcgcaagccacccaaagtgtttgccttcgattactgcttttggtccatggatgagtctaacactactaagtatgccggacaggaagttgtgttcaaatgcctaggggagggaatacttgagaaggctttccagggctataacgcatgtatttttgcatacggccaaaccggtagtggaaagagcttttcaatgatgggacatgctgaacagttagggctgataccacgcttatgctgtgctttgtttaaacgaatttctctggaacagaatgagtcgcagacattcaaagtagaggtgagctacatggagatatataatgaaaaggtccgcgacctcctggatcccaaagggtctcggcagtccttgaaggtcagagaacacaaggtgctgggcccatacgtggatggtttgagccagctcgctgtcacctccttcgaggatattgagtccctgatgagcgaggggaacaagagtaggacggtcgctgccaccaatatgaacgaagagagctcccggtcgcacgcagtgttcaacataataatcacacagaccctgtatgacttacagagcgggaattccggcgagaaagtgtcgaaggtcagtctggtggaccttgcaggatccgaacgagtcagcaagactggagccgctggcgaaaggttaaaggagggcagcaatataaacaagtcccttaccactcttggactcgtgattagctccttagctgaccaggcggccgggaagggaaagagcaagtttgtaccatatcgtgattcagtgttaacttggttgctcaaggacaatttaggcggcaactctcagacatctatgatcgcgacgatctcccccgctgccgacaattatgaagagacactgtcaactttgcggtacgccgacagagccaaacgcattgttaaccacgcggttgtaaacgaagatcctaacgcaaaggtcatccgagagcttagggaggaagtggagaaattgcgtgagcaattgtcccaagcagaggccatgaaggccccagagctgaaagagaagctggaagagagtgagaagctgattaaggagctcacagtgacctgggaagagaaactccgcaagaccgaagaaatcgcacaggagcgccagagacagctggaaagtatgggcatttccctggaaatgtccggcattaaggtaggcgacgataaatgctatttggtaaacctcaacgctgaccctgcactgaacgaactgctggtgtactatctcaaagaccatacacgggtgggcgctgacacatcccaggatatccagcttttcggaatcggcatccaacctcagcactgtgaaattgacattgcttcagacggggacgtgaccttgaccccaaaagagaacgcccggtcctgtgtaaatggcacactagtgtgcagcaccacgcagctgtggcatggcgaccggatcctgtggggtaacaaccacttcttccgaatcaatctgccaaagaggaagaggcgggactggctgaaggatttcgaaaaggagacaggccctcctgagcacgacctagatgctgcgtcagaagcgtcttctgaaccagattataactatgagttcgcccagatggaagtgataatgaagactctgaatagcaacgatcctgtacagaatgtggtccaggtgcttgaaaaacaatatttagaggagaagagaagcgctctcgaggagcaaaggctgatgtatgagcgggagttagaacagttgagacagcagctctcccctgacagacaaccgcaaagctccggacccgacaggctggcttacagctcacagaccgcccaacagaaagtgactcagtgggctgaagaacgcgatgaactgtttaggcagtctttggcaaagctgagagagcagctggtcaaggccaatacgttggtacgagaggcaaacttcctggccgaagagatgagcaaattgacagattatcaggtcaccctacaaataccagccgctaatctgagtgctaaccgcaaaagaggggcgatcgtgtctgagcccgccatccaggtgcgccgaaagggcaagtcgactcaggtgtggactattgagaaactcgaaaacaaattaatcgacatgagagatctgtatcaggagtggaaagagaaggtacctgaagccaagcgtctctatggtaagcgtggggatcctttttacgaagcccaggagaaccacaatcttatcggtgtggctaatgtgtttttagagtgtctcttctgtgacgtgaagctccaatacgcggtgcctataatctctcagcagggcgaggtggccggccggctgcacgtggaagttatgcgcgtgaccggagctgtcccggagcgggttgtcgaggatgactcaagcgagaattccagtgagtctggttctctggaggtcgtagactcttccggtgagataatccacagagtaaagaaactcacttgtcgggttaaaattaaggaggccacaggcctccctttaaatctctctaactttgtattctgtcaatataccttctgggatcagtgtgagtcaactgtggccgcacccgtcgtggaccccgaagttccctcaccacagtctaaggacgcgcagtacaccgtgactttctcacactgtaaggattatgtggttaacgtgaccgaagagtttctcgagttcatttctgacggcgctctggctattgaagtatgggggcatcgctgcgctgggaatggatctagcatctgggaggtggacagtctgcacgctaaaacaaggaccctccacgatcggtggaacgaggtgacccgaaggatagagatgtggatcagcatcttggagctgaatgaattaggagagtacgctgctgtcgagctacaccaagcaaaagatgtgaacaccgggggtattttccaacttcgacaggggcacagtagacgcgtacaggtcactgtgaaacccgtgcagcactcagggactctgccactcatggtagaggctattctgtctgtcagtataggctgcgtgactgcgcgcagtacaaaattacagaggggactggactcctatcaagaggaggatttgaattgcgtgcgggagcggtggtccgatgctcttatcaaaaggagggaatatctggacgagcagattaaaaaagttagcaacaagactgagaaaactgaagacgacgtggagcgggaagcgcagctggtggaacagtgggtcggacttacagaagaaaggaacgccgtgctagtgcctgcccctgggagtgggattccgggcgctcccgctgactggatacctccacctggaatggaaacccacattcccgtactatttctcgacctgaacgcagacgacctgagcgcgaacgagcagctcgttggcccacatgcaagcggggtgaattctatactgcctaaagagcacggttctcagttcttttacctccctataattaagcactcagacgacgaagtcagcgccacagcttcatgggacagcagtgtacatgattctgtacatttaaacagagtgacccctcaaaacgagcggatttacctgatagtgaagacgacagtccaactgtcacacccagctgccatggagctggtcctgcggaaacgtatcgccgcaaacatctataacaagcaaagcttcacacagagtcttaagaggcgcatctccctaaagaacatcttttactcctgtggagtaacatacgagatcgtgtccaacatacctaaggcaacagaagaaattgaggacagagaaaccctggccctgctggcagcgcgctcggagaacgagggaacctcagatggagagacttatattgaaaaatacactagaggcgtattgcaggtcgaaaatattctttcactggaaaggttgcgtcaggctgtgactgtgaaagaagccctgtcaactaaggcgcggcacatacggcggagcctgtccaccccaaacgtgcataacgtgagtagctcaagacctgacttgtccggcttcgatgaggacgataaggggtggcccgaaaatcaactggacatgtctgattactcttcctcctaccaagacgtggcctgttacggcaccctgccaagagatagtccccgacgcaacaaagaagggtgcactagcgagacgccgcatgctctaacagttagtccttttaaggcattctccccacagccaccgaagttttttaaacccctaatgcctgtgaaggaggaacacaagaagcgaatagctctcgaggctcgccctttgctgtcccaagaagattcagaggaggaggagaacgagctggaggcaattaacagaaagctgatatccagtcagccttacgtccccgtagagtttgctgacttcagcgtgtataatgcatccctggaaaaccgcgaatggttcagctctaaggtggatctatccaattcgagagtgctggaaaaggaagtgagccgatcacccacaacttcctctattacaagtggttattttagccactccgcaagcaatgctacactgtctgacatggtcgtccccagtagcgacagctcagaccagctcgctatccaaaccaaagatgcggattccacagagcactcaacgccctcgctggtccacgatttcagaccatcatccaacaaagagctgaccgaggtggagaagggcctagtgaaggacaaaatcattgttgttcccctgaaagaaaatagtgctctcgcaaagggctcaccatcctctcagtccatccccgaaaagaactcaaagtctctgtgcaggacaggaagctgttctgagctggatgcatgcccttctaaaattagccagcccgcacgcggattctgccctagagaggtgaccgtggaacacactactaacattctcgaggaccatagcttcactgaattcatgggagttagtgaaggcaaggattttgacggactcaccgattcatcagctggggaactgagctcccgcaggagccttcctaacaaaacaggcgggaaaaccgtgtctgacggactgcaccatccatcccaacttcatagcaagcttgaaaatgaccagggagggacaacttccaggtag

SEQ ID NO: 41762 - DNA, 5249 bp, Artificial Sequence
  derived and/or modified sequence
atgtctgataccaaagttaaggtagcagtgcgcgtgcgacctatgaacagaagggagctggagctgaacaccaaatgtgtagtcgaaatggagggcaatcagaccgtcctacacccacctccctctaacacgaagcaaggagaaagaaagcctcctaaggtgttcgcattcgactattgtttttggtccatggacgagtcgaatacaaccaagtacgccggacaggaggtagttttcaagtgtctgggagagggcattctggaaaaagctttccagggatacaacgcgtgcattttcgcttatggccagacaggctctggcaaatccttctctatgatgggacacgcagagcaactgggactaataccgcgattgtgctgcgcactgttcaagcgcattagcctcgagcagaacgagtcccagaccttcaaggtggaggtttcttatatggagatctataacgagaaagtccgtgaccttctcgacccaaagggcagcagacagtcactaaaagtgcgggagcataaggttctgggtccgtacgttgacggactgtcccaactggctgttaccagcttcgaagatatcgagtcactaatgtctgaagggaataaaagtagaacggtagccgcaactaatatgaatgaggagtcctcaagatctcatgcagtgttcaatatcatcattactcagacactgtacgatcttcagtccgggaacagtggggagaaagtgtccaaggtgtctctggtcgatttggccggatctgagagagtttccaagaccggcgcagcaggagaaaggttgaaggaggggagcaacatcaataaatccttgaccactcttggtcttgtaatctcgagtcttgcggaccaggctgctggcaaggggaagagtaaattcgtgccctatcgcgacagtgtcctgacctggctgctgaaagataatcttgggggtaatagccagacttctatgatcgcaaccatctcgcccgcagccgacaattacgaggagacgctgtccacactccggtatgcggaccgcgcaaagcggattgtcaaccatgctgtggtgaacgaggaccccaacgctaaagttattcgggaactgcgtgaggaggtcgagaaactcagggaacaattatctcaggccgaagctatgaaggcgccagagctgaaggaaaaacttgaggagtccgaaaaactgattaaggagttgactgtgacctgggaggaaaaacttaggaagactgaggagatcgcacaggagcgacagcggcaattggagtctatgggcatctcactggagatgtcaggtataaaggtaggcgatgacaagtgctatctggtgaatttgaacgctgacccagccctcaacgagctattggtgtattatctgaaggaccacaccagggtgggtgcagatacgtctcaagacatccagctgttcggcattggaatacagccccagcactgtgagatcgacatcgctagtgatggagacgttacacttactccgaaggagaatgctcgctcttgcgttaacggtactctggtgtgctctaccacacagctatggcacggcgataggatactgtggggaaataaccacttctttaggattaacctacccaagcgtaagcgcagggactggctcaaggattttgaaaaggagacaggcccaccagagcatgatctggatgcagcctcagaagcctcttccgaacctgactacaattatgaattcgcccagatggaagtgatcatgaaaacactgaacagcaacgaccccgtgcagaacgtcgtccaggtccttgaaaaacagtacttagaggagaagcgtagtgcgctggaagaacagagactgatgtacgagagggaacttgagcagctccggcagcagctgagcccagatcggcaaccccagagtagcggcccagatcgactggcttacagttcccagactgctcagcaaaaggtcacccagtgggcggaagagcgggacgaactgtttaggcaatcgctggcaaagcttcgtgaacaacttgtgaaagctaataccctggtgagagaggctaattttcttgccgaggagatgtccaaactgacagattatcaagtgaccctccaaatccctgccgctaatctgtctgctaaccggaagaggggggcaattgtgagcgaacccgctattcaggtgcggcgaaagggaaaatctactcaagtgtggacgatcgaaaaactggaaaataaattaatcgatatgcgtgatttgtaccaggaatggaaggaaaaggttcctgaagctaaacgtctgtacgggaaaaggggcgaccctttttatgaagcccaggaaaatcataatcttatcggggtcgcaaatgtgttcttagaatgcctattttgcgacgtgaagcttcaatacgcagtgcccattatctcccagcaaggggaagtggccggtcgtctgcatgtcgaagttatgagagtgacaggagccgtgcccgaacgggtggtggaagacgacagtagtgagaactcctctgagagcgggtccctagaggtagtggactcaagtggcgagatcatccaccgcgttaaaaaactgacgtgtcgggtgaagattaaggaggcaacaggcctgccgcttaacttatccaactttgttttctgccagtacaccttctgggatcagtgtgaatccacggttgcagctcccgttgtggacccagaggtgccctccccgcagtccaaagacgctcagtatactgtgacatttagccactgcaaagattatgtcgtgaatgttacagaagagttcctagaattcatcagcgacggtgccctggcaattgaggtctggggccaccggtgtgctggcaacggctccagtatctgggaggtggactccctacacgcaaaaacgaggacactgcacgaccggtggaatgaggtgacgcgccgaattgaaatgtggattagcattctcgagctcaatgaactgggcgagtatgccgcagtggaattgcatcaggccaaagacgtcaacaccggcggaatcttccagcttaggcagggccacagcagacgtgtgcaagtaaccgtgaaacccgtgcagcattccgggacactgccgcttatggttgaggccattctgagtgtctctattgggtgtgtcactgccagaagcactaaactgcaacgcggacttgattcttaccaggaggaagatttgaattgtgtccgagaacgatggtcagatgcacttattaagagacgggagtacctcgacgaacagatcaaaaaagtgtctaataagaccgaaaaaacagaagacgatgttgagagagaagctcaacttgtcgaacagtgggtgggtctcacggaggaacgcaatgccgttctcgttcctgccccaggcagtgggatccccggtgcaccagctgactggattcccccaccagggatggagacgcatatcccagtccttttcttggatctgaacgctgacgacctgtctgcgaatgagcagctggtgggacctcacgcaagtggtgtcaacagcatcctacctaaagaacacggatcacaattcttttacctcccaatcattaaacacagtgatgacgaggtgtctgctactgcaagctgggattccagtgtccacgacagtgttcatctcaacagagtaactccccaaaacgaaaggatttatctgatcgtaaagacaaccgttcagctttcccatcccgcagccatggaattggtgctccgcaagcggatcgccgctaacatttataataagcagtctttcacacagagtttgaagcgcaggatcagcctgaagaacatcttttatagttgcggtgtcacctacgagattgtgagtaacattcctaaagctaccgaagaaatcgaggacagagagactcttgccttgctggctgccaggtccgagaacgaagggacaagtgatggggagacgtacatagaaaaatataccagaggagtcctacaggtggaaaacatcctttctctggagcgccttcgccaggcagttactgtgaaagaggccctgtccactaaggcgagacacattcggagatctctgtccacgcccaacgtgcacaacgtgagttctagtaggcctgatctttccggtttcgatgaagacgacaaggggtggcctgaaaaccaacttgacatgtccgattactcttcatcatatcaagacgtggcctgctatgggacgctcccgagggattcaccgaggagaaataaggaaggctgcacttccgaaacaccccacgccctcaccgtaagcccttttaaggctttttctcctcagccacccaagttttttaagccactgatgccagtcaaggaggagcacaagaagcgcattgctctggaagctagacctctcctttctcaggaagacagcgaagaggaggagaacgagctggaagctataaacaggaagctgatctcctcgcagccctacgtgcctgtggagtttgctgatttctcagtctataatgcctccttggaaaaccgagagtggttttctagcaaggtggacctgtccaatagccgcgtcctggagaaggaagtaagtaggtcgccaactacctcttccataacgagtggatatttctctcacagtgcctccaatgctaccctctccgacatggtggtgccgtcaagcgattccagtgaccaactggcgattcagactaaggatgccgactccacggaacattcaacgcctagcctagtgcatgatttccgcccttcttctaataaagagctcaccgaggtggaaaaaggccttgttaaggataagattatagtcgtgcctttaaaggagaactccgctctggccaaaggaagcccctcaagccagtccatccccgaaaaaaacagtaagagtttgtgtaggacaggatcgtgctcagagttggatgcctgcccctctaagatcagtcagcccgcaaggggcttttgccctagagaggtaaccgtggagcacaccaccaacattctggaagatcatagcttcaccgagttcatgggtgtgtcagaaggaaaagattttgatgggttgaccgattccagtgccggagagttgagctctcgcaggagtctgcctaacaaaactggcggtaagaccgttagtgatggactgcatcatccctctcagcttcactcgaagttagagaacgaccagggagggaccacaagtcgata

SEQ ID NO: 41763 - DNA, 5250 bp, Artificial Sequence
  derived and/or modified sequence
atgagcgacaccaaggtgaaggtggccgtgagagtgagacccatgaacagaagagagctggagctgaacaccaagtgcgtggtggagatggagggcaaccagaccgtgctgcaccccccccccagcaacaccaagcagggcgagagaaagccccccaaggtgttcgccttcgactactgcttctggagcatggacgagagcaacaccaccaagtacgccggccaggaggtggtgttcaagtgcctgggcgagggcatcctggagaaggccttccagggctacaacgcctgcatcttcgcctacggccagaccggcagcggcaagagcttcagcatgatgggccacgccgagcagctgggcctgatccccagactgtgctgcgccctgttcaagagaatcagcctggagcagaacgagagccagaccttcaaggtggaggtgagctacatggagatctacaacgagaaggtgagagacctgctggaccccaagggcagcagacagagcctgaaggtgagagagcacaaggtgctgggcccctacgtggacggcctgagccagctggccgtgaccagcttcgaggacatcgagagcctgatgagcgagggcaacaagagcagaaccgtggccgccaccaacatgaacgaggagagcagcagaagccacgccgtgttcaacatcatcatcacccagaccctgtacgacctgcagagcggcaacagcggcgagaaggtgagcaaggtgagcctggtggacctggccggcagcgagagagtgagcaagaccggcgccgccggcgagagactgaaggagggcagcaacatcaacaagagcctgaccaccctgggcctggtgatcagcagcctggccgaccaggccgccggcaagggcaagagcaagttcgtgccctacagagacagcgtgctgacctggctgctgaaggacaacctgggcggcaacagccagaccagcatgatcgccaccatcagccccgccgccgacaactacgaggagaccctgagcaccctgagatacgccgacagagccaagagaatcgtgaaccacgccgtggtgaacgaggaccccaacgccaaggtgatcagagagctgagagaggaggtggagaagctgagagagcagctgagccaggccgaggccatgaaggcccccgagctgaaggagaagctggaggagagcgagaagctgatcaaggagctgaccgtgacctgggaggagaagctgagaaagaccgaggagatcgcccaggagagacagagacagctggagagcatgggcatcagcctggagatgagcggcatcaaggtgggcgacgacaagtgctacctggtgaacctgaacgccgaccccgccctgaacgagctgctggtgtactacctgaaggaccacaccagagtgggcgccgacaccagccaggacatccagctgttcggcatcggcatccagccccagcactgcgagatcgacatcgccagcgacggcgacgtgaccctgacccccaaggagaacgccagaagctgcgtgaacggcaccctggtgtgcagcaccacccagctgtggcacggcgacagaatcctgtggggcaacaaccacttcttcagaatcaacctgcccaagagaaagagaagagactggctgaaggacttcgagaaggagaccggcccccccgagcacgacctggacgccgccagcgaggccagcagcgagcccgactacaactacgagttcgcccagatggaggtgatcatgaagaccctgaacagcaacgaccccgtgcagaacgtggtgcaggtgctggagaagcagtacctggaggagaagagaagcgccctggaggagcagagactgatgtacgagagagagctggagcagctgagacagcagctgagccccgacagacagccccagagcagcggccccgacagactggcctacagcagccagaccgcccagcagaaggtgacccagtgggccgaggagagagacgagctgttcagacagagcctggccaagctgagagagcagctggtgaaggccaacaccctggtgagagaggccaacttcctggccgaggagatgagcaagctgaccgactaccaggtgaccctgcagatccccgccgccaacctgagcgccaacagaaagagaggcgccatcgtgagcgagcccgccatccaggtgagaagaaagggcaagagcacccaggtgtggaccatcgagaagctggagaacaagctgatcgacatgagagacctgtaccaggagtggaaggagaaggtgcccgaggccaagagactgtacggcaagagaggcgaccccttctacgaggcccaggagaaccacaacctgatcggcgtggccaacgtgttcctggagtgcctgttctgcgacgtgaagctgcagtacgccgtgcccatcatcagccagcagggcgaggtggccggcagactgcacgtggaggtgatgagagtgaccggcgccgtgcccgagagagtggtggaggacgacagcagcgagaacagcagcgagagcggcagcctggaggtggtggacagcagcggcgagatcatccacagagtgaagaagctgacctgcagagtgaagatcaaggaggccaccggcctgcccctgaacctgagcaacttcgtgttctgccagtacaccttctgggaccagtgcgagagcaccgtggccgcccccgtggtggaccccgaggtgcccagcccccagagcaaggacgcccagtacaccgtgaccttcagccactgcaaggactacgtggtgaacgtgaccgaggagttcctggagttcatcagcgacggcgccctggccatcgaggtgtggggccacagatgcgccggcaacggcagcagcatctgggaggtggacagcctgcacgccaagaccagaaccctgcacgacagatggaacgaggtgaccagaagaatcgagatgtggatcagcatcctggagctgaacgagctgggcgagtacgccgccgtggagctgcaccaggccaaggacgtgaacaccggcggcatcttccagctgagacagggccacagcagaagagtgcaggtgaccgtgaagcccgtgcagcacagcggcaccctgcccctgatggtggaggccatcctgagcgtgagcatcggctgcgtgaccgccagaagcaccaagctgcagagaggcctggacagctaccaggaggaggacctgaactgcgtgagagagagatggagcgacgccctgatcaagagaagagagtacctggacgagcagatcaagaaggtgagcaacaagaccgagaagaccgaggacgacgtggagagagaggcccagctggtggagcagtgggtgggcctgaccgaggagagaaacgccgtgctggtgcccgcccccggcagcggcatccccggcgcccccgccgactggatccccccccccggcatggagacccacatccccgtgctgttcctggacctgaacgccgacgacctgagcgccaacgagcagctggtgggcccccacgccagcggcgtgaacagcatcctgcccaaggagcacggcagccagttcttctacctgcccatcatcaagcacagcgacgacgaggtgagcgccaccgccagctgggacagcagcgtgcacgacagcgtgcacctgaacagagtgaccccccagaacgagagaatctacctgatcgtgaagaccaccgtgcagctgagccaccccgccgccatggagctggtgctgagaaagagaatcgccgccaacatctacaacaagcagagcttcacccagagcctgaagagaagaatcagcctgaagaacatcttctacagctgcggcgtgacctacgagatcgtgagcaacatccccaaggccaccgaggagatcgaggacagagagaccctggccctgctggccgccagaagcgagaacgagggcaccagcgacggcgagacctacatcgagaagtacaccagaggcgtgctgcaggtggagaacatcctgagcctggagagactgagacaggccgtgaccgtgaaggaggccctgagcaccaaggccagacacatcagaagaagcctgagcacccccaacgtgcacaacgtgagcagcagcagacccgacctgagcggcttcgacgaggacgacaagggctggcccgagaaccagctggacatgagcgactacagcagcagctaccaggacgtggcctgctacggcaccctgcccagagacagccccagaagaaacaaggagggctgcaccagcgagaccccccacgccctgaccgtgagccccttcaaggccttcagcccccagccccccaagttcttcaagcccctgatgcccgtgaaggaggagcacaagaagagaatcgccctggaggccagacccctgctgagccaggaggacagcgaggaggaggagaacgagctggaggccatcaacagaaagctgatcagcagccagccctacgtgcccgtggagttcgccgacttcagcgtgtacaacgccagcctggagaacagagagtggttcagcagcaaggtggacctgagcaacagcagagtgctggagaaggaggtgagcagaagccccaccaccagcagcatcaccagcggctacttcagccacagcgccagcaacgccaccctgagcgacatggtggtgcccagcagcgacagcagcgaccagctggccatccagaccaaggacgccgacagcaccgagcacagcacccccagcctggtgcacgacttcagacccagcagcaacaaggagctgaccgaggtggagaagggcctggtgaaggacaagatcatcgtggtgcccctgaaggagaacagcgccctggccaagggcagccccagcagccagagcatccccgagaagaacagcaagagcctgtgcagaaccggcagctgcagcgagctggacgcctgccccagcaagatcagccagcccgccagaggcttctgccccagagaggtgaccgtggagcacaccaccaacatcctggaggaccacagcttcaccgagttcatgggcgtgagcgagggcaaggacttcgacggcctgaccgacagcagcgccggcgagctgagcagcagaagaagcctgcccaacaagaccggcggcaagaccgtgagcgacggcctgcaccaccccagccagctgcacagcaagctggagaacgaccagggcggcaccaccagcagatag

SEQ ID NO: 41764 - protein, 193 aa, Artificial Sequence
  derived and/or modified sequence
MDNLRETFLSLEDGLGSSDSPGLLSSWDWKDRAGPFELNQASPSQSLSPAPSLESYSSSPCPAVAGLPCEHGGASSGGSEGCSVGGASGLVEVDYNMLAFQPTHLQGGGGPKAQKGTKVRMSVQRRRKASEREKLRMRTLADALHTLRNYLPPVYSQRGQPLTKIQTLKYTIKYIGELTDLLNRGREPRAQSA

SEQ ID NO: 41765 - DNA, 582 bp, Artificial Sequence
  derived and/or modified sequence
atggataatctacgagaaacgttcctgtctcttgaagatggtctgggtagctccgatagcccaggacttctgtcctcgtgggactggaaggatcgcgctggacccttcgagctgaatcaagcatcaccttcccagagtttatcccctgcaccgagtctcgaaagttacagcagctctccatgccctgcggtggcgggactgccttgcgaacatggaggcgcgtcttccggcggtagtgaaggctgttcagtgggcggggcatccggcctcgtggaagtggactataatatgttggcttttcagccaacgcaccttcagggtggtggtggacccaaggcacaaaaaggtactaaagtgcgaatgtccgtgcaacgcaggcggaaggcatctgagagggagaagcttcggatgaggaccttagccgacgccctgcacactctgagaaactatttgccccccgtgtattcacagaggggccagcccctaactaaaattcaaaccctcaagtacaccataaagtatatcggagaactgaccgatttgctcaataggggccgcgaaccacgggctcagtccgcatag

SEQ ID NO: 41766 - DNA, 582 bp, Artificial Sequence
  derived and/or modified sequence
atggacaacctgcgggagaccttcctgagcctggaggatggcctgggcagcagtgacagccctggcctgctgagctcctgggactggaaggacagagctggcccctttgagctgaaccaggccagccccagccagagcctgagccctgcccccagcctggagagctacagcagcagcccctgcccagctgtggccggcctgccctgtgaacatggaggagccagcagcggcggcagcgagggctgcagcgtgggcggggccagcggcctggtggaggtggactacaacatgctggccttccagcccacccacctgcagggcggcggcggccccaaggcccagaagggcaccaaggtgaggatgtctgtgcagaggaggaggaaggccagcgagcgggagaagctgaggatgaggaccctggctgatgccctgcacaccctgaggaactacctgccccctgtgtacagccagaggggccagcccctgaccaagatccagaccctgaagtacaccatcaagtacatcggggagctgacagacctgctgaacagaggccgggagccccgggcccagagcgcctag

SEQ ID NO: 41767 - DNA, 606 bp, Artificial Sequence
  derived and/or modified sequence
ccttctgcagctgtctcgcaggcatggacaacctgcgcgagactttcctcagcctcgaggatggcttgggctcctctgacagccctggcctgctgtcttcctgggactggaaggacagggcagggccctttgagctgaatcaggcctccccctctcagagcctttccccggctccatcgctggaatcctattcttcttctccctgtccagctgtggctgggctgccctgtgagcacggcggggccagcagtgggggcagcgaaggctgcagtgtcggtggggccagtggcctggtagaggtggactacaatatgttagctttccagcccacccaccttcagggcggtggtggccccaaggcccagaagggcaccaaagtcaggatgtctgtccagcggaggcggaaagccagcgagagggagaagctcaggatgaggaccttggcagatgccctgcacaccctccggaattacctgccacctgtctacagccagagaggccagcctctcaccaagatccagacactcaagtacaccatcaagtacatcggggaactcacagacctccttaaccgcggcagagagcccagagcccagagcgcgtgag

SEQ ID NO: 41768 - DNA, 582 bp, Artificial Sequence
  derived and/or modified sequence
atggacaacctgcgggagaccttcctgagcctggaggacggcctgggatcctctgactcacccggcctgctgagcagctgggattggaaggaccgcgctggcccattcgaactgaatcaggcaagccccagccaatcactgtccccggctccgagtttggagagctattcctcttcaccatgtcccgctgtggcagggttgccttgtgagcacgggggggctagctccggcgggtctgaaggatgctctgtcggtggtgcatccggcctggtggaagtggactacaacatgcttgccttccaacccacgcatcttcaggggggcggaggcccgaaagcgcagaaaggaactaaggtgcggatgtctgttcagcggcgccggaaagcctccgaaagggagaaactgcgaatgaggactctggccgacgccttgcacacgctgaggaactatcttccccccgtttatagccaaagagggcaaccactaaccaaaatccaaacattgaaatatactatcaaatatattggcgagctgactgacctgttgaaccggggaagagagccccgcgctcagagtgcctag

SEQ ID NO: 41769 - DNA, 582 bp, Artificial Sequence
  derived and/or modified sequence
atggacaatctacgagaaactttcttatctttggaagatggactcgggtcttccgattcgccaggattgctgtcctcttgggactggaaagatcgtgcaggtccgttcgaactgaatcaagcctcgccatcccaatctctttcccctgcaccatctttggaatcttactcctcttccccctgcccagccgttgctggcctgccctgcgaacacggcggagcctcaagcggtgggtccgagggttgcagtgtgggcggagccagtgggctcgtcgaagtggattacaacatgttggccttccagccaacccatttgcagggcggtggcggaccaaaggctcagaaaggaaccaaagtgcggatgtctgttcagagacggagaaaggcctcagagcgagagaagttgaggatgaggactctggccgacgctctccacacattgcgcaactatcttccacccgtctactcccaacgaggccagccactgaccaagattcagaccctgaagtatacaattaaatacattggcgagcttacagacctcctgaatcgcggaagggaaccgagagctcagagcgcttag

SEQ ID NO: 41770 - DNA, 582 bp, Artificial Sequence
  derived and/or modified sequence
atggacaacctgagagagaccttcctgagcctggaggacggcctgggcagcagcgacagccccggcctgctgagcagctgggactggaaggacagagccggccccttcgagctgaaccaggccagccccagccagagcctgagccccgcccccagcctggagagctacagcagcagcccctgccccgccgtggccggcctgccctgcgagcacggcggcgccagcagcggcggcagcgagggctgcagcgtgggcggcgccagcggcctggtggaggtggactacaacatgctggccttccagcccacccacctgcagggcggcggcggccccaaggcccagaagggcaccaaggtgagaatgagcgtgcagagaagaagaaaggccagcgagagagagaagctgagaatgagaaccctggccgacgccctgcacaccctgagaaactacctgccccccgtgtacagccagagaggccagcccctgaccaagatccagaccctgaagtacaccatcaagtacatcggcgagctgaccgacctgctgaacagaggcagagagcccagagcccagagcgcctag

SEQ ID NO: 41771 - protein, 375 aa, Artificial Sequence
  derived and/or modified sequence
MSSSLRPGPSRWRRAASIVLAAGWSRPETATPPSRPPPAEGFRLLLLQRSPHQGFMPGAHVFSGGVLDAADRSADWLGLFAPHHGPPRFGLGPAPFSRTAFPSLPDTDDHKTDNTGTLPEDVAFRICAVREAFEEAGVLLLRPRTSPPGPAPGPGLALEPPPGLASWRDRVRQDPRHFLRLCAHLDCTPDIWALHNWSAWLTPFLRGTTRRFDTAFFLCCLREPPPVYPDLAEVVGYQWSSPSEATESFLSKEIWLPPPQFYEVRRLANFASLSDLHKFCLGRALEGLERWLPIILLTADGMVHLLPGDELYLEDSDFLENLMSTEKKTEEIMKEGKQFHRIVTYHRHLYDIHVTVQPKYKHVYPKNSVVRKSHL

SEQ ID NO: 41772 - DNA, 1128 bp, Artificial Sequence
  derived and/or modified sequence
atgagcagcagcctgagacccggccccagcagatggagaagagccgccagcatcgtgctggccgccggctggagcagacccgagaccgccaccccccccagcagacccccccccgccgagggcttcagactgctgctgctgcagagaagcccccaccagggcttcatgcccggcgcccacgtgttcagcggcggcgtgctggacgccgccgacagaagcgccgactggctgggcctgttcgccccccaccacggcccccccagattcggcctgggccccgcccccttcagcagaaccgccttccccagcctgcccgacaccgacgaccacaagaccgacaacaccggcaccctgcccgaggacgtggccttcagaatctgcgccgtgagagaggccttcgaggaggccggcgtgctgctgctgagacccagaaccagcccccccggccccgcccccggccccggcctggccctggagcccccccccggcctggccagctggagagacagagtgagacaggaccccagacacttcctgagactgtgcgcccacctggactgcacccccgacatctgggccctgcacaactggagcgcctggctgacccccttcctgagaggcaccaccagaagattcgacaccgccttcttcctgtgctgcctgagagagcccccccccgtgtaccccgacctggccgaggtggtgggctaccagtggagcagccccagcgaggccaccgagagcttcctgagcaaggagatctggctgccccccccccagttctacgaggtgagaagactggccaacttcgccagcctgagcgacctgcacaagttctgcctgggcagagccctggagggcctggagagatggctgcccatcatcctgctgaccgccgacggcatggtgcacctgctgcccggcgacgagctgtacctggaggacagcgacttcctggagaacctgatgagcaccgagaagaagaccgaggagatcatgaaggagggcaagcagttccacagaatcgtgacctaccacagacacctgtacgacatccacgtgaccgtgcagcccaagtacaagcacgtgtaccccaagaacagcgtggtgagaaagagccacctgtag

SEQ ID NO: 41773 - DNA, 1128 bp, Artificial Sequence
  derived and/or modified sequence
atgtcatcgtcattgaggccaggacctagccgatggcgaagggccgcgtctatcgtgctggccgccggctggtctcggcctgaaacagccaccccaccttcccgcccacccccagctgagggattcagactgctgctactgcagcggtcacctcatcagggatttatgccaggtgcccacgttttttccggaggcgttctggatgccgctgatcgcagcgccgactggctcggactcttcgctccccaccacggcccgccaaggtttgggcttgggcctgctccctttagtaggacggcttttcccagcttgcccgataccgacgatcacaagacagataataccggtacccttcccgaggacgttgctttcaggatttgcgccgtcagggaagcatttgaagaagcaggcgttctattgctgcgtccaaggacttccccacctgggcctgcccctggtccaggcctggcgttggagccaccccccggtttggctagctggagggacagggtgcgccaggaccctcggcatttcctgaggttatgtgctcacctagactgtaccccagatatctgggctttgcacaactggagcgcatggctgaccccttttcttcggggaaccacccgtcgtttcgatacagctttctttctgtgttgtttgagggaaccgcctcccgtatacccagatctcgcagaagtcgtgggttaccagtggagctcgccttccgaagccacagagtccttcctcagtaaagagatctggttgccacccccacagttttatgaggttaggcggttagccaatttcgcatccctctcagatttacacaaattctgtctggggagagcactcgaggggttggagaggtggctacccatcatcctgctgacagctgatggcatggtgcacctgctgcctggggatgagctctatctcgaagattcagactttttagaaaatcttatgagtactgagaagaaaaccgaagaaatcatgaaggaggggaagcaattccacaggattgtgacatatcatcggcatctctacgacatacacgtcacagttcagccaaaatacaaacacgtataccccaaaaatagcgtggtcagaaaatctcatctctag

SEQ ID NO: 41774 - DNA, 1128 bp, Artificial Sequence
  derived and/or modified sequence
atgagcagcagcctgcggcccggccccagccgctggaggagagctgccagcatcgtgctggccgccggctggagcaggcctgagacagccaccccacccagccggcccccacctgctgagggcttccggctgctgctgctgcagaggagcccccaccagggcttcatgcctggggcccacgtgttttctggaggagtgctggatgctgctgacagatctgctgactggctgggcctgtttgccccccaccacggcccccccaggtttggcctgggccctgcccccttcagcaggacagccttccccagcctgcctgacacagatgaccacaagacagacaacacaggcaccctgcctgaagatgtggccttccgcatctgtgctgtgcgggaggcctttgaggaggccggcgtgctgctgctgcggcccaggaccagccccccaggccctgcccctggccctggcctggccctggagcccccacctggcctggcctcctggagggacagagtgcggcaggaccccaggcacttcctgcggctgtgtgcccacctggactgcaccccagacatctgggccctgcacaactggagcgcctggctgacccccttcctgcggggcaccaccaggagatttgacacagccttcttcctgtgctgcctgcgggagcccccacctgtgtacccagacctggccgaggtggtgggctaccagtggagcagccccagcgaggccacagagagcttcctgagcaaggagatctggctgcccccaccccagttctatgaggtgcggcggctggccaactttgccagcctgagtgacctgcacaagttctgcctgggccgggccctggagggcctggagcgctggctgcccatcatcctgctgacagcagatggcatggtgcacctgctgcctggagatgagctgtacctggaggacagcgacttcctggagaacctgatgagcacagagaagaagacagaggagatcatgaaggagggcaagcagttccaccgcatcgtgacctaccaccgccacctgtatgacatccacgtgacagtgcagcccaagtacaagcacgtgtaccccaagaacagcgtggtgaggaagagccacctgtag

SEQ ID NO: 41775 - DNA, 1128 bp, Artificial Sequence
  derived and/or modified sequence
atgagcagcagcctgcggcccggccccagccggtggcggcgggccgccagcatcgttttggccgccggatggagtcgacccgagactgctacccctccttccagacctcctcccgctgagggctttaggttgcttcttcttcagcggagtcctcatcaaggtttcatgccaggggcccacgtgttcagcggcggcgtcctcgatgcagccgatagatcagccgattggttaggactattcgccccccaccacggcccacccaggtttggtttaggcccagccccttttagtaggacagctttcccctcgcttccagacactgatgatcataaaaccgataatactggaaccctgcctgaggatgtcgctttcaggatttgtgccgtccgtgaggcctttgaagaagcaggggttttgctgctcagacctcggactagtcctccgggtcctgcccctgggcccgggctggccctggaaccacctcccggattagcatcatggcgtgaccgcgtgcggcaggacccccgacactttcttcgtctgtgtgcccacctggactgtaccccagacatctgggcgctccataactggtcagcatggcttacaccatttcttcgggggactacaaggaggtttgataccgcctttttcttatgttgccttcgagaaccacccccagtgtatccagacctagcggaagttgtgggctatcagtggtcatcgccgagcgaagcgaccgagtcattcctctctaaggagatctggctcccaccacctcaattctacgaagtgaggagactggctaactttgcctccctgtcagaccttcataagttctgcttgggccgggctctcgagggcctggagcgatggttgccaattatccttctgacggcagacggcatggtccatcttctccccggagatgaactataccttgaagatagtgattttctggaaaacctaatgtccactgagaaaaagacagaagagataatgaaggaagggaaacagttccaccgtattgtgacgtatcaccggcacctatatgacattcatgtgacagtacagcctaagtacaagcacgtctatcccaaaaactctgtggtcagaaagtcccacctttag

SEQ ID NO: 41776 - DNA, 2966 bp, Artificial Sequence
  derived and/or modified sequence
atgagcagctccctgcggccgggccccagccgctggcggcgggcggccagcatcgtcctggcggctggctggtcgcgcccggagaccgccaccccgccgtcgcgcccgccgccggccgagggcttccggctgctgctgctgcagcgctccccgcaccaaggcttcatgccgggcgcgcacgtcttctccggcggagtgctggatgcggccgaccgctcggcggactggctgggcctcttcgcgccgcaccacgggccgccgcgcttcggcctgggcccggcgccattcagccgcaccgctttcccgtcgctgcccgacaccgatgaccacaagaccgacaacactgggacgctgcctgaggacgtagccttccgcatctgcgccgtgcgggaggcctttgaggaggcgggcgtgctgctgctgcggcccaggacttccccaccaggcccagcacccgggcctggcctcgccctggagccaccgccgggcctggcctcctggcgcgaccgcgtgcgccaggacccgcgccacttcctgcggctgtgcgcccacctcgactgcacacccgacatctgggcgctgcacaactggagcgcctggctcacccctttcttgcggggcaccactcgccgctttgacacggccttcttcctgtgctgcctgcgcgagccgccgcccgtctaccccgacttggcggaggtggtgggctaccagtggtcatctccatcagaggcaactgaaagtttcttatcaaaagaaatttggttgccacccccacagttctacgaagtgagaagacttgcaaactttgcctctctctctgacttgcacaaattttgtttgggtcgtgcattagaaggactggaaaggtggctgccgatcatcttgttaactgctgatgggatggtccatcttttaccaggtgatgagctatatttagaagattcagactttttggaaaatcttatgtctactgaaaaaaagactgaggaaatcatgaaggaaggcaagcagtttcaccggatagtgacataccatcgccacctttatgatatccacgtgactgttcagccaaagtataaacacgtttatcctaagaactctgtagtaagaaaaagccatttgtagggtgcttaagcttgtttgtaaaatggcctacttgaagtcctcatgaataatgagggttgactttcatttgcttgaaacttaaggaagtttgtgcctataaaagttactgcaattcagtatttctttatttttttcgagacagagtctcaatctgtcgcccaggctggagtgcagtggcatgatataggctcactggaagctctgcctcaggggttcatgccattctcctgcctcagcctcccgagtagctgggactacaggcgcccgccaccatgcccagctaatttttttttgtatttttagtagagacgggttttcaccgtgttagccaggatggtctcaatctcttgacctcgtgatacgcccgccttggcctcccaaagtgctgggattacaggtgtgggccaccacacccagcctttttttttttttttttttttttttttgagacagagtgtctcactcttgcccagaacccaggctggagtgcagtggcccaatctcggctcactgcaacctccacctcccaggttccagcgattctcatgcctcagcctcctgagtagctgggactataggcatgcaccaccatgccccactaaattttgtatttttagtagaaacagagtttcaccatgttggccaggctggtctcgatctcctgacctcatgatctgcccgccttggcctcccaaagtgtgggattacaggcgtgagccactgtgcccagcatggtgtttcttatatcaggtgttttagggagctcgcttgcttattccattctttaatccttacagtgtgccacacgtataaagtttataacgtattaatgatctcattacccaaaaccagaacataatttcacaagggttcctacttctgtattgttttattatctcaaaaatttaaataacatgttctgctgtttattgttcttgttatccactgtattagcaccttccctgatgtgctttggaggttgatcaatgaatttctgagactttctgctggaattactttaagggtgtcttattagatgatgaaaagttggctgagacacccttcaagtgaccatgtcattgttttcttgctatgtctttagcttaatgattaagatacaattctttttaaaatcaaatggtattagttattatgtttcccaaattagaaatcgattttagttaacattttattttattttattctattttatttatttttgagacagagtctcgctctgttgcccaggctggagtacaatggcgcaatctcagctcactccaatctccgcctcccaggttcaagcgatttttctgcctcagcctcccgagtagctgggattacaggcacccactaccatgcccagctaatctttgtatttttagtagagacggggtttcaccatgttggccagtccggtctcgaacttctgacctgaggtgatctgcccaccttggcctcacaaagtgctgagattacaggcttgagccaccacgcctggcctagttagcattttaaagaaacacaaagccataacaaaaaccatcattgtttgtattccacactgttaatgaatgtaaagaggttagaaatgtagtgtttgattaatgatgtttatttttactgtatttaatatgagtaatttttcatcatctttcaagaggaataatgtttattgattaaaggtgagaaatgatagttaagacaccaattccatgtccagatctttgactgtatcatgcattgtacaattgatttcatattttatgaaatgccttaattttcctactataacataaagacaatgatgaataaagtttatgtgtatgattaaatcc

SEQ ID NO: 41777 - DNA, 1128 bp, Artificial Sequence
  derived and/or modified sequence
atgtcctcttcgctgcgaccagggccaagcaggtggcggagggccgcttcaatagtcctggccgctggatggtcaagaccggagaccgctacaccgccttctcgccctccccctgctgagggatttcgcttattgctgctgcagagatcaccgcaccaagggttcatgccaggagctcatgtcttttctggaggagtgctggacgcagccgatcgctcagccgattggctgggcctgtttgctccacatcacggcccacccaggtttggactcggcccagccccattttcgcgcacagccttcccgtcacttcccgatacagatgatcataaaactgataacacaggcacactgcctgaagacgttgccttccgtatctgtgctgtacgagaagcattcgaggaggccggagtccttctgctgcgaccccgtacatcccccccaggtcccgcaccaggccctggcctggccctcgagcccccacctgggttggcctcctggcgtgacagagttcgccaggacccccgacacttccttaggctctgtgcacatctggattgcaccccagatatctgggcgctccataactggtcagcctggttaacaccctttctgaggggcacaactagaaggttcgatactgcatttttcctgtgttgtttaagggaacccccaccggtgtacccagacctggctgaagtggtgggataccaatggagttcaccgagcgaagcgacagagtcgtttctctccaaggagatttggctacctcctccgcagttttatgaggttaggagacttgcgaacttcgcgagcctgagcgatctgcataaattttgtctgggacgggctctggaaggcttggagagatggttaccgataatactgttaactgccgacggcatggtgcacctcctgcctggagacgagctttatctggaagactccgactttcttgagaacctgatgtcaacagagaaaaaaaccgaagagatcatgaaggaaggcaaacaatttcacaggatagtgacctaccataggcacctttacgacattcacgtcacagtgcaaccgaagtataagcacgtgtaccctaagaactcagtcgtccgcaagtcccatctctag

SEQ ID NO: 41778 - protein, 311 aa, Artificial Sequence
  derived and/or modified sequence
MGVMAMLMLPLLLLGISGLLFIYQEVSRLWSKSAVQNKVVVITDAISGLGKECARVFHTGGARLVLCGKNWERLENLYDALISVADPSKTFTPKLVLLDLSDISCVPDVAKEVLDCYGCVDILINNASVKVKGPAHKISLELDKKIMDANYFGPITLTKALLPNMISRRTGQIVLVNNIQGKFGIPFRTTYAASKHAALGFFDCLRAEVEEYDVVISTVSPTFIRSYHVYPEQGNWEASIWKFFFRKLTYGVHPVEVAEEVMRTVRRKKQEVFMANPIPKAAVYVRTFFPEFFFAVVACGVKEKLNVPEEG

SEQ ID NO: 41779 - DNA, 936 bp, Artificial Sequence
  derived and/or modified sequence
atgggcgtgatggccatgctgatgctgcccctgctgctgctgggcatttccggcctgctcttcatttatcaagaggttagccggctatggtctaagtctgccgtgcagaacaaggtagtggttattactgacgccatctctggtctaggaaaggaatgtgcccgggtatttcacactggaggtgctagattagttctctgcggaaagaactgggaaagattggagaacctgtacgacgctctaattagtgtagctgacccaagtaagaccttcacgcccaagctggtgcttttggatctgtccgatatcagttgcgtcccagatgtcgctaaggaggtgttggactgttatggttgcgtcgacattctgattaacaatgcatctgtgaaggtcaagggccccgcccataagatctcacttgaactcgacaagaaaatcatggacgccaattactttgggcccattacgctgacgaaggctctactgcccaacatgatctcacgcagaacggggcagatcgtccttgtgaataatatacaggggaagttcggcattccattcaggacaacctatgcagctagtaaacacgccgccttgggcttttttgactgtctgcgtgcagaagtggaggaatatgatgtggtgatctcaaccgtcagtcctacgttcatccggtcttatcacgtgtacccagaacaggggaactgggaagcctcaatctggaagttctttttcagaaaacttacctacggtgtccacccagtggaggtcgcggaagaagtcatgcgcacagtgcgcaggaagaaacaagaggtgttcatggccaatccaataccaaaggccgccgtgtacgtacggaccttcttcccagagttctttttcgctgtggtggcatgtggggtaaaggagaaacttaatgtgccagaggaagggtag

SEQ ID NO: 41780 - DNA, 936 bp, Artificial Sequence
  derived and/or modified sequence
atgggtgttatggcaatgctcatgctgccattattgctgctgggcataagtggcctgctattcatatatcaagaggtctctaggctctggtctaagtccgcagtccagaacaaagttgtcgtaattaccgacgccatttccgggctcggcaaggaatgtgcccgagtcttccatacgggcggagccagactcgtgctctgcgggaagaactgggagcggctggaaaacctctatgatgccctaatcagtgtggctgatccgagtaaaacgttcactcctaagttagtgctgctggacctttccgacatcagctgtgtgcccgacgtagctaaggaagttctggattgctacggctgtgtggatattttgattaacaatgctagtgtgaaagtaaaaggacctgcgcacaagatatcattggaacttgataaaaaaataatggacgcaaattatttcggcccaattaccctcacgaaagcattgctgcccaatatgatcagtaggaggacaggccagatagtgcttgtcaacaacatccagggaaagtttggtatccctttcaggacaacctatgctgcaagcaaacatgcagcgttggggttcttcgattgcttaagggccgaagtcgaggagtacgacgtcgtgatctcaacagtttccccaacatttattagatcctatcacgtttatccggagcagggcaattgggaggcctctatctggaagttcttctttagaaagctgacgtacggcgtacacccagttgaagttgctgaagaggtcatgagaaccgtgcgccgtaagaaacaggaggtattcatggcaaaccccatcccgaaggccgctgtgtacgtgcgcacattctttcctgagttcttttttgccgtcgtggcctgcggggtgaaggagaagctaaatgttcctgaggaggggtag

SEQ ID NO: 41781 - DNA, 936 bp, Artificial Sequence
  derived and/or modified sequence
atgggcgtcatggccatgctgatgctccccctccttctcctggggatctcaggtttacttttcatataccaggaagtgagccggctctggtctaagtccgccgtgcagaacaaagttgtcgttatcactgatgcgatctcagggctgggcaaggagtgtgctcgggtatttcacactggcggggccaggcttgtcttatgcggcaagaactgggaaagattagaaaacctctacgatgccttgattagcgtagctgaccccagcaagacttttactcccaagctggtactgttggatctgagcgatattagttgtgttcccgacgtggcaaaggaagtgctcgattgctacggctgcgtcgacattcttatcaataacgcttcagttaaggtgaaggggccagcgcataaaatcagcctggagttagacaagaaaatcatggacgccaactactttggaccaataaccctcacaaaagctttactgcctaatatgatctcccgacggactggtcagattgttcttgtgaataatatccagggaaagttcggtataccctttagaaccacctatgcggccagcaagcacgccgccctgggattcttcgattgtctgagggcagaggtcgaggagtatgatgttgttattagtacagtgtcccccacatttattcgaagctatcacgtatatcccgaacagggcaattgggaagcatctatttggaaatttttctttcgcaaactgacgtacggagtgcaccccgtggaggtggccgaggaggtgatgagaaccgtgaggcgcaaaaaacaggaagtatttatggccaacccaattcccaaggccgccgtatatgtacgcacctttttccccgagtttttttttgctgttgtcgcctgcggcgttaaagagaagttgaatgtacccgaggagggttag

SEQ ID NO: 41782 - DNA, 936 bp, Artificial Sequence
  derived and/or modified sequence
atgggggttatggcaatgctcatgcttcctctactactcctggggatttcgggacttctcttcatttaccaagaagtgtcacgcttatggagtaaatctgctgtgcagaataaggtagtggtcattacagacgcgatctcaggtttgggcaaggaatgtgcgagagtgttccacacggggggtgcccggctcgtactgtgcggcaaaaactgggagcgcttagagaatctgtatgacgccctaatctccgttgcagaccccagcaagactttcacgcccaagttggttctcctcgatctctccgacatttcctgtgtccccgacgtcgccaaagaagtgctcgattgctatggatgcgtagacattcttataaataatgcctctgtgaaggtgaaaggcccagcacacaagatctccctggagctggataagaagattatggacgccaactacttcggcccaataaccctgacgaaagctctgctgcctaatatgatctcccggagaactggtcagattgtactcgtgaataacatccaaggaaagttcggcattccttttaggaccacttacgctgccagtaagcatgccgccctagggttttttgattgcctgcgagccgaagttgaagaatacgacgtggtcatttctactgtttcccctacatttatccgttcctaccatgtgtatcctgaacagggaaactgggaggcgtcaatttggaaattctttttccgaaagctcacatacggagtccatcccgtcgaggtcgccgaggaggtcatgaggaccgtgcgaaggaagaaacaggaagtgtttatggctaatccgattcctaaagctgctgtctacgttcgcacattttttcccgagtttttctttgcagtcgttgcgtgcggagttaaagaaaagctaaatgtgcccgaggaaggttag

SEQ ID NO: 41783 - DNA, 984 bp, Artificial Sequence
  derived and/or modified sequence
cccccagaacaagatgggagtcatggccatgctgatgctccccctgctgctgctgggaatcagcggcctcctcttcatttaccaagaggtgtccaggctgtggtcaaagtcagctgtgcagaacaaagtggtggtgatcaccgatgccatctcaggactgggcaaggagtgtgctcgggtgttccacacaggtggggcaaggctggtgctgtgtggaaagaactgggagaggctagagaacctatatgatgccttgatcagcgtggctgaccccagcaagacattcaccccaaagctggtcctgttggacctctcagacatcagctgtgtcccagatgtggcaaaagaagtcctggattgctatggctgtgtggacatcctcatcaacaatgccagtgtgaaggtgaaggggcctgcccataagatttctctggagctcgacaaaaagatcatggatgccaattactttggccccatcacattgacgaaagccctgcttcccaacatgatctcccggagaacaggccaaatcgtgttagtgaataatatccaagggaagtttggaatcccgttccgtacgacttacgctgcctccaagcacgcagccctgggcttctttgactgcctccgagccgaagtggaggaatacgatgttgtcatcagcaccgtgagcccgactttcatccggtcgtaccacgtgtatccagagcaaggaaactgggaagcttccatttggaaattctttttcaggaagctgacctacggcgtgcacccagtagaggtggcggaggaggtgatgcgcaccgtgcggaggaagaagcaagaggtgtttatggccaaccccatccccaaggccgccgtgtacgtccgcaccttcttcccggagttctttttcgccgtggtggcctgtggggtgaaggagaagctcaatgtcccggaggaggggtaactgcaggaggccaaatgggccaccccttggaaata

SEQ ID NO: 41784 - DNA, 936 bp, Artificial Sequence
  derived and/or modified sequence
atgggcgtgatggccatgctgatgctgcccctgctgctgctgggcatcagcggcctgctgttcatctaccaggaggtgagcagactgtggagcaagagcgccgtgcagaacaaggtggtggtgatcaccgacgccatcagcggcctgggcaaggagtgcgccagagtgttccacaccggcggcgccagactggtgctgtgcggcaagaactgggagagactggagaacctgtacgacgccctgatcagcgtggccgaccccagcaagaccttcacccccaagctggtgctgctggacctgagcgacatcagctgcgtgcccgacgtggccaaggaggtgctggactgctacggctgcgtggacatcctgatcaacaacgccagcgtgaaggtgaagggccccgcccacaagatcagcctggagctggacaagaagatcatggacgccaactacttcggccccatcaccctgaccaaggccctgctgcccaacatgatcagcagaagaaccggccagatcgtgctggtgaacaacatccagggcaagttcggcatccccttcagaaccacctacgccgccagcaagcacgccgccctgggcttcttcgactgcctgagagccgaggtggaggagtacgacgtggtgatcagcaccgtgagccccaccttcatcagaagctaccacgtgtaccccgagcagggcaactgggaggccagcatctggaagttcttcttcagaaagctgacctacggcgtgcaccccgtggaggtggccgaggaggtgatgagaaccgtgagaagaaagaagcaggaggtgttcatggccaaccccatccccaaggccgccgtgtacgtgagaaccttcttccccgagttcttcttcgccgtggtggcctgcggcgtgaaggagaagctgaacgtgcccgaggagggctag

SEQ ID NO: 41785 - DNA, 936 bp, Artificial Sequence
  derived and/or modified sequence
atgggagtgatggcgatgctgatgttaccactgctgctgctgggcattagcggtttgctcttcatctatcaggaggtctcccggttatggtccaagtcagcagtgcagaacaaagtcgtcgtgatcaccgatgcgatatctggcctcggcaaagaatgtgccagagtgtttcacacgggaggggctcgcctagtgctctgtggaaagaattgggagcgcctggagaatctgtacgatgcacttatcagtgtggcagacccaagcaaaaccttcacccccaaacttgtcctgctcgacctcagtgacatctcctgcgtgcctgatgtcgccaaagaagtgctggattgttacggctgcgtagacattctgataaacaatgcaagcgtcaaggtaaagggcccagcccacaagatctcactcgagctcgacaagaagattatggatgccaactatttcgggccaatcacgctgacgaaagccctgctgcccaatatgatctcccgacggacgggtcaaatcgtgctagtgaataacattcaaggcaaatttggcataccattcagaactacctacgcggctagcaaacacgccgcccttggttttttcgactgcctacgggcagaggtagaggaatatgacgtggtaatttctacagtaagtcccacatttattcggagttatcatgtgtaccccgaacaaggcaactgggaagccagcatctggaaattctttttcagaaaacttacttacggagttcacccagttgaagtggccgaagaggtgatgagaacagtgcgtcgcaagaaacaggaggtgtttatggcaaatcctatccccaaagctgctgtgtacgtgagaaccttcttcccagaattcttctttgccgtggttgcctgcggtgtcaaagagaaacttaatgtgccagaagaagggtag

SEQ ID NO: 41786 - DNA, 936 bp, Artificial Sequence
  derived and/or modified sequence
atgggcgtgatggccatgctgatgctgcccctgctgctgctgggcatcagcggcctgctcttcatctaccaggaggtgtcccggctgtggagcaagtctgctgtgcagaacaaggtggtggtgatcacagatgccatcagcggcctgggcaaggaatgtgcccgggtcttccacactggaggagcccggctggtgctgtgtgggaagaactgggagcggctggagaacctgtatgatgccctgatctctgtggccgaccccagcaagaccttcacccccaagctggtgctgctggacctgagtgacatcagctgtgtgcctgatgtggccaaggaggtgctggactgctacggctgtgtggacatcctgatcaacaatgcctctgtgaaggtgaagggccctgcccacaagatcagcctggagctggacaagaagatcatggatgccaactacttcggccccatcaccctgaccaaggccctgctgcccaacatgatcagcagaagaacaggccagatcgtgctggtgaacaacatccagggcaagtttggcatccccttccgcaccacctacgccgccagcaagcatgctgccctgggcttctttgactgcctgcgggcagaggtggaggagtatgatgtggtgatcagcacagtgagccccaccttcatccgcagctaccacgtgtacccagagcagggcaactgggaggccagcatctggaagttcttcttcaggaagctgacctacggcgtgcaccctgtggaggtggccgaggaggtgatgaggacagtgcggaggaagaagcaggaggtgttcatggccaaccccatccccaaggctgctgtgtatgtgaggaccttcttccctgagttcttctttgctgtggtggcctgtggggtgaaggagaagctgaatgtgcctgaggagggctag

SEQ ID NO: 41787 - RNA, 936 nt, Artificial Sequence
  derived and/or modified sequence
augggcgucauggccaugcugaugcucccccuccuucuccuggggaucucagguuuacuuuucauauaccaggaagugagccggcucuggucuaaguccgccgugcagaacaaaguugucguuaucacugaugcgaucucagggcugggcaaggagugugcucggguauuucacacuggcggggccaggcuugucuuaugcggcaagaacugggaaagauuagaaaaccucuacgaugccuugauuagcguagcugaccccagcaagacuuuuacucccaagcugguacuguuggaucugagcgauauuaguuguguucccgacguggcaaaggaagugcucgauugcuacggcugcgucgacauucuuaucaauaacgcuucaguuaaggugaaggggccagcgcauaaaaucagccuggaguuagacaagaaaaucauggacgccaacuacuuuggaccaauaacccucacaaaagcuuuacugccuaauaugaucucccgacggacuggucagauuguucuugugaauaauauccagggaaaguucgguauacccuuuagaaccaccuaugcggccagcaagcacgccgcccugggauucuucgauugucugagggcagaggucgaggaguaugauguuguuauuaguacagugucccccacauuuauucgaagcuaucacguauaucccgaacagggcaauugggaagcaucuauuuggaaauuuuucuuucgcaaacugacguacggagugcaccccguggagguggccgaggaggugaugagaaccgugaggcgcaaaaaacaggaaguauuuauggccaacccaauucccaaggccgccguauauguacgcaccuuuuuccccgaguuuuuuuuugcuguugucgccugcggcguuaaagagaaguugaauguacccgaggaggguuag

SEQ ID NO: 41788 - RNA, 936 nt, Artificial Sequence
  derived and/or modified sequence
auggggguuauggcaaugcucaugcuuccucuacuacuccuggggauuucgggacuucucuucauuuaccaagaagugucacgcuuauggaguaaaucugcugugcagaauaagguaguggucauuacagacgcgaucucagguuugggcaaggaaugugcgagaguguuccacacggggggugcccggcucguacugugcggcaaaaacugggagcgcuuagagaaucuguaugacgcccuaaucuccguugcagaccccagcaagacuuucacgcccaaguugguucuccucgaucucuccgacauuuccuguguccccgacgucgccaaagaagugcucgauugcuauggaugcguagacauucuuauaaauaaugccucugugaaggugaaaggcccagcacacaagaucucccuggagcuggauaagaagauuauggacgccaacuacuucggcccaauaacccugacgaaagcucugcugccuaauaugaucucccggagaacuggucagauuguacucgugaauaacauccaaggaaaguucggcauuccuuuuaggaccacuuacgcugccaguaagcaugccgcccuaggguuuuuugauugccugcgagccgaaguugaagaauacgacguggucauuucuacuguuuccccuacauuuauccguuccuaccauguguauccugaacagggaaacugggaggcgucaauuuggaaauucuuuuuccgaaagcucacauacggaguccaucccgucgaggucgccgaggaggucaugaggaccgugcgaaggaagaaacaggaaguguuuauggcuaauccgauuccuaaagcugcugucuacguucgcacauuuuuucccgaguuuuucuuugcagucguugcgugcggaguuaaagaaaagcuaaaugugcccgaggaagguuag

SEQ ID NO: 41789 - protein, 301 aa, Artificial Sequence
  derived and/or modified sequence
MGARQSRASSKDKGPKRMLFTGRRQKFSPWDDALLSGRDPRSLLKRGMHHVSFSLVTRGMTDIPDFLWGLSEVQKLNLSHNQLRVLPPEVGKLTRIVVLNLCGNRLKSLPREVSLLQCLKVLFVNMNCLTEVPAELSLCRKLEVLSLSHNCLSQLPACFADLSRLRKLNLSNNFFAHIPMCVFSLKELIFLHVGSNRLENIAESIQHLASLQIFIAEGNNIHSFPRSLCLVTSLELLNLNNNDIQTLPSELHLLCRLVRIAWNPMDKGLHISHNPLSKPLPELVEGGLEMLFGYLKDKKHT

SEQ ID NO: 41790 - DNA, 906 bp, Artificial Sequence
  derived and/or modified sequence
atgggcgccagacagagcagagccagcagcaaggacaagggccccaagagaatgctgttcaccggcagaagacagaagttcagcccctgggacgacgccctgctgagcggcagagaccccagaagcctgctgaagagaggcatgcaccacgtgagcttcagcctggtgaccagaggcatgaccgacatccccgacttcctgtggggcctgagcgaggtgcagaagctgaacctgagccacaaccagctgagagtgctgccccccgaggtgggcaagctgaccagaatcgtggtgctgaacctgtgcggcaacagactgaagagcctgcccagagaggtgagcctgctgcagtgcctgaaggtgctgttcgtgaacatgaactgcctgaccgaggtgcccgccgagctgagcctgtgcagaaagctggaggtgctgagcctgagccacaactgcctgagccagctgcccgcctgcttcgccgacctgagcagactgagaaagctgaacctgagcaacaacttcttcgcccacatccccatgtgcgtgttcagcctgaaggagctgatcttcctgcacgtgggcagcaacagactggagaacatcgccgagagcatccagcacctggccagcctgcagatcttcatcgccgagggcaacaacatccacagcttccccagaagcctgtgcctggtgaccagcctggagctgctgaacctgaacaacaacgacatccagaccctgcccagcgagctgcacctgctgtgcagactggtgagaatcgcctggaaccccatggacaagggcctgcacatcagccacaaccccctgagcaagcccctgcccgagctggtggagggcggcctggagatgctgttcggctacctgaaggacaagaagcacacctag

SEQ ID NO: 41791 - DNA, 906 bp, Artificial Sequence
  derived and/or modified sequence
atgggcgcacgtcaatcccgcgcctcgtccaaagacaagggtcccaagcgcatgctgttcacaggacgtaggcagaaatttagtccatgggacgatgcactactgagcggacgcgaccccagatccctgctgaagcgtggcatgcatcacgttagcttttccctcgtgactaggggaatgacagatattccagactttctctgggggctctccgaagtacagaagttaaacctgagccacaatcaactgcgtgttctccctcctgaggtaggtaaattgaccagaatagttgtgctcaacctgtgcggaaaccggctgaagtctttgcctagagaagtgtcccttctgcagtgtctcaaggttctgttcgtcaatatgaattgcctgaccgaggtcccagccgaactgagcctatgtcggaaactagaagtcctgtctctgtcccacaactgtctgagtcagctgcccgcatgctttgcagatctgtcacggttgcggaaacttaatttgtccaataatttctttgctcacatcccaatgtgcgtctttagtctgaaggaattgatctttttgcatgtgggatccaaccggctggaaaatatcgctgagtctatacagcatctggcaagcctccagattttcattgcagaaggtaataacatccactcgtttcctcggtccctctgcctagtgacgtctctggagctcctgaatcttaacaataatgatatccagactctcccttctgaactgcacctgttgtgtcgactggtgaggatcgcatggaacccaatggacaagggattgcacattagccacaaccctctgtcaaaaccgctgcctgaattagtcgaaggtgggctcgagatgctcttcgggtacctgaaggacaaaaaacatacttag

SEQ ID NO: 41792 - DNA, 906 bp, Artificial Sequence
  derived and/or modified sequence
atgggcgcccggcagagccgggccagcagcaaggacaagggccccaagaggatgctgttcaccggccggcggcagaagttcagcccctgggatgatgccctgctgagcggccgggaccccaggagcctgctgaagaggggcatgcaccacgtgtccttcagcctggtgacccggggcatgacagacatcccagacttcctgtggggcctgtctgaggtgcagaagctgaacctgagccacaaccagctgcgggtgctgcccccagaggtgggcaagctgacccgcatcgtggtgctgaacctgtgtggcaaccggctgaagagcctgccccgggaggtgtccctgctgcagtgcctgaaggtgctgtttgtgaacatgaactgcctgacagaggtgcctgctgagctgagcctgtgcaggaagctggaggtgctgagcctgagccacaactgcctgagccagctgcctgcctgctttgctgacctgagccggctgaggaagctgaacctgagcaacaacttctttgcccacatccccatgtgtgtgttcagcctgaaggagctgatcttcctgcacgtgggcagcaaccggctggagaacattgctgagagcatccagcacctggccagcctgcagatcttcatcgccgagggcaacaacatccacagcttccccaggagcctgtgcctggtgaccagcctggagctgctgaacctgaacaacaatgacatccagaccctgcccagcgagctgcacctgctgtgccgcctggtgcgcatcgcctggaaccccatggacaagggcctgcacatcagccacaaccccctgagcaagcccctgcctgagctggtggagggcggcctggagatgctgtttggctacctgaaggacaagaagcacacctag

SEQ ID NO: 41793 - DNA, 906 bp, Artificial Sequence
  derived and/or modified sequence
atgggggccaggcagtcaagggccagctccaaggataagggccccaagaggatgctgttcacggggaggagacagaagttttctccgtgggacgatgccctgctctcgggaagggacccgcggtccctgctgaagcggggcatgcaccacgtcagcttcagcctggtcacgagaggaatgacagacatccccgactttctgtggggcttgtccgaggtccagaaactcaatctgtctcacaaccagctccgggttctccctcccgaggtggggaaactgacccggatcgtggtcctgaacttgtgcgggaaccgcctgaagagcctgcccagagaagtgagcctcctacagtgcctcaaggtcctgtttgtcaacatgaactgcctgacagaggtgccggccgagctgagcttgtgccgaaagctggaggtcctgagcttgtcgcacaactgcctgtcccagctccctgcatgcttcgccgacctctctagactgaggaagctaaacctcagcaacaacttcttcgcgcacatccccatgtgtgtgttctccctgaaggaactgattttcttgcacgtgggctcgaatcgcctggaaaacatcgctgagagcatccagcacctggccagcctgcagatcttcatcgcagagggcaacaacatccactccttcccgaggtcgctttgcctggtcaccagcctggagctgctgaacctcaacaacaatgacatccagaccctcccgagcgaactccacctgctgtgtagactggtgaggatcgcctggaatcccatggacaaagggctccacatttcccacaaccctttatccaagcctctgccggagctggtggaggggggcctggagatgctcttcggctacctgaaggacaaaaaacacacctga

SEQ ID NO: 41794 - DNA, 906 bp, Artificial Sequence
  derived and/or modified sequence
atgggcgcccggcagagccgggccagcagcaaggacaagggccccaagcggatgttgttcacaggaagacggcagaaattcagcccatgggacgatgcacttctttccggcagagacccaagatctctcctgaaaagagggatgcatcacgtctcatttagtcttgtcactcggggaatgacagatattcccgacttcctgtgggggctctcagaggttcagaagctcaacctgagccacaatcaactgagggtcctaccccccgaagtcggtaagctgacccggatcgtcgttctcaatctgtgcggcaaccggcttaaatccttaccgagagaagtcagtctgcttcagtgtctcaaggtgctgttcgtgaacatgaattgcctaaccgaggttcccgccgagctgagtttatgcagaaaattggaggttctttccctctcacacaactgtctgtctcaactgcccgcatgctttgcggatctgtctagattacgcaagttaaacctgtcaaataacttttttgcccacatccccatgtgtgtgttctcactcaaagagctcatctttttgcacgtgggcagcaatagactggaaaatatcgctgaatcaattcagcacctggcgtctctccaaatttttatcgccgaggggaacaacatacacagttttccccgcagcctctgtttagtgaccagtctggagttgctgaatctgaacaacaatgacattcagacccttccgagcgaactgcacctgctctgccgcctagtgcgcatcgcttggaatccaatggacaagggccttcacatttcccataacccattaagcaagccactgcctgagctcgttgaaggcggcctggaaatgctttttgggtatctcaaagataaaaagcatacatag

SEQ ID NO: 41795 - DNA, 906 bp, Artificial Sequence
  derived and/or modified sequence
atgggggctcggcagagtcgcgcttcctcaaaagataagggacccaaacggatgcttttcaccgggagacgacaaaagttcagcccttgggacgacgccctcctgtccggaagagaccctcgctctctgcttaagcggggaatgcaccatgtgtctttctccctcgttacccgtggaatgactgacattcccgattttctctggggactgagtgaagtgcagaagttaaacctgtcacacaaccaacttagggtgctgccaccggaggtgggcaaattgaccagaattgtggtactgaatctgtgtgggaatcgcctaaagtctctgccgagagaggtgtcgctcttacagtgccttaaggtgctctttgtgaacatgaactgcctaacagaagtgcctgctgaactgagtctctgtagaaaactcgaggtgcttagtctgtctcataactgtctgagccagctgcctgcctgtttcgcggacctgagtcgtctcaggaagctcaacttgagtaataacttcttcgctcacatccctatgtgtgtgttctctctgaaagagttaatcttcctgcacgtgggatctaatagactggaaaatatagcagaatctatacagcacctcgcatcattacaaatttttattgccgaagggaacaacattcacagttttcccaggagtctgtgtctggtcacttcactcgaacttcttaatctgaacaacaacgatattcagacactaccatctgagttacatcttctgtgtcgactcgtccggatcgcctggaacccaatggataagggacttcacatctcccacaaccccctcagcaagccgctgcccgagttagtggagggtggcctcgagatgctttttggatacctcaaagacaagaagcatacatag

SEQ ID NO: 41796 - protein, 238 aa, Artificial Sequence
  derived and/or modified sequence
MSRLGLPEEPVRNSLLDDAKARLRKYDIGGKYSHLPYNKYSVLLPLVAKEGKLHLLFTVRSEKLRRAPGEVCFPGGKRDPTDMDDAATALREAQEEVGLRPHQVEVVCCLVPCLIDTDTLITPFVGLIDHNFQAQPNPAEVKDVFLVPLAYFLHPQVHDQHYVTRLGHRFINHIFEYTNPEDGVTYQIKGMTANLAVLVAFIILEKKPTFEVQFNLNDVLASSEELFLKVHKKATSRL

SEQ ID NO: 41797 - DNA, 717 bp, Artificial Sequence
  derived and/or modified sequence
atgagcagactgggcctgcccgaggagcccgtgagaaacagcctgctggacgacgccaaggccagactgagaaagtacgacatcggcggcaagtacagccacctgccctacaacaagtacagcgtgctgctgcccctggtggccaaggagggcaagctgcacctgctgttcaccgtgagaagcgagaagctgagaagagcccccggcgaggtgtgcttccccggcggcaagagagaccccaccgacatggacgacgccgccaccgccctgagagaggcccaggaggaggtgggcctgagaccccaccaggtggaggtggtgtgctgcctggtgccctgcctgatcgacaccgacaccctgatcacccccttcgtgggcctgatcgaccacaacttccaggcccagcccaaccccgccgaggtgaaggacgtgttcctggtgcccctggcctacttcctgcacccccaggtgcacgaccagcactacgtgaccagactgggccacagattcatcaaccacatcttcgagtacaccaaccccgaggacggcgtgacctaccagatcaagggcatgaccgccaacctggccgtgctggtggccttcatcatcctggagaagaagcccaccttcgaggtgcagttcaacctgaacgacgtgctggccagcagcgaggagctgttcctgaaggtgcacaagaaggccaccagcagactgtag

SEQ ID NO: 41798 - DNA, 717 bp, Artificial Sequence
  derived and/or modified sequence
atgtcccgcttaggactgccagaagaaccagtccgcaattccttgctcgatgatgcaaaagcacgactgagaaaatatgacataggcggaaaatattcgcatctgccctataataagtactctgttctgctgccactcgtggctaaggagggcaaactacatctccttttcactgtcaggtccgaaaagcttcggcgggctcccggggaagtctgttttccaggtgggaagagggacccaaccgatatggacgacgccgccacagcgttgagagaggctcaggaagaggtggggctgcgaccacaccaggtcgaggtagtgtgctgcctggtcccctgtctgatcgacactgacacactgattaccccctttgtgggtcttatcgaccacaattttcaggctcagcctaacccggccgaggtcaaagatgtctttctggtccccctcgcttactttctacacccccaggtgcacgaccagcactatgttactcgcttaggacatcggtttattaaccacatattcgagtacaccaatcccgaagatggcgtgacgtaccaaatcaagggaatgacggccaatctggcagtgctcgtagcctttatcatccttgaaaagaagccaactttcgaagttcagtttaatctgaatgatgtgctggcgtccagtgaagagctgtttctgaaggtgcataagaaggccacgagccggctctag

SEQ ID NO: 41799 - DNA, 717 bp, Artificial Sequence
  derived and/or modified sequence
atgagccggctgggcctgcctgaggagcctgtgaggaacagcctgctggatgatgccaaggcccggctgaggaaatatgacatcggcggcaagtacagccacctgccctacaacaagtacagcgtgctgctgcccctggtggccaaggagggcaagctgcacctgctcttcaccgtgcgctctgagaagctgcggcgggcccctggagaggtgtgcttccctgggggcaagagggaccccacagacatggatgatgctgccacagccctgcgggaggcccaggaggaggtgggcctgcggccccaccaggtggaggtggtgtgctgcctggtgccctgcctgattgacacagacaccctcatcaccccatttgtgggcctgattgaccacaacttccaggcccagcccaacccagctgaggtgaaggatgtgttcctggtgcccctggcctacttcctgcacccccaggtgcatgaccagcactacgtgacccggctgggccaccgcttcatcaaccacatctttgagtacaccaacccagaagatggagtgacctaccagatcaagggcatgacagccaacctggccgtgctggtggccttcatcatcctggagaagaagcccacctttgaggtgcagttcaacctgaatgatgtgctggccagcagcgaggagctgttcctgaaggtgcacaagaaggccaccagccggctgtag

SEQ ID NO: 41800 - DNA, 717 bp, Artificial Sequence
  derived and/or modified sequence
atgagccggctgggcctgcccgaggagcccgtgcggaacagcctgctggatgacgcaaaggctaggctgaggaagtacgacataggagggaagtacagccaccttccctataacaaatatagcgttctcctcccactggtcgccaaggaggggaaattacatctcctgtttacagtcagaagcgagaagctcagacgggcccctggcgaggtctgctttccaggcggtaagcgggatccgactgatatggatgacgctgccactgctttgcgcgaagcacaggaggaggtgggcttacgcccgcaccaggtggaggtggtttgctgccttgtgccatgcttgattgacaccgacaccctaatcacacccttcgttggactcattgaccataacttccaagcccagcccaaccccgctgaggtcaaagatgttttcctggtccctcttgcatactttctgcatccccaggtgcacgaccagcattatgtgacaagactcggccacaggttcattaatcatattttcgaatataccaatcccgaagacggtgtcacttaccagataaagggaatgacagctaacctggccgtgttagttgccttcatcattctagagaagaaacctacctttgaggtgcagtttaacctgaatgacgtcttggcatcgtcagaagagcttttcctaaaagtccataaaaaggccactagcaggctgtag

SEQ ID NO: 41801 - DNA, 1090 bp, Artificial Sequence
  derived and/or modified sequence
gctctgcgcaagcgcgaccgaccgagcagctccgaggagtccgcccggaaacaaacattccccagggcaatgtcacgacttggtcttcccgaggagccagtcagaaacagtttgctagatgatgctaaggcccgcttaagaaagtatgatattggaggcaaatattctcacttgccatataacaaatactccgtccttttgccattggtggctaaagaaggaaaactccatttgttgttcaccgtccggtcagagaagctaagaagggcccctggagaagtttgcttccctggaggtaagcgtgaccctacagacatggatgatgcagccacagctctccgggaagcccaggaggaagtgggtctccgtcctcaccaagtggaagttgtctgctgcctggtgccatgtcttattgatacagatacattgataactccatttgtgggtttaatagaccacaacttccaggcccagccgaatcctgctgaagttaaggatgtattcctggtgcctctggcctatttcctgcatccacaggtccatgaccagcattacgtcacacgtcttggtcaccgttttattaatcatatctttgagtacacaaaccctgaagacggtgtcacttaccagatcaagggaatgacggcaaaccttgcagtgttggtggcctttatcattttggaaaaaaaacccacctttgaggttcaatttaatcttaatgatgtattagcatcctctgaagagttattcctgaaggttcataaaaaagctacaagcaggttatgatttactagagcaagagacaaagaactattcacgaggattctgtgtgtgcttattcgtagaacaacaacaatgccagctgttggaatttgacaggtgtgaatattttttctgcagtatgtagttagaatccttgcctcttttccagttgccttctattgtctgaaaaagtaaaagccattcaaaaatgaaaactatgttcatagtgttgcatattttcacccacaatatgttaataatatttttcttacacatataataaagaatatctggcacatactaggcccttaataaagattttttgaat

SEQ ID NO: 41802 - DNA, 899 bp, Artificial Sequence
  derived and/or modified sequence
gctctgcgcaagcgcgaccgaccgagcagctccgaggagtccgcccggaaacaaacattccccagggcaatgtcacgacttggtcttcccgaggagccagtcagaaacagtttgctagatgatgctaaggcccgcttaagaaagtatgatattggaggcaaatattctcacttgccatataacaaatactccgtccttttgccattggtggctaaagaaggaaaactccatttgttgttcaccgtccggtcagagaagctaagaagggcccctggagaagtttgcttccctggaggtaagcgtgaccctacagacatggatgatgcagccacagctctccgggaagcccaggaggaagtgggtctccgtcctcaccaagtggaagttgtctgctgcctggtgccatgtcttattgatagatgggggtctcgctatgttgatgaggctggtctcgagctcctggcctcaagtgatcctcccacctcagcctcccaaagtgctgggattacagacagatacattgataactccatttgtgggtttaatagaccacaacttccaggcccagccgaatcctgctgaagttaaggatgtattcctggtgcctctggcctatttcctgcatccacaggtccatgaccagcattacgtcacacgtcttggtcaccgttttattaatcatatctttgagtacacaaaccctgaagacggtgtcacttaccagatcaagggaatgacggcaaaccttgcagtgttggtggcctttatcattttggaaaaaaaacccacctttgaggttcaatttaatcttaatgatgtattagcatcctctgaagagttattcctgaaggttcataaaaaagctacaagcaggttatgatttactagagcaagagaca

SEQ ID NO: 41803 - DNA, 717 bp, Artificial Sequence
  derived and/or modified sequence
atgagcaggctaggattgccagaggagcccgtcagaaattccctgttggacgatgcaaaagctcggctccggaaatacgacatcggcggaaagtatagccatttaccctacaacaagtactcagttctgctccccctcgtggcgaaagaaggcaagctgcatctgctcttcacggtcagatcagaaaagctgaggcgcgctcctggcgaagtgtgttttccagggggaaagcgcgaccctactgacatggatgacgccgctacggcgcttagggaagcacaggaggaggtaggactcaggcctcatcaggtggaggtggtttgctgtctggtaccttgtctaatcgataccgatacactcataactcccttcgttggactcatcgatcacaatttccaagcccaaccaaatccagctgaagttaaggacgtgttcttggttccgctcgcttactttctgcacccccaggtgcacgaccagcactacgttacacggctgggccaccgcttcattaaccatatcttcgaatacacgaatccagaagatggcgtgacctaccaaataaaaggcatgaccgccaacctggcggtgctggtggcctttattatactcgagaagaagccaaccttcgaagttcagtttaacctaaatgacgtgttggctagttctgaggagttgttcttgaaagtgcataaaaaagctacaagccgactgtag

SEQ ID NO: 41804 - protein, 536 aa, Artificial Sequence
  derived and/or modified sequence
MVSIRDFTMPKKFVQMLVFNLTLTEVVLSGNVLIWPTDGSHWLNIKIILEELIQRNHNVTVLASSATLFINSNPDSPVNFEVIPVSYKKSNIDSLIEHMIMLWIDHRPTPLTIWAFYKELGKLLDTFFQINIQLCDGVLKNPKLMARLQKGGFDVLVADPVTICGDLVALKLGIPFMYTLRFSPASTVERHCGKIPAPVSYVPAALSELTDQMTFGERIKNTISYSLQDYIFQSYWGEWNSYYSKILGRPTTLCETMGKAEIWLIRTYWDFEFPRPYLPNFEFVGGLHCKPAKPLPKEMEEFIQSSGKNGVVVFSLGSMVKNLTEEKANLIASALAQIPQKVLWRYKGKKPATLGNNTQLFDWIPQNDLLGHPKTKAFITHGGTNGIYEAIYHGVPMVGVPMFADQPDNIAHMKAKGAAVEVNLNTMTSVDLLSALRTVINEPSYKENAMRLSRIHHDQPVKPLDRAVFWIEFVMRHKGAKHLRVAAHDLTWFQYHSLDVIGFLLVCVTTAIFLVIQCCLFSCQKFGKIGKKKKRE

SEQ ID NO: 41805 - DNA, 1611 bp, Artificial Sequence
  derived and/or modified sequence
atggtgagcatcagagacttcaccatgcccaagaagttcgtgcagatgctggtgttcaacctgaccctgaccgaggtggtgctgagcggcaacgtgctgatctggcccaccgacggcagccactggctgaacatcaagatcatcctggaggagctgatccagagaaaccacaacgtgaccgtgctggccagcagcgccaccctgttcatcaacagcaaccccgacagccccgtgaacttcgaggtgatccccgtgagctacaagaagagcaacatcgacagcctgatcgagcacatgatcatgctgtggatcgaccacagacccacccccctgaccatctgggccttctacaaggagctgggcaagctgctggacaccttcttccagatcaacatccagctgtgcgacggcgtgctgaagaaccccaagctgatggccagactgcagaagggcggcttcgacgtgctggtggccgaccccgtgaccatctgcggcgacctggtggccctgaagctgggcatccccttcatgtacaccctgagattcagccccgccagcaccgtggagagacactgcggcaagatccccgcccccgtgagctacgtgcccgccgccctgagcgagctgaccgaccagatgaccttcggcgagagaatcaagaacaccatcagctacagcctgcaggactacatcttccagagctactggggcgagtggaacagctactacagcaagatcctgggcagacccaccaccctgtgcgagaccatgggcaaggccgagatctggctgatcagaacctactgggacttcgagttccccagaccctacctgcccaacttcgagttcgtgggcggcctgcactgcaagcccgccaagcccctgcccaaggagatggaggagttcatccagagcagcggcaagaacggcgtggtggtgttcagcctgggcagcatggtgaagaacctgaccgaggagaaggccaacctgatcgccagcgccctggcccagatcccccagaaggtgctgtggagatacaagggcaagaagcccgccaccctgggcaacaacacccagctgttcgactggatcccccagaacgacctgctgggccaccccaagaccaaggccttcatcacccacggcggcaccaacggcatctacgaggccatctaccacggcgtgcccatggtgggcgtgcccatgttcgccgaccagcccgacaacatcgcccacatgaaggccaagggcgccgccgtggaggtgaacctgaacaccatgaccagcgtggacctgctgagcgccctgagaaccgtgatcaacgagcccagctacaaggagaacgccatgagactgagcagaatccaccacgaccagcccgtgaagcccctggacagagccgtgttctggatcgagttcgtgatgagacacaagggcgccaagcacctgagagtggccgcccacgacctgacctggttccagtaccacagcctggacgtgatcggcttcctgctggtgtgcgtgaccaccgccatcttcctggtgatccagtgctgcctgttcagctgccagaagttcggcaagatcggcaagaagaagaagagagagtag

SEQ ID NO: 41806 - DNA, 1611 bp, Artificial Sequence
  derived and/or modified sequence
atggtatcaattcgggacttcaccatgcccaagaaattcgtccaaatgctagttttcaacctgacgctcactgaggttgtgctaagtggaaatgtgttgatctggcctacagatggaagtcactggttgaatatcaagattatattggaagagctgattcagagaaatcacaacgtgactgtgctggctagttctgcaacgctttttataaattcaaacccagatagcccagtgaattttgaggtcattccagtatcttataaaaagtctaatatagattccttgatagaacacatgattatgctatggatagatcatcgtcccaccccactgactatttgggctttttacaaggagctggggaaactgcttgataccttcttccagatcaacattcaactctgtgatggcgttttaaaaaatcccaagcttatggcaaggctgcaaaaagggggctttgatgtgttagtggctgaccctgttacaatttgcggcgacctggtggctcttaagttaggtattccttttatgtatacccttaggttctctcctgcaagcaccgttgaacgccactgcggaaagattccggcccctgtctcttatgtcccagctgcactgtccgaactaacggatcagatgacatttggagaacggattaaaaacaccataagttactccctccaggactacatattccaaagctattggggagagtggaatagttattatagtaagatcctgggccgaccaaccacattgtgtgaaacgatgggtaaggccgaaatctggctgattcgtacttactgggatttcgagttcccaagaccctacctgcctaatttcgaattcgtcggaggcctgcactgtaagcccgctaaaccattgcctaaggaaatggaagaatttattcagagtagcggcaagaatggcgttgtcgtgttttcccttggctcaatggtgaagaatcttaccgaggagaaagccaaccttattgcatctgccctcgcccagattccccaaaaagtgttgtggcggtacaaaggcaagaaacccgccacattgggaaataacacacaattgttcgactggatcccccagaatgatctgctgggccaccctaaaaccaaggccttcattactcacggagggacaaacgggatctacgaagctatttatcacggggtccccatggtaggcgtccctatgtttgcagatcaacctgacaacatagctcatatgaaggcaaagggggcggcagtcgaggttaatctgaacaccatgaccagtgtcgacctgctctccgctcttagaaccgtgatcaatgaacctagttacaaggaaaatgcgatgcggctgagtaggatacatcatgatcaaccggtgaagccactggatagagcagttttctggattgaattcgtgatgaggcataagggagcaaaacatttgcgtgtggcggcccacgatttaacatggtttcagtaccatagcctggatgtaatcgggtttctcctggtgtgcgtgactaccgccatctttctggtcatacaatgctgtctatttagctgccagaagttcggcaagataggaaagaaaaaaaaaagggagtag

SEQ ID NO: 41807 - DNA, 1611 bp, Artificial Sequence
  derived and/or modified sequence
atggtgtccatccgggacttcaccatgcccaagaagtttgtgcagatgctggtgttcaacctgaccctgacagaggtggtgctgtctggaaatgtgctgatctggcccacagatggcagccactggctgaacatcaagatcatcctggaggagctgatccagaggaaccacaacgtgacagtgctggccagcagcgccaccctcttcatcaacagcaacccagacagccctgtgaactttgaggtgattcctgtgtcctacaagaagagcaacatcgacagcctcatcgagcacatgatcatgctgtggattgaccaccggcccacccccctgaccatctgggccttctacaaggagctgggcaagctgctggacaccttcttccagatcaacatccagctgtgtgatggagtgctgaagaaccccaagctgatggcccggctgcagaagggcggctttgatgtgctggtggccgaccctgtgaccatctgtggggacctggtggccctgaagctgggcatccccttcatgtacaccctgcgcttcagccctgccagcacagtggagcggcactgtgggaagatcccagcccctgtgtcctatgtgcctgctgccctgtctgagctgacagaccagatgacctttggagagcgcatcaagaacaccatctcctacagcctgcaggactacatcttccagagctactggggcgagtggaacagctactacagcaagatcctgggccggcccaccaccctgtgtgagaccatgggcaaggccgagatctggctgatccgcacctactgggactttgagttcccccggccctacctgcccaactttgaatttgtgggcggcctgcactgcaagccagccaagcccctgcccaaggagatggaggagttcatccagagcagcggcaagaatggagtggtggtgttcagcctgggctccatggtgaagaacctgacagaggagaaggccaacctgattgccagcgccctggcccagatcccccagaaggtgctgtggagatacaagggcaagaagccagccaccctgggcaacaacacccagctgtttgactggatcccccagaatgacctgctgggccaccccaagaccaaggccttcatcacccatggaggcaccaacggcatctatgaggccatctaccatggagtgcccatggtgggcgtgcccatgtttgctgaccagcctgacaacatcgcccacatgaaggccaagggagctgctgtggaggtgaacctgaacaccatgacctctgtggacctgctgagcgccctgaggacagtcatcaatgagcccagctacaaggaaaatgccatgaggctgagccgcatccaccacgaccagcctgtgaagcccctggacagagctgtgttctggattgaatttgtgatgaggcacaagggggccaagcacctgcgggtggccgcccatgacctgacctggttccagtaccacagcctggatgtgattggcttcctgctggtgtgtgtgaccacagccatcttcctggtgatccagtgctgcctcttcagctgccagaagtttgggaagattggcaagaagaagaagcgggagtag

SEQ ID NO: 41808 - DNA, 1611 bp, Artificial Sequence
  derived and/or modified sequence
atggtgagcatccgggacttcaccatgcccaagaagttcgtgcagatgttagtgtttaacctgaccctgactgaagttgtccttagcggcaacgtccttatctggccaaccgacggaagtcactggttaaatattaagatcatcttggaggaactaatccagcgaaaccataacgtgaccgtgttagcatccagcgcaacgctgttcatcaatagcaatcccgatagtccagtgaatttcgaggttatccccgtgtcttacaagaaaagtaacatcgatagcttgatagaacacatgattatgctttggatcgatcacaggccaacccctctcaccatatgggctttctacaaagagttggggaagcttctagatacatttttccaaattaatatccaactgtgcgatggcgtgctgaagaatccaaagttaatggcccggctgcagaagggtgggttcgacgtgctggtcgccgatccggtgactatttgtggagacctcgtagccctcaaattaggaatcccgttcatgtataccctgcgcttcagcccagcctcaacggtggaacgtcactgcggcaagatccctgctcccgtgagctatgtcccagcggccctcagcgaactgacagaccaaatgacctttggcgagcgtattaaaaacacaatatcttacagcttgcaagattatatattccaatcttactggggagagtggaatagctactatagcaagatcctgggcaggccgaccaccctttgtgaaaccatgggcaaagccgaaatttggctgattcgtacctattgggattttgagtttccacgcccgtatttgccgaacttcgagttcgtgggggggctccactgtaagcctgcaaagccgctgcctaaggaaatggaggagttcattcagagttctgggaagaacggggttgtagtatttagcctgggctccatggtgaagaatctgacagaggagaaggccaacttgattgcatctgctctggcacagattccccagaaggtgttgtggagatataaggggaaaaaaccagcgaccctcggaaacaacacgcaacttttcgactggattcctcagaacgatttgctcgggcatcctaaaacaaaggcttttattactcacggaggcaccaacggcatctacgaggcaatataccacggggtgcccatggtaggagtcccaatgtttgctgatcaacctgataacatcgcccatatgaaagccaagggagctgcagtggaggttaacctaaacacaatgactagcgtcgatctgctgtctgcacttcgcaccgtgataaacgaaccatcttacaaagaaaacgccatgaggctgagcaggatccaccatgatcaacctgtgaaacccttggatcgggccgtgttttggatcgagtttgtcatgagacataaaggagccaaacacctgcgcgtggcagctcacgatctgacgtggttccagtaccattctctggatgttatcggcttcctgctcgtgtgcgttacgactgccatctttctcgtcatccaatgctgcttgttcagctgccagaagttcggtaagatcggcaaaaaaaaaaagagggaatag

SEQ ID NO: 41809 - DNA, 1611 bp, Artificial Sequence
  derived and/or modified sequence
atggtgtctattcgagattttactatgcctaagaagttcgtgcagatgctggtattcaatctcacccttaccgaagtggttttaagtgggaacgtgctgatttggcctacagatggctctcactggttgaacatcaagatcatccttgaggaactgatccaacgaaaccacaacgtcacagtcctggctagttctgctacactgttcattaactctaatccagattccccagtcaacttcgaggttatccccgtgtcctataagaagtctaatatcgacagcctgattgaacacatgatcatgctctggatcgaccatagacccactccacttacaatatgggccttctacaaggagctgggcaagttgctggatactttcttccagattaacattcaactatgtgacggcgtgctgaagaatccaaaattgatggctcggttacagaagggagggttcgacgtattagtggcggaccccgtgacaatatgtggggatctcgtggccctcaaactgggaatacccttcatgtatacactgcggttcagtccggcatctactgttgagaggcactgtggcaaaatccctgctccagtgagctacgtgcctgctgccttgtctgagttaaccgaccaaatgaccttcggcgaaagaatcaaaaatacgatctcatattccctgcaggactacatcttccagtcctactggggggagtggaacagctattactccaaaatcctcggcagacccactacgctttgcgagaccatgggcaaggcggagatctggcttatcaggacatactgggacttcgaatttcctcgaccgtatctgccaaatttcgagtttgtcggcggactgcactgcaagccggcaaagcccttaccaaaggagatggaggagtttatccagagctcggggaagaatggcgtggtggtgttctctctgggctctatggtaaagaatctgaccgaagagaaggccaacttgatcgcgagcgccttagcacagattccccaaaaagtgttgtggagatataaaggcaaaaaaccagcaactctgggcaataatactcagctctttgactggatcccacagaacgatctgctgggccaccccaaaactaaggctttcattacccatggcggaacaaacgggatatacgaggccatctaccacggcgtacctatggtaggggtgcctatgtttgcagaccagcctgataatattgcgcacatgaaggctaaaggggctgctgtagaggtgaacctgaacacgatgacttcggtcgacctgttgagcgccctgcgtaccgttataaacgagccctcgtacaaggagaacgcgatgcgcttgtctaggatccatcatgatcagcccgtgaaaccgcttgacagagctgtgttctggattgaatttgtcatgcggcacaaaggggcaaaacatctgcgcgtggcagctcacgacctgacatggttccagtaccattccctggacgtaataggctttcttctggtgtgtgtgacaaccgccatctttttagtcatccagtgctgtctgttcagctgtcaaaagttcggaaaaattggtaaaaagaagaagcgcgaatag

SEQ ID NO: 41810 - DNA, 2566 bp, Artificial Sequence
  derived and/or modified sequence
atggtttccataagggattttaccatgcctaagaagtttgtccagatgctggtttttaatttgactctgactgaagttgttctaagtgggaatgtgttaatttggcctacagatggtagccattggttaaatattaagattattctagaagagttgattcaaagaaatcacaatgtgactgtactggcttcatcagcaactctattcatcaactccaatcccgattctcctgtgaattttgaagtgatacctgtttcctacaagaagagcaatatagattccttaattgagcatatgataatgctgtggattgaccatagaccaactcctctcacaatatgggctttctacaaagaactaggaaaacttctagacactttctttcaaattaacatacaactctgtgatggtgtactaaagaacccaaagttgatggcaagacttcagaaaggtggttttgatgtgttggtagcagacccagtaacaatctgtggtgatcttgttgctctgaaattaggaattccatttatgtacacattgaggttctctccagcatcaacagtggagagacactgtgggaaaatcccagcaccagtctcctatgtaccggcagccttatcagagctcactgaccagatgacctttggtgaaaggattaaaaataccatatcttattctctgcaagactatatatttcagtcctactggggagaatggaattcatactatagcaaaattttaggaagacccactacgttatgtgagactatggggaaagctgaaatttggttaatccgaacatattgggattttgaatttcctcgtccatacttacctaattttgagtttgttggaggattgcactgcaaacctgccaaacctttacctaaggaaatggaagaatttatccagagctcaggtaaaaatggtgttgtggtgttttctctgggatcaatggtcaaaaaccttacagaagaaaaggccaatcttattgcctcagcccttgcccagattccacagaaggttttatggagatacaaaggaaagaaaccagccacattaggaaacaatactcagctctttgattggataccccagaatgatcttcttggacatcccaaaaccaaagcttttatcactcatggtggaactaatgggatctacgaagctatttaccacggagtccctatggtgggagttcccatgtttgctgatcagcctgataacattgctcacatgaaggccaaaggagcagctgtggaagtgaacctaaacacaatgacaagtgtggatttgcttagcgctttgagaacagtcattaatgaaccttcttataaagagaatgctatgaggttatcaagaattcaccatgatcaacctgtaaagcccctggatcgagcagtcttctggatcgagtttgtcatgcgccacaaaggagccaagcaccttcgggttgcagcccatgacctcacctggttccagtaccactctttggatgtaattgggttcttgctggtctgtgtgacaacggctatatttttggtcatacaatgttgtttgttttcctgtcaaaaatttggtaagataggaaagaagaaaaaaagagaataggtcaagaaaaagaggaaatatatatatttttaagtttggcaaaatcctgagtagtgtagtcctattaattccagacaaaaggagtttaacaaaaacacgtctcccatcctgtttccaaattttctatttctctacctgcgataagcctactgataaagcctagattttggcatgattattattaacttgtgagttatagtcttctatttttcctttgtctctccctgctgactataccctcttcctgtcacttttctgacacaaggatactacctaattttaaatatgttctattcatagtatcaaattattttatcgttaaccttaattaatgattaacaatatgctgaatcctggtaatgcatacagtgtagatggaatttgataggtgtaaggaagagtcaaattcacaaatttccatataccaaacaaatcagggagccaccgtaggagagtagtgtgttatgagaaaggtaatgatttccttttttaataaaaacaaactcttctgcttgctcaatgtttcaggagttagagaatgaattttaagtgtgacgtgcgtccctattaaatgtctacaaaattttcattaagcatatctagaaaatcacggcataacttgcctgcctttcttcaacatatattcttatataacctgtagtggaagatttgggtactgtctttaataaatcaatcaatcgactcttttatttcaaggagaaagttctatgttatatgttgaaggtgaacagatcatatttagaggatataacaattagaaatctagaaaataattatcatttttataaaatttttagtcaactgtacaaataattacataaaacatcaattaattatgcttaaaaatcactaatgttcataatatataatcactatttgtaatcaaaagtttaattttatgccaaaaaataaaaaatgcttacttggaatttga

SEQ ID NO: 41811 - protein, 824 aa, Artificial Sequence
  derived and/or modified sequence
MRGLGLWLLGAMMLPAIAPSRPWALMEQYEVVLPWRLPGPRVRRALPSHLGLHPERVSYVLGATGHNFTLHLRKNRDLLGSGYTETYTAANGSEVTEQPRGQDHCFYQGHVEGYPDSAASLSTCAGLRGFFQVGSDLHLIEPLDEGGEGGRHAVYQAEHLLQTAGTCGVSDDSLGSLLGPRTAAVFRPRPGDSLPSRETRYVELYVVVDNAEFQMLGSEAAVRHRVLEVVNHVDKLYQKLNFRVVLVGLEIWNSQDRFHVSPDPSVTLENLLTWQARQRTRRHLHDNVQLITGVDFTGTTVGFARVSAMCSHSSGAVNQDHSKNPVGVACTMAHEMGHNLGMDHDENVQGCRCQERFEAGRCIMAGSIGSSFPRMFSDCSQAYLESFLERPQSVCLANAPDLSHLVGGPVCGNLFVERGEQCDCGPPEDCRNRCCNSTTCQLAEGAQCAHGTCCQECKVKPAGELCRPKKDMCDLEEFCDGRHPECPEDAFQENGTPCSGGYCYNGACPTLAQQCQAFWGPGGQAAEESCFSYDILPGCKASRYRADMCGVLQCKGGQQPLGRAICIVDVCHALTTEDGTAYEPVPEGTRCGPEKVCWKGRCQDLHVYRSSNCSAQCHNHGVCNHKQECHCHAGWAPPHCAKLLTEVHAASGSLPVFVVVVLVLLAVVLVTLAGIIVYRKARSRILSRNVAPKTTMGRSNPLFHQAASRVPAKGGAPAPSRGPQELVPTTHPGQPARHPASSVALKRPPPAPPVTVSSPPFPVPVYTRQAPKQVIKPTFAPPVPPVKPGAGAANPGPAEGAVGPKVALKPPIQRKQGAGAPTAP

SEQ ID NO: 41812 - DNA, 2475 bp, Artificial Sequence
  derived and/or modified sequence
atgcggggtttgggactatggctcctgggcgcgatgatgctgcccgccatagctccatctaggccatgggcattgatggagcaatacgaggtggtgctcccttggaggctgcccggccctcgggtcagacgtgcactcccctctcatctcggcttgcaccctgaacgggttagctacgtactcggagccaccgggcacaatttcaccctccacctacgcaagaatcgagatctactcggtagcggttacacagaaacatacactgctgcgaatggttctgaggtcactgagcagccaagaggccaggaccactgtttctatcaaggccatgtggaaggctaccctgacagcgccgcttccctgagtacctgcgctggcctccgcgggttttttcaggtaggttccgaccttcaccttatcgaacctctggatgaggggggcgagggcgggaggcacgcagtttaccaagccgagcatctacttcaaaccgctggaacatgcggagtgagtgacgattccctgggctccctgctggggccgcgcactgcagccgtgtttcgacccagacccggcgattcacttccaagcagagaaacccgatacgtggaattgtacgttgtagtggacaacgccgagtttcagatgttgggcagcgaagcagcggtgcggcatcgtgtcctcgaggttgtaaatcacgtcgacaagctttaccagaagctgaactttcgcgtggtcctggtagggttagagatttggaacagccaggatcgattccatgtgtccccagatccaagtgtaacactggaaaacttgcttacctggcaggcccggcagcgcaccaggcgccatttgcacgacaacgtgcagctgatcaccggcgtcgacttcacaggtaccacggtcggtttcgcccgggtttctgcgatgtgttcccattcaagtggggcagtaaaccaggaccactctaagaaccccgtgggagttgcttgtactatggcccatgagatggggcataacctggggatggatcacgacgaaaacgttcagggctgcaggtgtcaggagcgcttcgaagccggccgatgcatcatggccggcagtataggctcttcttttccccgtatgttctcagattgtagccaagcatacctggagtctttcctggaacggcctcagtccgtgtgtctcgcaaacgctccagatctctctcacctagtcggcggcccagtgtgcggcaatctgttcgttgaaaggggtgagcagtgtgattgtgggccacccgaggattgtcgaaaccggtgttgcaatagtacaacgtgtcagctagctgagggagcccagtgtgctcacggaacatgttgccaggagtgtaaagtcaaacccgcgggcgaactttgcaggcctaaaaaggacatgtgtgacctcgaagaattctgcgatgggaggcacccagagtgccccgaagatgcattccaggaaaatggtacaccctgctccggaggttattgctacaacggagcatgccccacattggctcagcaatgccaggccttctgggggcccggaggccaagctgcggaggagtcatgttttagctacgatatcctgcccggctgtaaggctagccgctacagagccgatatgtgcggggtattacaatgtaaaggcggacagcagcccctgggcagagctatatgcattgtggacgtctgccacgccttaaccaccgaggatggtacagcatacgaacctgtgccggagggcactagatgcgggccagagaaggtctgctggaaggggagatgtcaggatcttcacgtttatagatcaagcaattgtagcgcccagtgtcataatcacggcgtctgtaatcacaaacaggagtgccactgtcatgcgggctgggcgccaccccattgcgccaagctgctgaccgaagtccacgctgcttcaggctctttgcccgttttcgtggtggtggtgctggtccttctggccgttgtactcgtaacactagcaggaattatcgtctatcgcaaggcgcgatctaggatcctgtcacgaaacgtcgctcctaagactactatgggcaggtccaatcctctgttccaccaggctgcgtctcgggttcctgcaaaagggggcgctcctgccccatcaaggggtccacaggagcttgtgcccacaactcacccgggtcaaccagcgagacacccagcgtcgtcagttgcactgaagcggccaccccccgctccacccgttacagtgtcttcacccccatttccagtgcctgtctacacaaggcaagcgcctaagcaggtgatcaaacccacatttgccccccccgtcccaccggtgaagcccggtgccggagctgcaaaccccgggccagcagaaggcgctgttggccctaaagtcgccctgaaaccgcccatacagcggaagcagggtgccggggcccccacagctccctag

SEQ ID NO: 41813 - DNA, 2475 bp, Artificial Sequence
  derived and/or modified sequence
atgaggggcctgggcctgtggctgctgggcgccatgatgctgcctgccatcgcccccagccggccctgggccctgatggagcagtatgaggtggtgctgccctggaggctgcccggcccccgggtgagaagagccctgcccagccacctgggcctgcaccctgagcgggtgtcctatgtgctgggcgccaccggccacaacttcaccctgcacctgaggaagaacagagacctgctgggcagcggctacacagagacctacacagctgccaatggaagtgaggtgacagagcagccccggggccaggaccactgcttctaccagggccacgtggagggctacccagattctgctgccagcctgagcacctgtgccggcctgcggggcttcttccaggtgggcagtgacctgcacctgattgagcccctggatgagggcggggagggcggcagacatgctgtgtaccaggccgagcacctgctgcagacagctggcacctgtggggtgtctgatgacagcctgggcagcctgctgggccccaggacagctgctgtgttccggcccaggcctggggacagcctgcccagccgggagaccaggtatgtggagctgtatgtggtggtggacaatgctgagttccagatgctgggcagcgaggccgctgtgcgccaccgggtgctggaggtggtgaaccacgtggacaagctgtaccagaagctgaacttccgggtggtgctggtgggcctggagatctggaacagccaggaccgcttccacgtgtccccagaccccagcgtgaccctggagaacctgctgacctggcaggcccggcagaggaccaggaggcacctgcatgacaacgtgcagctgatcaccggggtggacttcaccggcaccaccgtgggctttgcccgggtgtctgccatgtgcagccacagcagcggggctgtgaaccaggaccacagcaagaaccctgtgggcgtggcctgcaccatggcccacgagatgggccacaacctgggcatggaccatgatgaaaatgtgcagggctgccgctgccaggagagatttgaagctggccgctgcatcatggccggcagcatcggcagcagcttccccaggatgttcagtgactgcagccaggcctacctggagagcttcctggagcggccccagagcgtgtgcctggccaatgccccagacctgagccacctggtgggcggccctgtgtgtggcaacctgtttgtggagcggggggagcagtgtgactgtggccccccagaggactgcaggaaccgctgctgcaacagcaccacctgccagctggccgagggcgcccagtgtgcccacggcacctgctgccaggagtgcaaggtgaagccagctggggagctgtgccggcccaagaaggacatgtgtgacctggaggagttctgtgatggccgccacccagaatgtccagaagatgccttccaggagaatggcaccccctgcagcggcggctactgctacaatggagcctgccccaccctggcccagcagtgccaggccttctggggccctgggggccaggccgctgaggagagctgcttctcctatgacatcctgcccggctgcaaggccagccgctacagagctgacatgtgtggggtgctgcagtgcaagggcggccagcagcccctgggccgggccatctgcatcgtggatgtgtgccacgccctgaccacagaagatggaacagcctatgagcctgtgcctgagggcacccgctgtggccctgagaaggtgtgctggaagggccgctgccaggacctgcacgtgtaccgcagcagcaactgcagcgcccagtgccacaaccacggcgtgtgcaaccacaagcaggagtgccactgccacgccggctgggccccaccccactgtgccaagctgctgacagaggtgcatgctgccagcggcagcctgcctgtgtttgtggtggtggtgctggtgctgctggccgtggtgctggtgaccctggccggcatcatcgtgtacaggaaggcccggagccgcatcctgagcagaaatgtggcccccaagaccaccatgggccgcagcaaccccctcttccaccaggccgccagccgggtgcctgccaagggcggggccccagcccccagccggggcccccaggagctggtgcccaccacccaccctggccagcctgcccggcacccagccagctctgtggccctgaagaggcctcctccagcccctcctgtgacagtgagcagcccccccttccctgtgcctgtgtacacccggcaggcccccaagcaggtgatcaagcccacctttgcccctcctgtgccccctgtgaagccaggggccggggccgccaaccctggccctgctgagggcgctgtgggccccaaggtggccctgaagccacccatccagaggaagcagggcgctggggcccccacagccccctag

SEQ ID NO: 41814 - DNA, 2475 bp, Artificial Sequence
  derived and/or modified sequence
atgcggggcctgggcctgtggctgctgggcgccatgatgctgcccgctatcgcccccagccggccttgggccttgatggaacagtacgaagtggtgttgccttggcgcctgcctggacctcgggtcaggagggccttaccaagccacttgggactgcacccagagcgagtaagctatgtgctgggagcaaccggacacaattttacgttgcacctccggaaaaatcgtgacctgcttggttctggctatacagaaacatatactgctgcaaacggcagtgaggtgactgaacagccaagaggccaggaccactgcttttatcagggccatgtcgaaggataccctgattctgccgctagtctctcgacttgcgcgggtctaaggggcttctttcaggtcggcagcgatcttcacttgattgagccgctcgatgagggcggagaaggcggccgtcatgctgtgtaccaggccgaacatctcctgcaaaccgcgggtacatgtggcgtgtccgacgacagccttggatccctgctgggaccacgcaccgccgctgtgttcagacccagaccaggggattctcttccgtcaagggagacaaggtacgtggagctttatgtcgtggttgacaatgccgagttccagatgttgggcagcgaggcggcagtgcgtcaccgcgttctggaggtggtcaatcacgtcgacaaattgtaccaaaagctgaatttccgggtcgtgctagttgggctcgagatttggaatagccaggatcgtttccacgtgtcacccgatccctccgttaccctggaaaacctgttgacctggcaagcacggcagcgcacccgcagacacctgcatgacaacgtgcaattaataacaggggtcgacttcacaggaactacagtcggattcgccagggtgagtgctatgtgctcacacagctctggcgccgtgaaccaggatcattcaaagaatccagtgggggtcgcttgtacaatggctcacgaaatgggccacaacctgggcatggaccatgacgagaatgtgcagggctgtcggtgccaggagcgttttgaagcgggcaggtgtattatggcagggtccataggcagctctttcccaagaatgttctcagattgcagccaagcttatctagaatcatttctggaacggccccagtctgtatgcttggcgaacgcccctgatctctcccacctggtggggggccccgtctgtggtaatctctttgtggaaagaggcgaacagtgcgactgtgggccacctgaggactgcaggaaccgttgttgcaatagcaccacctgccagctggccgagggggcccagtgtgcacacggtacgtgttgccaagaatgtaaagttaagcctgccggagaattgtgcaggcccaagaaggacatgtgtgacctagaagagttctgcgacggccggcaccccgaatgtcctgaggacgcctttcaggagaacggcaccccatgcagcggcggctactgctacaatggcgcatgccctaccttagcccagcagtgccaggccttttggggtcctggagggcaggccgccgaggaatcgtgtttttcttacgacatccttcccggttgcaaggcatcccgatacagggcagacatgtgcggtgtactacagtgtaaggggggccaacagccactcgggcgggccatctgtatcgtggacgtgtgccatgcactcacgactgaagatggaaccgcctacgagccggtacccgaagggactcgttgcggacccgaaaaggtttgttggaaaggcaggtgtcaggacttgcatgtatatcggtctagcaactgttctgcacaatgtcacaaccatggcgtctgcaatcataaacaggaatgtcactgccacgctgggtgggcgcctccacattgcgcaaaactgctcacggaggtgcacgccgcatcgggcagcctcccggtattcgtggtggtggtgctcgtgctgcttgcagtggtcttggtaacactcgcaggcataatcgtgtaccgtaaagcccgctcaagaatacttagccgcaacgtcgcgcccaaaaccacgatgggtcgtagtaacccgctctttcatcaggccgcctcccgcgtccccgccaaaggaggcgcacccgcaccctcaagaggaccccaagaactggtgcccacaacccaccccgggcagcctgcccgccatcccgcctcctcagttgcgcttaagcggcctccccccgccccaccagtgactgtgtcatccccaccattcccggttcccgtatatactaggcaggccccaaagcaagttatcaagccgacgttcgccccacctgtgccacccgtgaaaccaggcgcgggcgccgctaatccaggccctgcggaaggagccgttggcccaaaggtcgctctgaaaccccccattcagagaaaacagggcgccggcgcacctacagcgccttag

SEQ ID NO: 41815 - DNA, 2475 bp, Artificial Sequence
  derived and/or modified sequence
atgcgcggacttggcctgtggctgctaggggctatgatgctccccgcaatcgctccaagccgaccttgggccttgatggagcagtatgaagtagttctcccctggaggctgcccggtccacgagtgcggagggctctcccttctcatttggggctgcatccagaaagagtaagctatgttcttggggctacaggacacaactttacactgcacctgagaaagaacagggacctcctcggcagtggctacacagagacatatactgccgctaacgggtcagaagttactgagcagcctagaggtcaggaccactgcttctaccaaggccacgttgagggctaccccgacagcgcagcatcactgagtacctgtgcgggactcagaggattctttcaagttggaagcgacctacatctgattgagccactggacgaaggcggagagggtggcaggcacgccgtgtaccaggctgaacatctgctacagacagctggcacatgcggcgtcagcgatgattccctcggcagtctgcttggtcctcggaccgcggcagtgttccgccctagacccggtgacagcctgccctcacgcgagactcgatacgtcgagctatacgtcgtcgtcgataatgccgagttccagatgctcggcagtgaagccgctgtccggcatagagtcctagaagttgtgaaccacgtagacaagctgtaccagaaactgaacttccgcgtggtcctagtcggcttggaaatctggaactcacaagatcgcttccacgttagtcctgacccctccgtcacactagagaatctgttgacgtggcaggcccgtcagcggaccagaaggcatctgcatgacaacgtccagcttattaccggcgtggactttaccggcaccactgttgggttcgctcgggtctctgccatgtgctcccatagctcgggggcagtcaaccaggaccactctaagaatcccgtgggggtggcctgtactatggctcatgagatgggccataacctcggtatggaccatgacgaaaacgtgcaaggatgtcggtgtcaggaaaggtttgaggcaggaagatgtatcatggcagggtctatcggttctagcttccctagaatgttttcagattgttcacaggcttacttagagagctttctcgagaggccgcagagtgtttgtttggccaacgcaccagacctaagccatctcgttggcggacccgtgtgtggtaacctatttgtcgagcgcggagaacagtgcgactgtggaccacccgaggactgtcgcaaccgctgttgcaactccaccacatgccagctcgcagagggtgcccagtgcgctcacgggacatgttgccaggaatgtaaggtgaagcctgccggagaactctgcaggccgaaaaaagatatgtgtgatttggaagaattttgcgatggcagacacccggaatgcccggaggatgctttccaggagaatggcacaccctgctccgggggatactgttacaacggagcatgccccactctggctcagcaatgccaggccttttggggaccagggggtcaggctgctgaagaaagctgcttctcctacgatattctgcctggctgcaaagcgtcgaggtaccgagccgatatgtgcggcgtgctgcaatgcaaggggggtcagcagcctcttggtcgagccatttgtatcgttgacgtgtgtcacgccttgacaacggaagacgggaccgcgtacgagcctgtccccgaaggaacccgttgtggtccagagaaggtgtgctggaaaggtagatgtcaagacctgcatgtgtatcggtcctcgaattgtagcgctcaatgccataaccacggagtctgcaaccacaagcaggaatgccactgccacgcagggtgggctccaccacattgtgctaagctgctgacagaggtccacgccgcaagtgggagcctccctgtcttcgtagtagtagtacttgtcttactggctgtggtgcttgtgactctcgcgggtatcatcgtgtataggaaagccaggtctcgcatcctgtcccgcaacgttgctcccaagaccacgatgggtagatcaaaccctttgttccatcaggctgcatctcgagtcccagccaaggggggagcaccagctccatcgcggggacctcaggagctggtgccaactacccaccctggacagcctgccagacatcccgcttcaagcgttgccctgaagcgacccccaccggcacctcccgtgacagtgtcatctccaccctttcctgtgccagtgtacacacgacaggccccaaaacaggtgatcaaaccaaccttcgcaccacccgtgccccctgttaagcccggagccggagctgccaatcctgggcctgcagaaggggctgttggacccaaggtggctcttaagccacccatacaacggaagcagggtgccggagctccaaccgcaccttag

SEQ ID NO: 41816 - DNA, 2475 bp, Artificial Sequence
  derived and/or modified sequence
atgagaggcctgggcctgtggctgctgggcgccatgatgctgcccgccatcgcccccagcagaccctgggccctgatggagcagtacgaggtggtgctgccctggagactgcccggccccagagtgagaagagccctgcccagccacctgggcctgcaccccgagagagtgagctacgtgctgggcgccaccggccacaacttcaccctgcacctgagaaagaacagagacctgctgggcagcggctacaccgagacctacaccgccgccaacggcagcgaggtgaccgagcagcccagaggccaggaccactgcttctaccagggccacgtggagggctaccccgacagcgccgccagcctgagcacctgcgccggcctgagaggcttcttccaggtgggcagcgacctgcacctgatcgagcccctggacgagggcggcgagggcggcagacacgccgtgtaccaggccgagcacctgctgcagaccgccggcacctgcggcgtgagcgacgacagcctgggcagcctgctgggccccagaaccgccgccgtgttcagacccagacccggcgacagcctgcccagcagagagaccagatacgtggagctgtacgtggtggtggacaacgccgagttccagatgctgggcagcgaggccgccgtgagacacagagtgctggaggtggtgaaccacgtggacaagctgtaccagaagctgaacttcagagtggtgctggtgggcctggagatctggaacagccaggacagattccacgtgagccccgaccccagcgtgaccctggagaacctgctgacctggcaggccagacagagaaccagaagacacctgcacgacaacgtgcagctgatcaccggcgtggacttcaccggcaccaccgtgggcttcgccagagtgagcgccatgtgcagccacagcagcggcgccgtgaaccaggaccacagcaagaaccccgtgggcgtggcctgcaccatggcccacgagatgggccacaacctgggcatggaccacgacgagaacgtgcagggctgcagatgccaggagagattcgaggccggcagatgcatcatggccggcagcatcggcagcagcttccccagaatgttcagcgactgcagccaggcctacctggagagcttcctggagagaccccagagcgtgtgcctggccaacgcccccgacctgagccacctggtgggcggccccgtgtgcggcaacctgttcgtggagagaggcgagcagtgcgactgcggcccccccgaggactgcagaaacagatgctgcaacagcaccacctgccagctggccgagggcgcccagtgcgcccacggcacctgctgccaggagtgcaaggtgaagcccgccggcgagctgtgcagacccaagaaggacatgtgcgacctggaggagttctgcgacggcagacaccccgagtgccccgaggacgccttccaggagaacggcaccccctgcagcggcggctactgctacaacggcgcctgccccaccctggcccagcagtgccaggccttctggggccccggcggccaggccgccgaggagagctgcttcagctacgacatcctgcccggctgcaaggccagcagatacagagccgacatgtgcggcgtgctgcagtgcaagggcggccagcagcccctgggcagagccatctgcatcgtggacgtgtgccacgccctgaccaccgaggacggcaccgcctacgagcccgtgcccgagggcaccagatgcggccccgagaaggtgtgctggaagggcagatgccaggacctgcacgtgtacagaagcagcaactgcagcgcccagtgccacaaccacggcgtgtgcaaccacaagcaggagtgccactgccacgccggctgggcccccccccactgcgccaagctgctgaccgaggtgcacgccgccagcggcagcctgcccgtgttcgtggtggtggtgctggtgctgctggccgtggtgctggtgaccctggccggcatcatcgtgtacagaaaggccagaagcagaatcctgagcagaaacgtggcccccaagaccaccatgggcagaagcaaccccctgttccaccaggccgccagcagagtgcccgccaagggcggcgcccccgcccccagcagaggcccccaggagctggtgcccaccacccaccccggccagcccgccagacaccccgccagcagcgtggccctgaagagacccccccccgccccccccgtgaccgtgagcagcccccccttccccgtgcccgtgtacaccagacaggcccccaagcaggtgatcaagcccaccttcgccccccccgtgccccccgtgaagcccggcgccggcgccgccaaccccggccccgccgagggcgccgtgggccccaaggtggccctgaagccccccatccagagaaagcagggcgccggcgcccccaccgccccctag

SEQ ID NO: 41817 - DNA, 3279 bp, Artificial Sequence
  derived and/or modified sequence
agaccgtgtcccgcggggctgtcacctccgcctctgctccccgacccggccatgcgcggcctcgggctctggctgctgggcgcgatgatgctgcctgcgattgcccccagccggccctgggccctcatggagcagtatgaggtcgtgttgccgtggcgtctgccaggcccccgagtccgccgagctctgccctcccacttgggcctgcacccagagagggtgagctacgtccttggggccacagggcacaacttcaccctccacctgcggaagaacagggacctgctgggctccggctacacagagacctatacggctgccaatggctccgaggtgacggagcagcctcgcgggcaggaccactgcttctaccagggccacgtagaggggtacccggactcagccgccagcctcagcacctgtgccggcctcaggggtttcttccaggtggggtcagacctgcacctgatcgagcccctggatgaaggtggcgagggcggacggcacgccgtgtaccaggctgagcacctgctgcagacggccgggacctgcggggtcagcgacgacagcctgggcagcctcctgggaccccggacggcagccgtcttcaggcctcggcccggggactctctgccatcccgagagacccgctacgtggagctgtatgtggtcgtggacaatgcagagttccagatgctggggagcgaagcagccgtgcgtcatcgggtgctggaggtggtgaatcacgtggacaagctatatcagaaactcaacttccgtgtggtcctggtgggcctggagatttggaatagtcaggacaggttccacgtcagccccgaccccagtgtcacactggagaacctcctgacctggcaggcacggcaacggacacggcggcacctgcatgacaacgtacagctcatcacgggtgtcgacttcaccgggactaccgtggggtttgccagggtgtccgccatgtgctcccacagctcaggggctgtgaaccaggaccacagcaagaaccccgtgggcgtggcctgtaccatggcccatgagatgggccacaacctgggcatggaccatgatgagaacgtccagggctgccgctgccaggaacgcttcgaggccggccgctgcatcatggcgggcagcattggctccagtttccccaggatgttcagtgactgcagccaggcctacctggagagctttttggagcggccgcagtcggtgtgcctcgccaacgcccctgacctcagccacctggtgggcggccccgtgtgtgggaacctgtttgtggagcgtggggagcagtgcgactgcggcccccccgaggactgccggaaccgctgctgcaactctaccacctgccagctggctgagggggcccagtgtgcgcacggtacctgctgccaggagtgcaaggtgaagccggctggtgagctgtgccgtcccaagaaggacatgtgtgacctcgaggagttctgtgacggccggcaccctgagtgcccggaagacgccttccaggagaacggcacgccctgctccgggggctactgctacaacggggcctgtcccacactggcccagcagtgccaggccttctgggggccaggtgggcaggctgccgaggagtcctgcttctcctatgacatcctaccaggctgcaaggccagccggtacagggctgacatgtgtggcgttctgcagtgcaagggtgggcagcagcccctggggcgtgccatctgcatcgtggatgtgtgccacgcgctcaccacagaggatggcactgcgtatgaaccagtgcccgagggcacccggtgtggaccagagaaggtttgctggaaaggacgttgccaggacttacacgtttacagatccagcaactgctctgcccagtgccacaaccatggggtgtgcaaccacaagcaggagtgccactgccacgcgggctgggccccgccccactgcgcgaagctgctgactgaggtgcacgcagcgtccgggagcctccccgtcttcgtggtggtggttctggtgctcctggcagttgtgctggtcaccctggcaggcatcatcgtctaccgcaaagcccggagccgcatcctgagcaggaacgtggctcccaagaccacaatggggcgctccaaccccctgttccaccaggctgccagccgcgtgccggccaagggcggggctccagccccatccaggggcccccaagagctggtccccaccacccacccgggccagcccgcccgacacccggcctcctcggtggctctgaagaggccgccccctgctcctccggtcactgtgtccagcccacccttcccagttcctgtctacacccggcaggcaccaaagcaggtcatcaagccaacgttcgcacccccagtgcccccagtcaaacccggggctggtgcggccaaccctggtccagctgagggtgctgttggcccaaaggttgccctgaagccccccatccagaggaagcaaggagccggagctcccacagcaccctaggggggcacctgcgcctgtgtggaaatttggagaagttgcggcagagaagccatgcgttccagcattccacggtccagctagtgccgctcagccctagaccctgactttgcaggctcagctgctgttctaacctcaggaatgcatctacctgagaggctcctgctgtccacgccctcagccaattccttctccccgccttggccacgtgtagccccagctgtctgcaggcaccaggctgggatgagctgtgtgcttgcgggtgcgtgtgtgtgtacgtgtctccaggtggccgctggtctcccgctgtgttcaggaggccacatatacagcccctcccagccacacctgcccctgctctggggcctgctgagccggctgccctgggcacccggttccaggcagcacagacgtggggcatccccagaaagactccatcccaggaccaggttcccctgcgtgctcttcgagagggtgtcagtgagcagactgcaccccaagctcccgactccaggtcccctgatcttggggcctgtttcccatgggattcaagagggacagccccagctttgtgtgtgtttaagcttaggaatcgcctttatggaaagggctatgtgggagagtcagctatcttgtctggttttcttgagacctcagatgtgtgttcagcagggctgaaagcttttattctttaataatgagaaatgtatattttactaataaattattgaccgagttctgtagattcttgttaga

SEQ ID NO: 41818 - protein, 748 aa, Artificial Sequence
  derived and/or modified sequence
MVLLRVLILLLSWAAGMGGQYGNPLNKYIRHYEGLSYNVDSLHQKHQRAKRAVSHEDQFLRLDFHAHGRHFNLRMKRDTSLFSDEFKVETSNKVLDYDTSHIYTGHIYGEEGSFSHGSVIDGRFEGFIQTRGGTFYVEPAERYIKDRTLPFHSVIYHEDDINYPHKYGPQGGCADHSVFERMRKYQMTGVEEVTQIPQEEHAANGPELLRKKRTTSAEKNTCQLYIQTDHLFFKYYGTREAVIAQISSHVKAIDTIYQTTDFSGIRNISFMVKRIRINTTADEKDPTNPFRFPNIGVEKFLELNSEQNHDDYCLAYVFTDRDFDDGVLGLAWVGAPSGSSGGICEKSKLYSDGKKKSLNTGIITVQNYGSHVPPKVSHITFAHEVGHNFGSPHDSGTECTPGESKNLGQKENGNYIMYARATSGDKLNNNKFSLCSIRNISQVLEKKRNNCFVESGQPICGNGMVEQGEECDCGYSDQCKDECCFDANQPEGRKCKLKPGKQCSPSQGPCCTAQCAFKSKSEKCRDDSDCAREGICNGFTALCPASDPKPNFTDCNRHTQVCINGQCAGSICEKYGLEECTCASSDGKDDKELCHVCCMKKMDPSTCASTGSVQWSRHFSGRTITLQPGSPCNDFRGYCDVFMRCRLVDADGPLARLKKAIFSPELYENIAEWIVAHWWAVLLMGIALIMLMAGFIKICSVHTPSSNPKLPPPKPLPGTLKRRRPPQPIQQPQRQRPRESYQMGHMRR

SEQ ID NO: 41819 - protein, 447 aa, Artificial Sequence
  derived and/or modified sequence
MVLLRVLILLLSWAAGMGDRDFDDGVLGLAWVGAPSGSSGGICEKSKLYSDGKKKSLNTGIITVQNYGSHVPPKVSHITFAHEVGHNFGSPHDSGTECTPGESKNLGQKENGNYIMYARATSGDKLNNNKFSLCSIRNISQVLEKKRNNCFVESGQPICGNGMVEQGEECDCGYSDQCKDECCFDANQPEGRKCKLKPGKQCSPSQGPCCTAQCAFKSKSEKCRDDSDCAREGICNGFTALCPASDPKPNFTDCNRHTQVCINGQCAGSICEKYGLEECTCASSDGKDDKELCHVCCMKKMDPSTCASTGSVQWSRHFSGRTITLQPGSPCNDFRGYCDVFMRCRLVDADGPLARLKKAIFSPELYENIAEWIVAHWWAVLLMGIALIMLMAGFIKICSVHTPSSNPKLPPPKPLPGTLKRRRPPQPIQQPQRQRPRESYQMGHMRR

SEQ ID NO: 41820 - DNA, 2247 bp, Artificial Sequence
  derived and/or modified sequence
atggtgttgctgagagtgttaatcctgttgctcagctgggctgcggggatgggcggtcagtacgggaaccccctgaataaatatatccgacactacgaaggtctgtcctataacgtggacagtctgcatcaaaaacaccagcgggcaaagcgcgctgtgtctcacgaagaccagttccttagactagacttccacgctcatggtcgacactttaacctccgcatgaagcgagacactagcctttttagcgacgagtttaaagtggagacctccaataaagttcttgattacgatacttcacacatttatacaggccacatctacggagaggaggggtctttctcgcacggtagcgttatcgacgggcgcttcgagggctttatacagacaagaggtggcaccttttacgtggagcccgcagaacgttacatcaaagatcggacacttcccttccactccgttatctaccatgaggatgatatcaactatccccacaagtatggcccacagggggggtgcgctgatcacagtgtgttcgagaggatgcgcaagtatcagatgactggtgtagaagaagtgactcagattccgcaagaagaacatgccgccaacggacccgagttattgaggaagaaaagaacaacatctgccgaaaagaacacctgtcaactgtacatacagaccgatcatttattcttcaaatactatgggacacgcgaagctgttatcgcacaaatcagttctcatgtgaaagcaatcgacacaatctaccagactactgacttttcaggaattaggaacatctcttttatggttaaacgcattagaatcaatacaactgcagacgaaaaagaccccacaaatcccttccggttccccaacattggggtggagaaattcctggaacttaactcagagcaaaaccacgacgactattgcctcgcgtacgtgtttaccgatcgcgacttcgacgacggcgtgcttggtctggcctgggtaggggccccctctggcagctcagggggaatatgtgagaaatccaaactctactccgatggcaaaaagaaatccctaaacaccggcattattacagtccaaaactacgggagccatgttccccctaaggtcagccacataacattcgcccatgaggtcggccataactttggatctccgcatgatagcgggaccgagtgcacccccggagagtcaaagaatctgggccagaaagagaatggcaactatatcatgtacgctagggctacctcaggagacaaactcaacaacaacaaattctccctctgttctatacgtaacatcagccaggtactggagaaaaagagaaacaattgtttcgtagagagcggtcagcccatctgcgggaacggcatggtagagcagggcgaggagtgtgattgtggatacagtgatcagtgcaaggacgagtgttgctttgacgcaaaccagcccgagggccgaaagtgtaaactgaaacccggtaaacagtgtagtccgtcgcaggggccctgttgcacagcgcagtgtgccttcaagtcgaaatctgagaaatgccgggatgactctgactgtgcaagagagggcatatgtaatggctttactgccctgtgtcccgccagcgatccgaagcctaacttcacagactgtaaccgtcacactcaggtgtgtatcaacgggcagtgcgccggctccatctgcgagaaatacggactagaggagtgcacttgcgctagcagtgatggaaaagacgataaggaactgtgtcacgtctgttgcatgaagaagatggacccatcaacctgcgcgagtacaggttcggttcagtggagtaggcatttcagcggcaggaccattacgttacaaccaggatctccgtgcaacgacttccgtggctactgtgacgtcttcatgcgttgtcgcttggtcgatgcagacggccccctcgcacgcctcaagaaagccattttttcaccggagctatacgagaatatcgctgagtggatcgtggcccattggtgggcagtgctcctgatgggaattgcactgatcatgctgatggccgggttcatcaagatttgttccgttcacaccccatctagcaacccgaagctgcctcctcccaagcctctgcccggcacgctgaagagaaggaggcccccacagccaatccaacagcctcagaggcagcgcccaagagagtcttatcagatgggccacatgagacggtag

SEQ ID NO: 41821 - DNA, 2247 bp, Artificial Sequence
  derived and/or modified sequence
atggtgctgctgcgggtgctgatcctgctgctgtcctgggccgccggcatgggcggccagtatggcaaccccctgaacaagtacatccgccactatgagggcctgagctacaacgtggacagcctgcaccagaagcaccagagggccaagagagctgtgtcccatgaggaccagttcctgcggctggacttccacgcccacggccgccacttcaacctgaggatgaagagggacaccagcctcttcagtgatgagttcaaggtggagaccagcaacaaggtgctggactatgacaccagccacatctacacaggccacatctacggggaggagggcagcttcagccacggctctgtgattgatggccgctttgagggcttcatccagacccggggcggcaccttctacgtggagcctgctgagcgctacatcaaggacaggaccctgcccttccacagcgtcatctaccatgaagatgacatcaactacccccacaagtatggcccccagggcggctgtgccgaccacagcgtgtttgagaggatgaggaagtaccagatgactggagtggaggaggtgacccagatcccccaggaggagcacgccgccaacggccctgagctgctgaggaagaagaggaccaccagcgctgagaagaacacctgccagctgtacatccagacagaccacctgttcttcaagtactacggcacccgggaggccgtgattgcccagatcagcagccacgtgaaggccatcgacaccatctaccagaccacagacttcagcggcatccggaacatctccttcatggtgaagaggatccgcatcaacaccacagcagatgagaaggaccccaccaaccccttccgcttccccaacattggagtggagaagttcctggagctgaacagcgagcagaaccatgatgactactgcctggcctacgtgttcacagaccgggactttgatgatggagtgctgggcctggcctgggtgggcgcccccagcggcagcagcggcggcatctgtgagaagagcaagctgtacagtgatggcaagaagaagagcctgaacacaggcatcatcaccgtgcagaactacggcagccacgtgccccccaaggtgagccacatcacctttgcccacgaggtgggccacaactttggcagcccccatgattctggaacagagtgcaccccaggagagagcaagaacctgggccagaaggaaaatggaaactacatcatgtatgcccgggccaccagcggggacaagctgaacaacaacaagttcagcctgtgcagcatccggaacatcagccaggtgctggagaagaagaggaacaactgctttgtggagagcggccagcccatctgtggaaatggcatggtggagcagggcgaggagtgtgactgtggctacagcgaccagtgcaaggatgagtgctgctttgatgccaaccagcctgagggcaggaagtgcaagctgaagccaggcaagcagtgcagccccagccagggcccctgctgcacagcccagtgtgccttcaagagcaagtctgagaagtgcagagatgacagcgactgtgcccgggagggcatctgcaatggcttcaccgccctgtgcccagccagtgaccccaagcccaacttcacagactgcaacagacacacccaggtgtgcatcaatggccagtgtgccggcagcatctgtgagaagtatggcctggaggagtgcacctgtgccagcagtgatggcaaggatgacaaggagctgtgccacgtgtgctgcatgaagaagatggaccccagcacctgtgccagcacaggctctgtgcagtggagccgccacttcagcggccgcaccatcaccctgcagcccggcagcccctgcaatgacttccggggctactgtgatgtgttcatgcgctgccgcctggtggatgctgatggccccctggcccggctgaagaaggccatcttcagccctgagctgtatgagaacattgctgagtggatcgtggcccactggtgggccgtgctgctgatgggcatcgccctgatcatgctgatggccggcttcatcaagatctgcagcgtgcacacccccagcagcaaccccaagctgcccccacccaagcccctgcccggcaccctgaagagaagaagaccaccccagcccatccagcagccccagaggcagaggccccgggagagctaccagatgggccacatgagaagatag

SEQ ID NO: 41822 - DNA, 2247 bp, Artificial Sequence
  derived and/or modified sequence
atggtgctgctgcgggtgctgatcctgctgctgagctgggccgccgggatgggcggccagtacgggaatccccttaataaatatatccggcattacgaaggcctatcctacaatgtggattctttgcaccagaagcaccagcgcgcgaagcgcgcggtctcacacgaggatcagtttctgagacttgactttcacgcccacggtcgccactttaatctgcgcatgaagcgcgacacctcacttttctccgacgaatttaaggtggagacaagcaataaagttcttgactatgacacctctcatatctacaccgggcatatctatggggaggagggatctttttcccatgggtctgtgattgatggaagatttgaggggttcattcaaactagaggaggcactttctatgtagaacctgctgagcgatatattaaggacagaacactgccattccacagcgtgatctaccacgaggacgatatcaactaccctcacaaatacggcccacagggagggtgcgcggatcattcagtattcgaaaggatgcgcaagtaccaaatgacgggagtcgaagaggtcactcagatccctcaggaagagcacgctgctaacggccccgagctcctgcgaaagaagagaactacctctgcggagaaaaacacctgccagctctacatacagactgaccacctatttttcaagtactacggtacccgggaggccgtgattgcacagatcagctcacacgtgaaagcaattgatacgatctaccaaacgaccgacttctccggcatcagaaatattagtttcatggttaaacggatccgaattaacactacagctgatgagaaggaccctacgaatcccttccgatttccaaatattggcgtggagaagttcttggaactgaattccgagcagaatcatgacgattactgtctagcttacgtgttcaccgacagagacttcgatgacggggtccttgggctggcgtgggtcggggccccaagcggttcttcgggagggatctgtgaaaaatccaaactgtattccgatggaaagaaaaaaagtctgaatacagggatcatcaccgtgcaaaattatgggagccatgtgcctcccaaggtcagtcacatcacctttgcacacgaggtgggtcacaattttggaagcccccacgacagcggcaccgaatgtactcccggcgagagcaaaaacttaggtcaaaaagagaacgggaattacattatgtacgctcgagctacatcaggggataaactgaacaacaataagtttagcctgtgctccatcaggaatattagccaggttctggaaaaaaagagaaacaattgtttcgttgaaagcggacagcccatatgtgggaatggtatggttgagcagggggaagaatgcgactgcggttattcggatcagtgtaaagatgaatgttgtttcgacgctaaccaacccgaggggcgtaagtgtaaacttaagcccgggaagcagtgttcaccgtcccaggggccctgctgcactgcacaatgtgcattcaagagtaaaagcgagaagtgtcgggatgactctgactgcgcaagggaggggatttgcaacggattcacagctctctgtcccgccagtgatccaaaaccaaacttcacggattgtaataggcatacgcaagtttgcatcaacgggcagtgtgccggaagcatctgcgagaagtatggactagaagagtgcacttgtgcttcatcggacgggaaggacgataaagagttgtgccatgtgtgctgtatgaaaaagatggaccccagcacatgtgcttccaccggttccgtccagtggagcagacacttttccgggcgaaccatcactctgcaacccggctcgccctgcaatgatttcaggggctactgcgacgtatttatgcgctgccggctcgtggatgccgatggcccactagcaagactcaagaaggctattttttcccctgagctgtacgagaatattgctgaatggattgtcgcacattggtgggccgttctattgatgggcatcgccctaatcatgctgatggctggatttattaagatatgttcagtccatacaccttcttcaaatcccaaactgcctccacctaaacccctgcctgggacacttaagcgccgccgtcctcctcagcccattcagcaaccccagcggcagagaccacgggagagctatcaaatgggacacatgagacggtag

SEQ ID NO: 41823 - DNA, 2247 bp, Artificial Sequence
  derived and/or modified sequence
atggtgctcctccgcgtcctcatcctgctcctgtcctgggctgcaggaatgggagggcagtatggaaatcctctgaacaaatatattaggcactatgaaggtctgtcgtataatgtggatagcctccaccagaaacaccagcgcgcaaaaagagctgtgtctcacgaagaccaatttttgcgactggattttcacgcgcatggacgtcattttaatctcagaatgaaaagggacacttccttatttagcgatgaatttaaagtggaaacgtctaataaggtgctggactatgatacatctcacatctacaccggtcatatctatggagaggaggggagtttctcacacggctcagtgatcgacggcagattcgagggttttattcaaactagaggcggaaccttctatgtggaacctgccgagcgatacataaaggaccggaccctgccgttccatagtgtgatctatcatgaggacgatataaattacccccataaatatggtccccaggggggttgcgcagaccactccgtattcgaaaggatgcgcaagtatcagatgacgggagtagaagaagttacccaaattccacaggaagaacacgccgcaaatggcccagagctcttaaggaagaaaaggactaccagcgccgaaaaaaatacctgtcagttgtatatacaaacagaccacttattcttcaagtactatggcacccgggaggccgttatagcccagatctccagccacgtgaaggcaattgacaccatctaccagaccacggatttctccgggatcagaaacatttccttcatggtaaagcggatccgcattaatacaaccgccgatgaaaaagatcccacaaatccattccggttcccaaacattggggtggaaaagttcttagaactaaatagcgagcagaatcacgacgattactgtctcgcctacgtattcaccgaccgcgatttcgatgacggagttctgggcctcgcttgggtcggagccccatctggcagcagcggcggaatttgcgagaagtctaagctgtatagcgatggcaaaaaaaaaagtctgaatactgggattattactgtgcagaactatggctcccacgttccgcctaaggtaagccacatcactttcgcacacgaggtaggacataactttgggagcccccacgatagcgggaccgaatgtaccccgggtgagtctaagaacctgggccagaaagaaaatggtaactatatcatgtatgctagagcaacctccggtgacaagctgaataacaacaagttctctctatgtagcatacgcaatatctcccaggtcctagaaaaaaagcggaacaactgtttcgtcgagagtggacagccaatttgtggaaatgggatggtggagcagggggaagaatgcgactgtggttactctgatcagtgtaaggacgaatgctgcttcgacgccaaccagcccgaaggtagaaagtgtaagctgaagcctggaaaacagtgcagcccctcacagggcccatgttgcacagcgcagtgtgcttttaagtccaagagcgagaagtgccgagacgacagtgattgcgcccgtgaaggaatctgtaacggctttaccgccctttgccccgcaagcgaccccaaacctaactttaccgactgtaatcgacatacacaagtatgcattaacggccagtgtgcaggctctatctgcgagaagtacggcctcgaggaatgcacctgcgcctcctccgacggcaaggacgataaggagttgtgccatgtctgttgcatgaagaaaatggacccaagcacttgcgccagtactggtagtgtgcaatggagtcggcatttctcaggcagaaccataacactgcagccgggatcaccctgtaacgattttagagggtactgtgatgtcttcatgcggtgcaggctggtggacgccgatggccctctggcaaggctgaaaaaggctatcttttccccagaattgtacgaaaacattgccgaatggatagtcgcccattggtgggctgtcctccttatgggcatagccctgattatgctgatggccggttttatcaagatttgttcagtccataccccctcctcgaatcccaagctgccaccccctaaaccacttcctgggactctgaagagacggagaccgcctcagcccattcagcagccacagcggcaaagaccaagagaatcctatcaaatggggcacatgaggcggtag

SEQ ID NO: 41824 - DNA, 2247 bp, Artificial Sequence
  derived and/or modified sequence
atggtgctgctgagagtgctgatcctgctgctgagctgggccgccggcatgggcggccagtacggcaaccccctgaacaagtacatcagacactacgagggcctgagctacaacgtggacagcctgcaccagaagcaccagagagccaagagagccgtgagccacgaggaccagttcctgagactggacttccacgcccacggcagacacttcaacctgagaatgaagagagacaccagcctgttcagcgacgagttcaaggtggagaccagcaacaaggtgctggactacgacaccagccacatctacaccggccacatctacggcgaggagggcagcttcagccacggcagcgtgatcgacggcagattcgagggcttcatccagaccagaggcggcaccttctacgtggagcccgccgagagatacatcaaggacagaaccctgcccttccacagcgtgatctaccacgaggacgacatcaactacccccacaagtacggcccccagggcggctgcgccgaccacagcgtgttcgagagaatgagaaagtaccagatgaccggcgtggaggaggtgacccagatcccccaggaggagcacgccgccaacggccccgagctgctgagaaagaagagaaccaccagcgccgagaagaacacctgccagctgtacatccagaccgaccacctgttcttcaagtactacggcaccagagaggccgtgatcgcccagatcagcagccacgtgaaggccatcgacaccatctaccagaccaccgacttcagcggcatcagaaacatcagcttcatggtgaagagaatcagaatcaacaccaccgccgacgagaaggaccccaccaaccccttcagattccccaacatcggcgtggagaagttcctggagctgaacagcgagcagaaccacgacgactactgcctggcctacgtgttcaccgacagagacttcgacgacggcgtgctgggcctggcctgggtgggcgcccccagcggcagcagcggcggcatctgcgagaagagcaagctgtacagcgacggcaagaagaagagcctgaacaccggcatcatcaccgtgcagaactacggcagccacgtgccccccaaggtgagccacatcaccttcgcccacgaggtgggccacaacttcggcagcccccacgacagcggcaccgagtgcacccccggcgagagcaagaacctgggccagaaggagaacggcaactacatcatgtacgccagagccaccagcggcgacaagctgaacaacaacaagttcagcctgtgcagcatcagaaacatcagccaggtgctggagaagaagagaaacaactgcttcgtggagagcggccagcccatctgcggcaacggcatggtggagcagggcgaggagtgcgactgcggctacagcgaccagtgcaaggacgagtgctgcttcgacgccaaccagcccgagggcagaaagtgcaagctgaagcccggcaagcagtgcagccccagccagggcccctgctgcaccgcccagtgcgccttcaagagcaagagcgagaagtgcagagacgacagcgactgcgccagagagggcatctgcaacggcttcaccgccctgtgccccgccagcgaccccaagcccaacttcaccgactgcaacagacacacccaggtgtgcatcaacggccagtgcgccggcagcatctgcgagaagtacggcctggaggagtgcacctgcgccagcagcgacggcaaggacgacaaggagctgtgccacgtgtgctgcatgaagaagatggaccccagcacctgcgccagcaccggcagcgtgcagtggagcagacacttcagcggcagaaccatcaccctgcagcccggcagcccctgcaacgacttcagaggctactgcgacgtgttcatgagatgcagactggtggacgccgacggccccctggccagactgaagaaggccatcttcagccccgagctgtacgagaacatcgccgagtggatcgtggcccactggtgggccgtgctgctgatgggcatcgccctgatcatgctgatggccggcttcatcaagatctgcagcgtgcacacccccagcagcaaccccaagctgcccccccccaagcccctgcccggcaccctgaagagaagaagacccccccagcccatccagcagccccagagacagagacccagagagagctaccagatgggccacatgagaagatag

SEQ ID NO: 41825 - DNA, 5034 bp, Artificial Sequence
  derived and/or modified sequence
gcggcggcaggcctagcagcacgggaaccgtcccccgcgcgcatgcgcgcgcccctgaagcgcctgggggacgggtaggggcgggaggtaggggcgcggctccgcgtgccagttgggtgcccgcgcgtcacgtggtgaggaaggaggcggaggtctgagtttcgaaggagggggggagagaagagggaacgagcaagggaaggaaagcggggaaaggaggaaggaaacgaacgagggggagggaggtccctgttttggaggagctaggagcgttgccggcccctgaagtggagcgagagggaggtgcttcgccgtttctcctgccaggggaggtcccggcttcccgtggaggctccggaccaagccccttcagcttctccctccggatcgatgtgctgctgttaacccgtgaggaggcggcggcggcggcagcggcagcggaagatggtgttgctgagagtgttaattctgctcctctcctgggcggcggggatgggaggtcagtatgggaatcctttaaataaatatatcagacattatgaaggattatcttacaatgtggattcattacaccaaaaacaccagcgtgccaaaagagcagtctcacatgaagaccaatttttacgtctagatttccatgcccatggaagacatttcaacctacgaatgaagagggacacttcccttttcagtgatgaatttaaagtagaaacatcaaataaagtacttgattatgatacctctcatatttacactggacatatttatggtgaagaaggaagttttagccatgggtctgttattgatggaagatttgaaggattcatccagactcgtggtggcacattttatgttgagccagcagagagatatattaaagaccgaactctgccatttcactctgtcatttatcatgaagatgatattaactatccccataaatacggtcctcaggggggctgtgcagatcattcagtatttgaaagaatgaggaaataccagatgactggtgtagaggaagtaacacagatacctcaagaagaacatgctgctaatggtccagaacttctgaggaaaaaacgtacaacttcagctgaaaaaaatacttgtcagctttatattcagactgatcatttgttctttaaatattacggaacacgagaagctgtgattgcccagatatccagtcatgttaaagcgattgatacaatttaccagaccacagacttctccggaatccgtaacatcagtttcatggtgaaacgcataagaatcaatacaactgctgatgagaaggaccctacaaatcctttccgtttcccaaatattggtgtggagaagtttctggaattgaattctgagcagaatcatgatgactactgtttggcctatgtcttcacagaccgagattttgatgatggcgtacttggtctggcttgggttggagcaccttcaggaagctctggaggaatatgtgaaaaaagtaaactctattcagatggtaagaagaagtccttaaacactggaattattactgttcagaactatgggtctcatgtacctcccaaagtctctcacattacttttgctcacgaagttggacataactttggatccccacatgattctggaacagagtgcacaccaggagaatctaagaatttgggtcaaaaagaaaatggcaattacatcatgtatgcaagagcaacatctggggacaaacttaacaacaataaattctcactctgtagtattagaaatataagccaagttcttgagaagaagagaaacaactgttttgttgaatctggccaacctatttgtggaaatggaatggtagaacaaggtgaagaatgtgattgtggctatagtgaccagtgtaaagatgaatgctgcttcgatgcaaatcaaccagagggaagaaaatgcaaactgaaacctgggaaacagtgcagtccaagtcaaggtccttgttgtacagcacagtgtgcattcaagtcaaagtctgagaagtgtcgggatgattcagactgtgcaagggaaggaatatgtaatggcttcacagctctctgcccagcatctgaccctaaaccaaacttcacagactgtaataggcatacacaagtgtgcattaatgggcaatgtgcaggttctatctgtgagaaatatggcttagaggagtgtacgtgtgccagttctgatggcaaagatgataaagaattatgccatgtatgctgtatgaagaaaatggacccatcaacttgtgccagtacagggtctgtgcagtggagtaggcacttcagtggtcgaaccatcaccctgcaacctggatccccttgcaacgattttagaggttactgtgatgttttcatgcggtgcagattagtagatgctgatggtcctctagctaggcttaaaaaagcaatttttagtccagagctctatgaaaacattgctgaatggattgtggctcattggtgggcagtattacttatgggaattgctctgatcatgctaatggctggatttattaagatatgcagtgttcatactccaagtagtaatccaaagttgcctcctcctaaaccacttccaggcactttaaagaggaggagacctccacagcccattcagcaaccccagcgtcagcggccccgagagagttatcaaatgggacacatgagacgctaactgcagcttttgccttggttcttcctagtgcctacaatgggaaaacttcactccaaagagaaacctattaagtcatcatctccaaactaaaccctcacaagtaacagttgaagaaaaaatggcaagagatcatatcctcagaccaggtggaattacttaaattttaaagcctgaaaattccaatttgggggtgggaggtggaaaaggaacccaattttcttatgaacagatatttttaacttaatggcacaaagtcttagaatattattatgtgccccgtgttccctgttcttcgttgctgcattttcttcacttgcaggcaaacttggctctcaataaacttttaccacaaattgaaataaatatatttttttcaactgccaatcaaggctaggaggctcgaccacctcaacattggagacatcacttgccaatgtacataccttgttatatgcagacatgtatttcttacgtacactgtacttctgtgtgcaattgtaaacagaaattgcaatatggatgtttctttgtattataaaatttttccgctcttaattaaaaattactgtttaattgacatactcaggataacagagaatggtggtattcagtggtccaggattctgtaatgctttacacaggcagttttgaaatgaaaatcaatttacctttctgttacgatggagttggttttgatactcattttttctttatcacatggctgctacgggcacaagtgactatactgaagaacacagttaagtgttgtgcaaactggacatagcagcacatactacttcagagttcatgatgtagatgtctggtttctgcttacgtcttttaaactttctaattcaattccatttttcaattaataggtgaaattttattcatgctttgatagaaattatgtcaatgaaatgattctttttatttgtagcctacttatttgtgtttttcatatatctgaaatatgctaattatgttttctgtctgatatggaaaagaaaagctgtgtctttatcaaaatatttaaacggttttttcagcatatcatcactgatcattggtaaccactaaagatgagtaatttgcttaagtagtagttaaaattgtagataggccttctgacattttttttcctaaaatttttaacagcattgaaggtgaaacagcacaatgtcccattccaaatttatttttgaaacagatgtaaataattggcattttaaagagaaagcaaaaacatttaatgtattaacaggcttattgctatgcaggaaatagaaggggcattacaaaaattgaagcttgtgacatatttattgcttctgttttccaactacatcacttcaactagaagtaaagctatgattttcctgacttcacataggaggcaaatttagagaaagttgtaaagatttctatgttttgggtttttttttttcctttttttttttaagagtataaggtttacacaatcattctcataatgtgacgcaagccagcaaggccaaaaatgctagagaaaataacgggatctcttccttgtaaacttgtacagtatgtggtgactttttcaaaatacagctttttgtacatgatttagagacaaattttgtacatgaaaccccagatagactataaataattctaaacaaacaagtaggtagatatgtatgtaattgcttttaaatcatttaaatgcctttgtttttggactgtgcaaaggttggaagtgggtttgcatttctaaaatggtgacttttattctgcaagagttcttagtaacttcttgagtgtggtagactttggaacatgtaaattttttgcttgtaatgttatcctgtggtaggattttggcaggtacacacactgccctattttattttgagtctaagttaaatgttttctgaaaagagatacatgcactgaactctttccactgcgaatcaagatgtggtaatataaaaggatcaagacaaatgagatctaatactactgtcagttttaatgtccactgtgttttatacagtatctttttttgttcactttggaaatttttactaaaaattgcaaaaaataaagtattgtgcaaagatgtaaggttttttgaaacttgaaatgcattaataaatagacgattaaatcaacttgaaggttctatactctttgaactctgagaactatcacaagaagcttcccacaaggcagtgttttcttacagttgtctcttcctacaaaagtatagattatctttattcttaatactttggaatccatgtagaaaatttccagttagatactctgcgtacacacaataaacctttttaaaacacccaa

SEQ ID NO: 41826 - protein, 1226 aa, Artificial Sequence
  derived and/or modified sequence
MNPRQGYSLSGYYTHPFQGYEHRQLRYQQPGPGSSPSSFLLKQIEFLKGQLPEAPVIGKQTPSLPPSLPGLRPRFPVLLASSTRGRQVDIRGVPRGVHLRSQGLQRGFQHPSPRGRSLPQRGVDCLSSHFQELSIYQDQEQRILKFLEELGEGKATTAHDLSGKLGTPKKEINRVLYSLAKKGKLQKEAGTPPLWKIAVSTQAWNQHSGVVRPDGHSQGAPNSDPSLEPEDRNSTSVSEDLLEPFIAVSAQAWNQHSGVVRPDSHSQGSPNSDPGLEPEDSNSTSALEDPLEFLDMAEIKEKICDYLFNVSDSSALNLAKNIGLTKARDINAVLIDMERQGDVYRQGTTPPIWHLTDKKRERMQIKRNTNSVPETAPAAIPETKRNAEFLTCNIPTSNASNNMVTTEKVENGQEPVIKLENRQEARPEPARLKPPVHYNGPSKAGYVDFENGQWATDDIPDDLNSIRAAPGEFRAIMEMPSFYSHGLPRCSPYKKLTECQLKNPISGLLEYAQFASQTCEFNMIEQSGPPHEPRFKFQVVINGREFPPAEAGSKKVAKQDAAMKAMTILLEEAKAKDSGKSEESSHYSTEKESEKTAESQTPTPSATSFFSGKSPVTTLLECMHKLGNSCEFRLLSKEGPAHEPKFQYCVAVGAQTFPSVSAPSKKVAKQMAAEEAMKALHGEATNSMASDNQPEGMISESLDNLESMMPNKVRKIGELVRYLNTNPVGGLLEYARSHGFAAEFKLVDQSGPPHEPKFVYQAKVGGRWFPAVCAHSKKQGKQEAADAALRVLIGENEKAERMGFTEVTPVTGASLRRTMLLLSRSPEAQPKTLPLTGSTFHDQIAMLSHRCFNTLTNSFQPSLLGRKILAAIIMKKDSEDMGVVVSLGTGNRCVKGDSLSLKGETVNDCHAEIISRRGFIRFLYSELMKYNSQTAKDSIFEPAKGGEKLQIKKTVSFHLYISTAPCGDGALFDKSCSDRAMESTESRHYPVFENPKQGKLRTKVENGEGTIPVESSDIVPTWDGIRLGERLRTMSCSDKILRWNVLGLQGALLTHFLQPIYLKSVTLGYLFSQGHLTRAICCRVTRDGSAFEDGLRHPFIVNHPKVGRVSIYDSKRQSGKTKETSVNWCLADGYDLEILDGTRGTVDGPRNELSRVSKKNIFLLFKKLCSFRYRRDLLRLSYGEAKKAARDYETAKNYFKKGLKDMGYGNWISKPQEEKNFYLCPV

SEQ ID NO: 41827 - DNA, 3681 bp, Artificial Sequence
  derived and/or modified sequence
atgaatccccgtcagggctattccctgtcaggatactatacacaccctttccagggatacgagcacaggcagctgcggtaccaacaacctggtcccggcagctctcccagcagtttcttactcaagcagattgagtttttaaaggggcagctgcccgaagcgcccgtgattggcaaacagacacccagtttacccccctccttgccaggtctgagaccccgctttccagtactactggccagctcaacacgggggcggcaggtcgacatcagaggggtgcctagaggcgtccatctcaggtcacagggcctgcagagaggcttccagcatccatcccctaggggtcgctcacttccacagcgaggggtagattgcttgtcttcccattttcaagagctcagtatctatcaggatcaggaacagcggatacttaagttcctcgaagagctgggagaagggaaggctactacagctcatgacctctctggcaagctcgggaccccgaagaaagagataaacagggtcctgtactcgctcgctaaaaaaggcaaactccaaaaagaagccgggacaccacccctctggaaaatcgctgtgtcaacccaggcatggaatcagcactctggagttgtaaggcctgacggacatagccagggcgcacccaatagcgacccttccctagaaccagaagacagaaattccactagcgtatccgaagatctcctcgagccgttcattgcagtgagcgctcaggcctggaatcaacacagtggggtcgtgcggccggactcccatagccaggggtcccctaacagtgatcctggccttgagccggaggactctaattccacaagcgcactggaagatcccttggagtttctcgatatggctgagatcaaggagaaaatttgtgactacctgttcaacgtcagcgattcgtccgctctgaacctggccaaaaacattgggctcacaaaggcccgggacatcaatgccgtgttgattgatatggagaggcagggggatgtgtacagacaggggaccacacctccaatatggcatcttactgacaaaaagagggagcgtatgcagatcaagagaaatacaaacagcgttccagaaacggctcccgctgcaataccagagaccaagcggaatgctgagtttctgacttgcaatatccctacttccaacgccagcaacaatatggtgaccacagagaaagtagagaacgggcaggagcccgtcatcaagctagagaatagacaggaagctcgaccagaaccagccagactcaagcctcccgtgcactataatgggccatctaaggccggctatgtcgattttgaaaacgggcagtgggccaccgacgatattcccgacgatctgaattccataagagccgcgcccggggagttcagagccatcatggaaatgccaagcttctacagccatggtctcccaagatgttcaccatacaaaaaattgaccgagtgccaactcaaaaatccaataagtggtctgctagaatatgctcagtttgcatctcagacctgcgagtttaacatgattgagcagagcgggcccccccacgagccaaggtttaagtttcaggtggtcatcaacggaagggagtttccccctgctgaagccggttctaagaaggtggcaaaacaggacgctgctatgaaagctatgacaatacttcttgaggaggcgaaggcaaaggactctggcaagtccgaagagtcaagtcactatagcacagagaaggaaagcgaaaaaactgccgaatcccagactcctacgcccagtgccacctctttcttctcagggaaaagccccgtaactactctcctggaatgcatgcacaagctggggaacagctgtgagtttaggcttctctccaaggagggaccggctcacgaaccaaaattccaatactgcgtcgccgttggcgcccagacctttccgtccgtgtcagccccttctaagaaggtggccaaacagatggcggctgaagaggcaatgaaagccttacatggcgaggcgactaattctatggcttccgacaatcagccggagggaatgatcagcgaatctctggacaatttggaatcaatgatgcccaacaaggtgaggaaaatcggcgaacttgtgcgttatctgaacacaaatccggtggggggactcctcgaatacgcaaggagccacgggttcgcagccgaattcaaactggtggatcaatccgggccaccccatgagcccaagttcgtctaccaggctaaggttggtggcagatggttccccgcagtgtgcgcacactccaagaaacaggggaaacaggaggcagccgacgcggccctccgcgtgcttattggagaaaatgagaaagccgaaagaatgggctttaccgaagttaccccggtcactggagcctcactgagacgcaccatgctcctgctctccaggagtcccgaggcccagcctaaaactctccctctgacagggtccacattccatgatcaaattgcaatgctgtcccataggtgcttcaacaccctgacaaatagcttccagccttctttgctagggagaaagatccttgcagctataatcatgaaaaaggactcggaagacatgggagtggtggtgagcctgggaacaggcaaccgatgtgtcaaaggtgactctctgagccttaagggcgaaaccgtcaacgattgtcacgccgagataatttcccgccgcggctttatccgtttcctgtactccgaactgatgaagtacaatagccagacagctaaggatagtatcttcgagccagctaagggtggcgaaaaactgcagataaagaaaacagtctctttccatctgtatatctccactgccccatgcggggacggcgccctgtttgataaaagctgttccgacagagcgatggagagcacagaaagtaggcactaccctgttttcgagaatcctaagcaaggcaagttgcggaccaaggtagagaatggggagggaaccatccctgtcgaatcaagcgacattgtgcctacttgggacggcatccggctgggcgagcgattgcgtaccatgagctgcagcgataaaatactgcgctggaacgtgttagggctgcagggggcattactgacccattttttgcagcccatctacctgaagtccgtcaccctggggtacctattctcacagggtcatttaacacgggctatctgctgtagggttacgcgggacggcagcgcctttgaagatggcctgaggcacccctttatcgtgaaccacccaaaagtaggccgtgtgtctatatacgatagcaagcggcagtctggtaagacaaaggaaacctctgtgaattggtgtctggcggatgggtacgatctggaaatcctcgacggaacgcgtgggacagtcgatggccccagaaacgagctgagccgggtaagtaagaagaacattttcctgcttttcaaaaagctttgttctttcaggtataggagagatctactgagattgtcctatggcgaggctaagaaagccgccagggattacgagaccgccaagaactatttcaaaaaaggtcttaaagacatgggttacggaaattggatctccaagccgcaggaggagaaaaacttttatctttgccctgtatag

SEQ ID NO: 41828 - DNA, 3681 bp, Artificial Sequence
  derived and/or modified sequence
atgaacccccggcagggctacagcctgagcggctactacacccaccccttccagggctatgagcaccggcagctgcgctaccagcagcccggccctggcagcagccccagcagcttcctgctgaagcagatcgagttcctgaagggccagctgcctgaggcccctgtgattggcaagcagacccccagcctgccccccagcctgcccggcctgcggccccgcttccctgtgctgctggccagcagcacccggggccggcaggtggacatccggggcgtgccccggggcgtgcacctgcggagccagggcctgcagaggggcttccagcaccccagcccccggggccgcagcctgccccagaggggcgtggactgcctgagcagccacttccaggagctgagcatctaccaggaccaggagcagaggatcctgaagttcctggaggagctgggggagggcaaggccaccacagcccatgacctgagcggcaagctgggcacccccaagaaggagatcaacagagtgctgtacagcctggccaagaagggcaagctgcagaaggaggccggcaccccacccctgtggaagattgctgtgtccacccaggcctggaaccagcacagcggcgtggtgcggccagatggccacagccagggcgcccccaacagcgaccccagcctggagcctgaggacaggaacagcacctctgtgtctgaggacctgctggagcccttcatcgctgtgtctgcccaggcctggaaccagcacagcggcgtggtgcggccagacagccacagccagggcagccccaacagcgaccccggcctggagcctgaggacagcaacagcaccagcgccctggaggaccccctggagttcctggacatggccgagatcaaggagaagatctgtgactacctgttcaacgtgtctgacagcagcgccctgaacctggccaagaacatcggcctgaccaaggcccgggacatcaatgctgtgctgattgacatggagcggcagggagatgtgtaccggcagggcaccaccccacccatctggcacctgacagacaagaagcgggagaggatgcagatcaagaggaacaccaacagcgtgcctgagacagccccagctgccatccctgagaccaagagaaatgctgagttcctgacctgcaacatccccaccagcaatgccagcaacaacatggtgaccacagagaaggtggagaatggccaggagcctgtgatcaagctggagaaccggcaggaggcccggcctgagcccgcccggctgaagccccctgtgcactacaacggccccagcaaggccggctacgtggactttgaaaatggccagtgggccacagatgacatcccagatgacctgaacagcatccgggccgcccctggagagttccgggccatcatggagatgcccagcttctacagccacggcctgccccgctgcagcccctacaagaagctgacagagtgccagctgaagaaccccatcagcggcctgctggagtatgcccagtttgccagccagacctgtgagttcaacatgattgagcagagcggcccccctcatgagccccgcttcaagttccaggtggtgatcaatggccgggagttccccccagctgaggccggcagcaagaaggtggccaagcaggatgctgccatgaaggccatgaccatcctgctggaggaggccaaggccaaggacagcggcaagtctgaggagagcagccactacagcacagagaaggagagcgagaagacagctgagagccagacccccaccccatctgccaccagcttcttcagcggcaagagccctgtgaccaccctgctggagtgcatgcacaagctgggcaacagctgtgagttccggctgctgagcaaggagggccctgcccacgagcccaagttccagtactgtgtggccgtgggcgcccagaccttccccagcgtgtctgcccccagcaagaaggtggccaagcagatggctgctgaggaggccatgaaggccctgcatggagaggccaccaacagcatggccagtgacaaccagcctgagggcatgatcagcgagagcctggacaacctggagagcatgatgcccaacaaggtgaggaagatcggggagctggtgcgctacctgaacaccaaccctgtgggcggcctgctggagtatgcccggagccacggctttgctgctgagttcaagctggtggaccagagcggcccccctcatgagcccaagtttgtgtaccaggccaaggtgggcggccgctggttccctgctgtgtgtgcccacagcaagaagcagggcaagcaggaggccgcagatgctgccctgcgggtgctgattggagaaaatgagaaggccgagaggatgggcttcacagaggtgacccctgtgactggagccagcctgcggaggaccatgctgctgctgagccgcagccctgaggcccagcccaagaccctgcccctgaccggcagcaccttccatgaccagatcgccatgctgagccaccgctgcttcaacaccctgaccaacagcttccagcccagcctgctgggcaggaagatcctggccgccatcatcatgaagaaggacagcgaggacatgggcgtggtggtgtccctgggcactggaaacagatgtgtgaagggggacagcctgagcctgaagggggagaccgtgaatgactgccacgccgagatcatcagccggcggggcttcatccgcttcctgtacagcgagctgatgaagtacaacagccagacagccaaggacagcatctttgagcccgccaagggcggggagaagctgcagatcaagaagacagtgtccttccacctgtacatcagcacagccccctgtggagatggagccctgtttgacaagagctgcagcgaccgggccatggagagcacagagagccgccactaccctgtgtttgagaaccccaagcagggcaagctgcggaccaaggtggagaatggagagggcaccatccctgtggagagcagtgacatcgtgcccacctgggatggcatccggctgggggagcggctgcggaccatgagctgcagcgacaagatcctgcgctggaatgtgctgggcctgcagggcgccctgctgacccacttcctgcagcccatctacctgaagtctgtgaccctgggctacctgttcagccagggccacctgacccgggccatctgctgccgggtgaccagagatggcagcgcctttgaagatggcctgcggcaccccttcatcgtgaaccaccccaaggtgggccgggtgtccatctatgacagcaagaggcagagcggcaagaccaaggagacctctgtgaactggtgcctggctgatggctatgacctggagatcctggatggcacccggggcaccgtggatggccccagaaatgagctgagccgggtgtccaagaagaacatcttcctgctcttcaagaagctgtgcagcttccgctaccgccgggacctgctgcggctgtcctatggagaggccaagaaggccgcccgggactatgaaacagccaagaactacttcaagaagggcctgaaggacatgggctacggcaactggatcagcaagccccaggaggagaagaacttctacctgtgccctgtgtag

SEQ ID NO: 41829 - DNA, 3681 bp, Artificial Sequence
  derived and/or modified sequence
atgaacccccggcagggctacagcctgagcggctactacacccaccctttccaggggtacgaacatcggcaacttcgctaccagcagcccggccccggatcttcaccaagcagctttctactgaagcagatcgaatttctgaaaggacagctccccgaagctcctgtgattgggaagcagaccccttcactgccaccctcccttcccgggttaagaccgagattccccgttctcctcgcctcctctacaaggggaaggcaagtcgacatacggggcgttccgaggggggtgcacctcagatcacaagggctgcagcggggcttccagcacccctcccccaggggacggtctctaccccagcgcggcgtcgactgtctgtcgtctcactttcaggagctctctatctatcaggaccaagagcagcgaattctgaagtttttggaagagctgggcgagggcaaggctacgaccgcacacgacttgtccggaaaattgggcaccccgaagaaagagataaatcgggttctttatagtctggcgaaaaaaggcaagcttcagaaggaggcaggcacgccccctttgtggaagatagcggtcagcacccaggcctggaatcagcactctggagtcgtgcgccccgacggacactcacaaggcgcgcccaacagcgaccctagcctcgagccagaggaccgtaactcaactagcgtctccgaggacttactcgagcctttcattgctgtatctgcacaagcttggaaccaacacagcggggttgttagaccggactcgcactctcaaggttcgcccaacagtgaccctggactggagcccgaagatagtaattccacttctgccctggaggatcctctggagtttctggatatggctgaaatcaaggagaaaatatgcgactacttgtttaatgtttcagacagcagcgcactgaacctggctaagaatatcggcctgacaaaggctcgcgatataaatgcggttctgatagacatggagcgtcagggggacgtgtaccgccaagggacaacgcccccgatctggcacctgactgacaaaaagcgcgagcgaatgcagataaagcgtaacaccaatagcgtgccggagactgcccctgccgctatcccagagaccaaaaggaatgccgaatttttaacatgtaacattcccacatccaatgccagtaataacatggttacgacagaaaaagtagagaatggccaagagccagtgatcaagctcgaaaataggcaggaggccagacccgagcccgccaggctcaagcctcctgttcactacaatggcccatccaaggccggctacgtagactttgaaaacggccagtgggccacagacgatatcccagatgatctcaacagcattagggctgctcctggcgaattccgggccatcatggagatgccatctttctactcacacggacttcctcgctgttctccctacaaaaaactcacagaatgccagttgaaaaacccaatctcaggactgctagaatatgcgcagttcgcaagtcagacctgtgaattcaatatgatcgaacagtcgggccccccacatgaaccccgatttaagttccaagtggtcatcaacggaagagaatttccccccgccgaagcgggcagcaagaaggtggccaagcaagatgcagctatgaaagccatgactattctattggaggaggctaaggccaaagacagtggcaagagcgaagaatctagccattactccacggaaaaggaaagcgagaagacggccgagagccagacacctacaccgagtgcaacctcttttttctccggcaaaagccccgtgacgactctacttgagtgtatgcacaaattgggcaacagctgcgaatttcgcctcttgtccaaggaggggcccgcccatgaacctaaattccagtactgtgtggccgtgggagctcagaccttcccttcagtcagtgcacccagcaaaaaggtcgccaaacagatggccgccgaagaagcaatgaaggcgctgcacggcgaggccactaacagcatggccagtgataaccagcccgaaggcatgattagtgaatcactggacaatctggagtcaatgatgcccaataaggtgaggaagataggggaattggtgagatacctcaatactaatcctgtggggggactcctggaatacgctaggtcccatgggtttgctgcggagttcaaacttgttgaccagtcaggtccaccgcacgagccaaaatttgtgtaccaggcaaaagtcggggggcggtggttccccgctgtatgcgcccattccaaaaaacagggaaaacaggaagccgcggatgcagcactcagagtcctgattggcgagaacgaaaaggctgagcgcatggggtttaccgaggtaacccccgtgacgggcgcctccctgaggcgcactatgcttctgttatctcgctcgccagaagcccagcccaagaccttgcctctgacgggcagtacttttcatgatcagatcgcgatgctgagccatcgctgctttaacactttaactaattcctttcagccctccctcctgggccgtaaaatcctggctgctattatcatgaaaaaagactccgaagatatgggagttgtggtgtctttggggactgggaatcgttgcgttaaaggggatagtctttcactgaagggggagactgtgaatgattgtcatgccgagattatttctaggagggggttcatacgtttcctgtacagcgaactgatgaagtacaattctcaaactgcaaaagactctatcttcgagcctgcgaagggcggggagaaacttcagatcaagaagacagtgtcgtttcatctctatattagtacagccccttgcggtgatggtgctctgtttgataaatcttgctccgatcgggccatggaatcgaccgaaagtagacattatcccgtcttcgagaaccctaagcagggtaagctgcgaacgaaggtcgagaacggtgaagggaccatccccgtggaaagctccgacatagtgccaacgtgggacggcataagactcggagaaagattgagaacaatgtcttgcagtgataagatactccggtggaacgtgctgggactgcagggggctttgctcacgcactttctacaacccatatacttgaaaagtgtgacccttggatatctgttttcccagggtcacctcaccagagccatttgttgcagggtgaccagggatggcagcgctttcgaggatggattgaggcatcctttcatagtgaatcacccaaaagtgggacgcgttagtatttacgactctaagagacagagtgggaaaaccaaggagacgtcagtgaattggtgtctcgctgacggctatgatttggagattctcgacggaactcgtggcaccgttgatgggcctcgaaacgagctctccagggtgtctaaaaaaaacatctttttactgttcaagaagttgtgcagttttagatatcggagagatctgctccgactgtcatatggcgaggctaaaaaggctgcccgggattacgagaccgcaaagaactatttcaaaaaaggactcaaggacatgggatacggcaactggatttctaaaccacaggaggagaagaatttctacttatgcccggtgtag

SEQ ID NO: 41830 - DNA, 6620 bp, Artificial Sequence
  derived and/or modified sequence
gaggaaacgaaagcgaaattgaaccggagccatcttgggcccggcgcgcagacccgcggagtttcccgtgccgacgccccggggccacttccagtgcggagtagcggaggcgtgggggcctcgaggggctggcgcggcccagcggtcgggccagggtcgtgccgccggcgggtcgggccgggcaatgcctcgcgggcgcaatgaatccgcggcaggggtattccctcagcggatactacacccatccatttcaaggctatgagcacagacagctcaggtaccagcagcctgggccaggatcttcccccagtagtttcctgcttaagcaaatagaatttctcaaggggcagctcccagaagcaccggtgattggaaagcagacaccgtcactgccaccttccctcccaggactccggccaaggtttccagtactacttgcctccagtaccagaggcaggcaagtggacatcaggggtgtccccaggggcgtgcatctcagaagtcaggggctccagagagggttccagcatccttcaccacgtggcaggagtctgccacagagaggtgttgattgcctttcctcacatttccaggaactgagtatctaccaagatcaggaacaaaggatcttaaagttcctggaagagcttggggaagggaaggccaccacagcacatgatctgtctgggaaacttgggactccgaagaaagaaatcaatcgagttttatactccctggcaaagaagggcaagctacagaaagaggcaggaacaccccctttgtggaaaatcgcggtctccactcaggcttggaaccagcacagcggagtggtaagaccagacggtcatagccaaggagccccaaactcagacccgagtttggaaccggaagacagaaactccacatctgtctcagaagatcttcttgagccttttattgcagtctcagctcaggcttggaaccagcacagcggagtggtaagaccagacagtcatagccaaggatccccaaactcagacccaggtttggaacctgaagacagcaactccacatctgccttggaagatcctcttgagtttttagacatggccgagatcaaggagaaaatctgcgactatctcttcaatgtgtctgactcctctgccctgaatttggctaaaaatattggccttaccaaggcccgagatataaatgctgtgctaattgacatggaaaggcagggggatgtctatagacaagggacaacccctcccatatggcatttgacagacaagaagcgagagaggatgcaaatcaagagaaatacgaacagtgttcctgaaaccgctccagctgcaatccctgagaccaaaagaaacgcagagttcctcacctgtaatatacccacatcaaatgcctcaaataacatggtaaccacagaaaaagtggagaatgggcaggaacctgtcataaagttagaaaacaggcaagaggccagaccagaaccagcaagactgaaaccacctgttcattacaatggcccctcaaaagcagggtatgttgactttgaaaatggccagtgggccacagatgacatcccagatgacttgaatagtatccgcgcagcaccaggtgagtttcgagccatcatggagatgccctccttctacagtcatggcttgccacggtgttcaccctacaagaaactgacagagtgccagctgaagaaccccatcagcgggctgttagaatatgcccagttcgctagtcaaacctgtgagttcaacatgatagagcagagtggaccaccccatgaacctcgatttaaattccaggttgtcatcaatggccgagagtttcccccagctgaagctggaagcaagaaagtggccaagcaggatgcagctatgaaagccatgacaattctgctagaggaagccaaagccaaggacagtggaaaatcagaagaatcatcccactattccacagagaaagaatcagagaagactgcagagtcccagacccccaccccttcagccacatccttcttttctgggaagagccccgtcaccacactgcttgagtgtatgcacaaattggggaactcctgcgaattccgtctcctgtccaaagaaggccctgcccatgaacccaagttccaatactgtgttgcagtgggagcccaaactttccccagtgtgagtgctcccagcaagaaagtggcaaagcagatggccgcagaggaagccatgaaggccctgcatggggaggcgaccaactccatggcttctgataaccagcctgaaggtatgatctcagagtcacttgataacttggaatccatgatgcccaacaaggtcaggaagattggcgagctcgtgagatacctgaacaccaaccctgtgggtggccttttggagtacgcccgctcccatggctttgctgctgaattcaagttggtcgaccagtccggacctcctcacgagcccaagttcgtttaccaagcaaaagttgggggtcgctggttcccagccgtctgcgcacacagcaagaagcaaggcaagcaggaagcagcagatgcggctctccgtgtcttgattggggagaacgagaaggcagaacgcatgggtttcacagaggtaaccccagtgacaggggccagtctcagaagaactatgctcctcctctcaaggtccccagaagcacagccaaagacactccctctcactggcagcaccttccatgaccagatagccatgctgagccaccggtgcttcaacactctgactaacagcttccagccctccttgctcggccgcaagattctggccgccatcattatgaaaaaagactctgaggacatgggtgtcgtcgtcagcttgggaacagggaatcgctgtgtgaaaggagattctctcagcctaaaaggagaaactgtcaatgactgccatgcagaaataatctcccggagaggcttcatcaggtttctctacagtgagttaatgaaatacaactcccagactgcgaaggatagtatatttgaacctgctaagggaggagaaaagctccaaataaaaaagactgtgtcattccatctgtatatcagcactgctccgtgtggagatggcgccctctttgacaagtcctgcagcgaccgtgctatggaaagcacagaatcccgccactaccctgtcttcgagaatcccaaacaaggaaagctccgcaccaaggtggagaacggagaaggcacaatccctgtggaatccagtgacattgtgcctacgtgggatggcattcggctcggggagagactccgtaccatgtcctgtagtgacaaaatcctacgctggaacgtgctgggcctgcaaggggcactgttgacccacttcctgcagcccatttatctcaaatctgtcacattgggttaccttttcagccaagggcatctgacccgtgctatttgctgtcgtgtgacaagagatgggagtgcatttgaggatggactacgacatccctttattgtcaaccaccccaaggttggcagagtcagcatatatgattccaaaaggcaatccgggaagactaaggagacaagcgtcaactggtgtctggctgatggctatgacctggagatcctggacggtaccagaggcactgtggatgggccacggaatgaattgtcccgggtctccaaaaagaacatttttcttctatttaagaagctctgctccttccgttaccgcagggatctactgagactctcctatggtgaggccaagaaagctgcccgtgactacgagacggccaagaactacttcaaaaaaggcctgaaggatatgggctatgggaactggattagcaaaccccaggaggaaaagaacttttatctctgcccagtatagtatgctccagtgacagatggattagggtgtgtcatactagggtgtgagagaggtaggtcgtagcattcctcatcacatggtcaggggatttttttttctcctttttttttctttttaagccataattggtgatactgaaaactttgggttcccatttatcctgctttctttgggattgctaggcaaggtctggccaggccccccttttttcccccaagtgaagaggcagaaacctaagaagttatcttttctttctacccaaagcatacatagtcactgagcacctgcggtccatttcctcttaaaagttttgttttgatttgtttccatttcctttccctttgtgtttgctacactgacctcttgcggtcttgattaggtttcagtcaactctggatcatgtcagggactgataatttcatttgtggattacgcagacccctctacttcccctctttcccttctgagattctttccttgtgatctgaatgtctccttttccccctcagagggcaaagaggtgaacataaaggatttggtgaaacatttgtaagggtaggagttgaaaactgcagttcccagtgccacggaagtgtgattggagcctgcagataatgcccagccatcctcccatcctgcactttagccagctgcagggcgggcaaggcaaggaaagctgcttccctggaagtgtatcactttctccggcagctgggaagtctagaaccagccagactgggttaagggagctgctcaagcaatagcagaggtttcacccggcaggatgacacagaccacttcccagggagcacgggcatgccttggaatattgccaagcttccagctgcctcttctcctaaagcattcctaggaatattttccccgccaatgctgggcgtacaccctagccaacgggacaaatcctagagggtataaaatcatctctgctcagataatcatgacttagcaagaataagggcaaaaaatcctgttggcttaacgtcactgttccacccggtgtaatatctctcatgacagtgacaccaagggaagttgactaagtcacatgtaaattaggagtgttttaaagaatgccatagatgttgattcttaactgctacagataacctgtaattgagcagatttaaaattcaggcatacttttccatttatccaagtgctttcatttttccagatggcttcagaagtaggctcgtgggcagggcgcagacctgatctttatagggttgacatagaaagcagtagttgtgggtgaaagggcaggttgtcttcaaactctgtgaggtagaatcctttgtctatacctccatgaacattgactcgtgtgttcagagcctttggcctctctgtggagtctggctctctggctcctgtgcattctttgaatagtcactcgtaaaaactgtcagtgcttgaaactgtttcctttactcatgttgaagggactttgttggcttttagagtgttggtcatgactccaagagcagagcagggaagagcccaagcatagacttggtgccgtggtgatggctgcagtccagttttgtgatgctgcttttacgtgtccctcgataacagtcagctagacacactcaggaggactactgaggctctgcgaccttcaggagctgagcctgcctctctcctttagatgacagaccttcatctgggaacgtgctgagccagcaccctcagatgatttccctccaaactgctgactaggtcatcctctgtctggtagagacattcacatctttgcttttattctatgctctctgtacttttgaccaaaaattgaccaaagtaagaaaatgcaagttctaaaaatagactaaggatgcctttgcagaacaccaaagcatcccaaggaactggtagggaagtggcgcctgtctcctggagtggaagaggcctgctccctggctctgggtctgctgggggcacagtaaatcagtcttggcacccacatccagggcagagaggtctgtggttctcagcatcagaaggcagcgcagcccctctcctcttcaggctacagggttgtcacctgctgagtcctcaggttgtttggcctctctggtccatcttgggcattaggttctccagcagagctctggccagctgcctcttctttaactgggaacacaggctctcacaagatcagaacccccactcacccccaagatcttatctagcaagcctgtagtattcagtttctgttgtaggaagagagcgaggcatccctgaattccacgcatctgctggaaacgagccgtgtcagatcgcacatccctgcgcccccatgcccctctgagtcacacaggacagaggaggcagagcttctgcccactgttatcttcactttctttgtccagtcttttgtttttaataagcagtgaccctccctactcttctttttaatgatttttgtagttgatttgtctgaactgtggctactgtgcattccttgaataatcacttgtaaaaattgtcagtgcttgaagctgtttcctttactcacattgaagggacttcgttggttttttggagtcttggttgtgactccaagagcagagtgaggaagacccccaagcatagactcgggtactgtgatgatggctgcagtccagttttatgattctgcttttatgtgtcccttgataacagtgacttaacaatatacattcctcataaataaaaaaaaaacaagaatctgaa

SEQ ID NO: 41831 - DNA, 3681 bp, Artificial Sequence
  derived and/or modified sequence
atgaacccacgccagggatactcgctgtcaggatattacacgcatcctttccagggatatgaacatcggcagttgcgttatcagcagcccggtccaggctctagcccctccagcttcctgctaaaacagatagaattcttaaaggggcagttacccgaggctcccgtgattggtaagcagactcccagcctgccccctagtctgcccggacttaggcctcgatttcccgtgctccttgcatccagcacccggggtcgacaggtggacatccgcggtgtcccgaggggcgtgcacttaagaagccagggcctgcagcggggatttcagcacccatcccctagaggcaggtctcttcctcagcgtggcgttgattgcctctcgtcgcatttccaagagctttccatctatcaggaccaggaacaacggatccttaaatttctggaggaactgggagaaggcaaggccactactgcccacgacctgagtggtaaactgggcaccccaaagaaggagattaatcgcgtcctgtactcgctggctaagaaggggaagcttcagaaggaggccggaactccccctctgtggaaaattgctgtgtcaacacaggcctggaaccagcactccggcgtagttagaccagacgggcacagtcaaggcgctccaaatagcgatccgtccctggaacctgaagaccggaactcgacctccgtctccgaggacctcctggagcctttcatagcggtctcagcacaggcatggaaccagcactccggagtcgtgcgtccagattcccactcacagggctctcctaatagtgacccgggtttggagcccgaggactcaaactctacctcagcactggaggaccctttggagtttttagacatggccgagattaaagagaagatctgcgattacctgtttaacgtgtccgattcttctgccctgaacctagcgaagaatattggcctgactaaggccagggatattaatgccgtactgatcgacatggagcgacagggggacgtgtatcgccagggaacgactccacccatttggcaccttacggacaaaaagagagaacgaatgcagattaagcgcaacaccaattcagtccccgagaccgctcccgctgcaattcccgagaccaagcgcaacgccgaattcctgacctgcaacattccgacgagcaacgcatcaaacaatatggtgacaactgagaaagttgaaaacgggcaggaacccgtgatcaaactagagaatcgtcaggaggcacggcctgagcccgctcgtttaaagcccccagtccactacaacggtccttctaaggcaggctacgtggattttgagaatggccagtgggccacagacgatattcccgatgaccttaactcaattagagctgcgccaggcgaattccgtgcgatcatggagatgccttccttttacagccatggtttgcctagatgttccccttacaagaagctgactgagtgccagcttaaaaaccctatctctggcttacttgaatatgcacaattcgcttcccagacttgtgagttcaatatgattgagcagtcagggccacctcatgaacccaggtttaaattccaggttgtcataaacgggagagaattcccccctgccgaggccggtagcaaaaaagtggccaaacaggacgcagctatgaaagcaatgacaattctgctggaagaggctaaagctaaggacagcggcaagagtgaggaaagcagccattatagcacagagaaagagagcgaaaagacagcagagagtcagacgcctacaccctcagccacttcgttcttttccggcaaatcgccagtgaccactctgctcgaatgcatgcacaaactgggcaactcctgcgagtttcggctcttgagcaaagaaggacccgctcacgagcccaaattccagtactgcgttgcagtgggcgctcagacattccctagtgtgtctgccccttccaagaaggtggcaaagcaaatggcagcggaggaagccatgaaggcactccacggcgaggctacaaacagcatggcctccgataatcagccagagggtatgatctcggagagcctggacaatctcgagtcaatgatgccaaacaaagttcgcaaaatcggtgagctggttaggtacctcaacaccaatcctgtgggcggactactggagtatgcaaggagtcatggattcgccgctgaattcaagttggttgatcagtctgggcctccccatgaacccaagttcgtgtatcaggcaaaggtgggcggtagatggttccctgccgtgtgtgctcatagtaagaaacagggcaaacaggaagccgcagacgcggctttgcgggtgttgattggggagaacgaaaaagcagaaagaatggggttcacagaagtcactcctgttaccggcgcatccctgaggagaaccatgttgttattgtctcggagcccagaggcccagccgaagacactgccactcactggctcaacgtttcacgaccaaatcgctatgctgtcccaccgctgttttaacaccttgactaactcctttcagccgtccttattgggcaggaagatcctggccgctatcataatgaaaaaagattctgaagacatgggtgtggtagtgtctctgggtactgggaatagatgtgtcaagggggactcgctctctctcaagggcgagaccgtaaatgactgccacgcagaaatcattagccgtcgaggttttattaggttcttatattcagaactgatgaagtacaatagccaaaccgccaaagacagtatctttgagccagcgaaggggggagaaaaactgcagataaagaagacggtctcatttcatttgtatatttctaccgcaccctgtggggacggggcattatttgacaagtcttgttcagaccgggcaatggagtcaactgaatctaggcactatcctgtgtttgagaatcccaaacagggaaagcttaggactaaagtggaaaacggtgaaggcactatccccgtagaaagttctgatatagttccaacctgggatgggattaggctcggagaacgcctgcggaccatgagttgctccgacaagatccttcggtggaatgttctaggattgcagggcgcattgctcactcacttcttgcaacctatatacttgaaatccgtaactttgggctacctattcagtcaaggccatttgaccagggccatctgttgtcgggtgactcgcgatggaagcgcgtttgaggacggcctcagacacccattcatcgtcaatcaccccaaggtgggacgcgttagtatttacgattctaaacgacagtctggcaagactaaagaaacctcagtcaattggtgcctcgccgatggatatgaccttgagatactggacggtacccggggaactgttgatggcccacgcaacgagttatcacgggtctctaaaaagaatatttttctgctttttaagaagctgtgctcgttcagataccgacgggatctgttgcgcctgagctacggagaggctaaaaaagccgcaagggattacgaaaccgctaagaactacttcaagaagggcctcaaagatatggggtacggaaactggataagcaagcctcaagaagagaagaatttttacctgtgccctgtttag

SEQ ID NO: 41832 - DNA, 3681 bp, Artificial Sequence
  derived and/or modified sequence
atgaaccccagacagggctacagcctgagcggctactacacccaccccttccagggctacgagcacagacagctgagataccagcagcccggccccggcagcagccccagcagcttcctgctgaagcagatcgagttcctgaagggccagctgcccgaggcccccgtgatcggcaagcagacccccagcctgccccccagcctgcccggcctgagacccagattccccgtgctgctggccagcagcaccagaggcagacaggtggacatcagaggcgtgcccagaggcgtgcacctgagaagccagggcctgcagagaggcttccagcaccccagccccagaggcagaagcctgccccagagaggcgtggactgcctgagcagccacttccaggagctgagcatctaccaggaccaggagcagagaatcctgaagttcctggaggagctgggcgagggcaaggccaccaccgcccacgacctgagcggcaagctgggcacccccaagaaggagatcaacagagtgctgtacagcctggccaagaagggcaagctgcagaaggaggccggcaccccccccctgtggaagatcgccgtgagcacccaggcctggaaccagcacagcggcgtggtgagacccgacggccacagccagggcgcccccaacagcgaccccagcctggagcccgaggacagaaacagcaccagcgtgagcgaggacctgctggagcccttcatcgccgtgagcgcccaggcctggaaccagcacagcggcgtggtgagacccgacagccacagccagggcagccccaacagcgaccccggcctggagcccgaggacagcaacagcaccagcgccctggaggaccccctggagttcctggacatggccgagatcaaggagaagatctgcgactacctgttcaacgtgagcgacagcagcgccctgaacctggccaagaacatcggcctgaccaaggccagagacatcaacgccgtgctgatcgacatggagagacagggcgacgtgtacagacagggcaccaccccccccatctggcacctgaccgacaagaagagagagagaatgcagatcaagagaaacaccaacagcgtgcccgagaccgcccccgccgccatccccgagaccaagagaaacgccgagttcctgacctgcaacatccccaccagcaacgccagcaacaacatggtgaccaccgagaaggtggagaacggccaggagcccgtgatcaagctggagaacagacaggaggccagacccgagcccgccagactgaagccccccgtgcactacaacggccccagcaaggccggctacgtggacttcgagaacggccagtgggccaccgacgacatccccgacgacctgaacagcatcagagccgcccccggcgagttcagagccatcatggagatgcccagcttctacagccacggcctgcccagatgcagcccctacaagaagctgaccgagtgccagctgaagaaccccatcagcggcctgctggagtacgcccagttcgccagccagacctgcgagttcaacatgatcgagcagagcggccccccccacgagcccagattcaagttccaggtggtgatcaacggcagagagttcccccccgccgaggccggcagcaagaaggtggccaagcaggacgccgccatgaaggccatgaccatcctgctggaggaggccaaggccaaggacagcggcaagagcgaggagagcagccactacagcaccgagaaggagagcgagaagaccgccgagagccagacccccacccccagcgccaccagcttcttcagcggcaagagccccgtgaccaccctgctggagtgcatgcacaagctgggcaacagctgcgagttcagactgctgagcaaggagggccccgcccacgagcccaagttccagtactgcgtggccgtgggcgcccagaccttccccagcgtgagcgcccccagcaagaaggtggccaagcagatggccgccgaggaggccatgaaggccctgcacggcgaggccaccaacagcatggccagcgacaaccagcccgagggcatgatcagcgagagcctggacaacctggagagcatgatgcccaacaaggtgagaaagatcggcgagctggtgagatacctgaacaccaaccccgtgggcggcctgctggagtacgccagaagccacggcttcgccgccgagttcaagctggtggaccagagcggccccccccacgagcccaagttcgtgtaccaggccaaggtgggcggcagatggttccccgccgtgtgcgcccacagcaagaagcagggcaagcaggaggccgccgacgccgccctgagagtgctgatcggcgagaacgagaaggccgagagaatgggcttcaccgaggtgacccccgtgaccggcgccagcctgagaagaaccatgctgctgctgagcagaagccccgaggcccagcccaagaccctgcccctgaccggcagcaccttccacgaccagatcgccatgctgagccacagatgcttcaacaccctgaccaacagcttccagcccagcctgctgggcagaaagatcctggccgccatcatcatgaagaaggacagcgaggacatgggcgtggtggtgagcctgggcaccggcaacagatgcgtgaagggcgacagcctgagcctgaagggcgagaccgtgaacgactgccacgccgagatcatcagcagaagaggcttcatcagattcctgtacagcgagctgatgaagtacaacagccagaccgccaaggacagcatcttcgagcccgccaagggcggcgagaagctgcagatcaagaagaccgtgagcttccacctgtacatcagcaccgccccctgcggcgacggcgccctgttcgacaagagctgcagcgacagagccatggagagcaccgagagcagacactaccccgtgttcgagaaccccaagcagggcaagctgagaaccaaggtggagaacggcgagggcaccatccccgtggagagcagcgacatcgtgcccacctgggacggcatcagactgggcgagagactgagaaccatgagctgcagcgacaagatcctgagatggaacgtgctgggcctgcagggcgccctgctgacccacttcctgcagcccatctacctgaagagcgtgaccctgggctacctgttcagccagggccacctgaccagagccatctgctgcagagtgaccagagacggcagcgccttcgaggacggcctgagacaccccttcatcgtgaaccaccccaaggtgggcagagtgagcatctacgacagcaagagacagagcggcaagaccaaggagaccagcgtgaactggtgcctggccgacggctacgacctggagatcctggacggcaccagaggcaccgtggacggccccagaaacgagctgagcagagtgagcaagaagaacatcttcctgctgttcaagaagctgtgcagcttcagatacagaagagacctgctgagactgagctacggcgaggccaagaaggccgccagagactacgagaccgccaagaactacttcaagaagggcctgaaggacatgggctacggcaactggatcagcaagccccaggaggagaagaacttctacctgtgccccgtgtag

SEQ ID NO: 41833 - DNA, 294 bp, Artificial Sequence
  derived and/or modified sequence
atgagcagcgacaaccagtggagcgccgacgaggacgagggccagctgagcagactgatcagaaagagcagagacagccccttcgtgcccatcggcatcgccggcttcgtgaccgtggtgagctgcggcctgtacaagctgaagtacagaagagaccagaagatgagcatccacctgatccacatgagagtggccgcccagggcttcgtggtgggcgccgtgaccctgggcgtgctgtacagcatgtacaaggactacatcagacccagattcttcagcgagagcaagaagtag

SEQ ID NO: 41834 - DNA, 294 bp, Artificial Sequence
  derived and/or modified sequence
atgtcttctgacaaccagtggagtgccgacgaggatgaagggcagctgagtaggctgattagaaaatccagggatagcccttttgtccccataggcatcgcaggctttgttacggtagtatcctgcggactctacaagctgaaataccggcgggatcagaagatgtcaattcacctgattcacatgcgcgtagccgcacaaggattcgtggtcggcgccgtgacattgggggtcctctatagcatgtacaaggattatattagaccgagattcttctctgaatcaaaaaaatag

SEQ ID NO: 41835 - DNA, 294 bp, Artificial Sequence
  derived and/or modified sequence
atgagcagtgacaaccagtggagcgcagatgaagatgagggccagctgagccgcctcatcaggaagagccgggacagcccctttgtgcccatcggcattgctggctttgtgacagtggtgtcctgtggcctgtacaagctgaagtaccgccgggaccagaagatgagcatccacctgatccacatgagggtggccgcccagggctttgtggtgggcgctgtgaccctgggcgtgctgtacagcatgtacaaggactacatccggccccgcttcttcagcgagagcaagaagtag

SEQ ID NO: 41836 - DNA, 294 bp, Artificial Sequence
  derived and/or modified sequence
atgagcagcgacaaccagtggagcgccgacgaggacgagggccagctatccagacttattcgcaagagtagggactccccctttgtcccaatcggcatcgccggctttgtgaccgtggttagctgtggtttgtacaaattgaaatatcgcagggatcagaagatgagcatacacctgatacacatgcgggtagcagcccagggcttcgtggttggcgccgttacactgggtgtgctgtacagtatgtataaagattacattagacccagattctttagtgaatcaaaaaaatag

SEQ ID NO: 41837 - DNA, 294 bp, Artificial Sequence
  derived and/or modified sequence
atgtccagtgacaaccaatggagcgcagatgaagacgaaggtcaattatctagattgattagaaagtcacgagactccccctttgtgcccattggaattgccggattcgtgacggtcgtgtcctgcgggctctataagctgaagtatcggagggatcaaaagatgagcattcacctgattcatatgcgcgtggccgcacagggcttcgtagtgggggcagtaacactgggggtcctctactccatgtataaggactatatccgtcctcgattcttcagtgagtcaaagaaatag

SEQ ID NO: 41838 - protein, 4246 aa, Artificial Sequence
  derived and/or modified sequence
MGLLLVFPLIQSQSRTDPSLCNITAEVLLNCLRDCQPLSLTKEPADCLNGIETLLCSWLEETSDTGRHIPHKQKENAAAALVALACARGSLKTFVHTVHLLQKQTDLGSLPVADVLYRLLLLEGGPGSPSCLLGGKHIVSWGYEDMLPAPDSNTGSSSENKDADLGRCLTADGLYLYTTNSVGRGVSKLGSGLHGTLRGFVYCRNEELEPGWVAFGSGSLLHRPVSFDNKPHSLFQVIDQNTLQVCQVVPMPANHLPIGSTMSTVHLSSDGTYFYWIWSPASLNEKTPKGHSVFMDIFELVVENGVFVANPLQERTILMRKEGESAKSINEMLLSRLSRYRASPSATLAALTGSTISNTLKEDQAANTSCGLPLKMLRKTPIYTCGTYLVMLVPPPGGSGSSATRSLFGGTSGLSSLKRACYDTVNNMLWTCSNDYIDQWCNPGNQAFHYVCQRLGVSHIITEPKEEAITTNEVINQLLHHVGAMCIHQLNLLATNPNLPITSVLGKQHPIEAHHLSSICDIMEKAMVNGDTCIIRCILVVFQVVFKFFFSPQTERNRDIIRRSGLLLWQLLMAPKDQICPEIQKEVCLAISSGLNILYPGETEINNLLKLVLTEGERNSGLSQLRDVILTNLAEQLQNNRFGSDEDDHYRLNDELLHYILKIVVRESCILITKCQTVSKDDFQKLLSTVPAASSCLRYLMAVQNHLLSNTILIKPDENDDSDSSLQGETLKVQELKVSILALATQILTGCDEVLEMLQQVTTALINSDIADREQRLKGLEQVTKATMLGHLLPVLLTSLMHPNLQTLIMADALMPQLVQLVLYTSQTALLLKTQCPVFAEVGCSPCGAPDQKCRLFPDERMLEEKEEPGFLTGLKIPAPWAAGKTVETVHPVRDNYKFKETVHIPGARCLYLRFDSRCSSQYDYDKLVIYAGPNTNSRKVAEYGGNTLGYGSRSVLGTGWPKDLVKCISPPSLNFKVEGDTVTFSFEMRSGREHNTPDKAMWGFACTVRAQESSEDVSGGLPFLVDLALGLSVLACSMLRILYNGPEITKEEEACQELLRSKLLQRCQWQVEANGVISPALTPSPSPLPLTIEEDREFTYPSDVLVPPVGNYFDLPRIRLPPGIMIKLREISGRARPQFRPSIKEVIQPDVMEEMVVSCVIKHLNLVDALQSLINFQYQEEHAEEYDLLCKIMGETFKKLNAMERQLQSVAELEQKWQSEVDDAMQGKLENNMPFFYDYHFNENKMKELELLCSMKEVSFDGNDLENMVLSLREKFLQEVNSLIQKPSHPLAKTKTLVKSLMNRAELLLHVTIAAQSGLTRSISGTPAETPACKSASETKVISHAVRQPVFLRSMSAPSDLEMIGNEDLEFTRANQRRRHVTSHRSSSFTLLQSLAIEDSRDKPTYSVLLGQLFAFIGTNPDQAVSSSSFLLAAQTRWRRGNTRKQALVHMRELLTAAVRVGGVTHLVGPVTMVLQGGPRIEELTCGGMVEQVQEAFGETMTSVVSLCARYPIACANSIGLLCTIPYTRSEEKCLVRSGLVQLMDRLCSLSNQTESSSSEKQTKKQKVATMAWAAFQVLANRCVEWEKEEGGSTEAVHSGLARQVSSLLTNHLARATECCGNQAAGNDALQDVLSLLNDLSRSHIGKAILSQPACVSKLLSLLLDQRPSPKLVLIILQLCRAALPLMSVEDCGNVELPPWSYSVPSLNSEQEDPSDPASKIASLLLAKLADYVVPGCQTVLSPTASEPDTTLTKTSPKNSLKGDKDPGEESEAVDGKLSIFIHKREDQSSHEVLQPLLSSSEGRPFRLGTGANMEKVVKMDRDMTKGGCCEVITEEAAAALRKATKWAQSGLIVSIGPPVESINPETVSGLSTGDKKKTAQTSICRERNSELARTDPVRPFISGHVANSMAAEVIALLHSLLMAPESNAAQIWTTTAEKVLSRALMYIPQLGKYAESILENGSSSGRKLAKLQRIARQAVAALCALGGFKETIKIGSEVQVLGRGISGSIGVVASINEQEGIATVRFPPIDCRKTSQASDTLTIPLSRLCVPRSEALPLHKLSITEKVVQAVQSMLLPQEGSLSIHTSLPATGDGSAPVMAVVRLLAEIRTRACLVMAQLLEDSLFCEEFIQQCPAAVEVLNLVAQECSAGERLAVVEVQCERLRMLYRDCARPPPPPLQADRRQPKEITWSPSRVFPPVRACMFSSHLTSVTFLADPSAGGGLPRGTFIYATSPLPVQAPSFYWEIEIVSYGDTDDDTGPIVSFGFTTEAEKRDGAWTNPVGTCLFHNNGRAVHYNGSSLLQWKSVRLDVTLSPGDVAGIGWERTEGTPPPPGQPAKGRVYFTYCGQRLSPYLEDVSGGMWPVVHIQKKNTKTRANFGSRPFAYAEGQAHRNAADLCTDLAEEISANFEALPFAMASDSDNDAGTSIASDPGTHGPPCRIAAVATAQQQYDSDTSCHYKVELSYENFITSGPDPHPPPIADDESDDDDDDDIPQEDHYALLVKAWETKVFPTIRRRFRNEAERKSGLDQIKGALQLGMVDIARQTVEFLYEENGGIPRDLYLPTIEDIKDEANKFTIDKVRKGLTVVTRSPDSNNVASSAVGTALPKFAIRGMLKTFGLHGVVLDVDSVNELVQVETYLRSEGVLVRYWYPIDMLERPPAGYRRTATNGLVTLDNTNLQIHRELLRCEAALARLYCRMALLNIFAPKLPHLFTRLFHIPAIRDITLEHLQLLSNQLLAPPLPDGTISSSSILLAQSLQHCIHSQNCSATDLFYQGNSQTVREWLNVAITRTLHQGEESLLELTKQICSFLQTAPEQFPSEEFPISESKVNMDVNFPGAAFVVVSCKESQSGFRKDSSLYKAPWARVLVYGLGHKVKRNGQLNLIEAACYPRDASPANTGLAPPPTADQYPSVVLSTDRVHIKLGVSPPPGAVLVLHSLPLEFPLAMAFAEQLLSWKSEDSEGKSEDEPDTIPTSVLLQVVELLGNFLWTTDMAACVKELVFHLLAELLRTVHTLEQRRHPAGLSSSIALQLNPCLAMLMALQSELHKLYDEETQNWVSGGACGGSGGAAAGDQGRFSTYFHALMEGCLAVAEVTLPTNMSVTASGVTSATAPNLSDSSSSSSSSPGQTPQSPSLLSKRKKVKMKREKASSSGKRQSSRTVDSDPTVLSIGGSKPEDMLWFHRALTLLIILRHLTRKDPQGLGVTSDAIADACQALVGPTAHSRLLVISGIPTHLDEGVVRGAIRKACNAHGGVFKDEIYIPLQEEDTKKPKDKAEGGDGKVEPEKTLAFPGTDSMEVSTSSSLTPAMSISASASTSQASICSSQGISQTVSDLSVDPLPAGLELPIPPGLLEPHAVSSQESLDISLCSTGSLGSLGSLGEPLDNAETASVSDMGSMYTVTSLDNQPLAARPIKGFAVVEIRSRAKIEKIRASLFNNNDLIGLSSLDGEDELMEMSTEEILTVSVVNQSLFDTQGSPGLEDYFNDKSIKGEKLVPGAREVLTEIFKSCAHSEQTLSLTPAKPIRVSDIYLSKEQINSQTPGNLLHLFFTNVRPPKKVLEDQLTQILRKYGVPKPKFDKSKYSKAGKEQHPVKVVSTKRPITKPPAKDKAVLNSVSRTALSEKKPTVKPKSPEKSKPDEKDPEKSPTKKQEVPEEKYLTLEGFHKFVIDRARQDIRSVWRAILSCGYDLHFERCACIDVRHAQKASRKWTLEMDVALVQYINQLCRHLAITPARLHPHEVYLDPADAADPRVACLLNVPIESLRLRFALLQSLNTTLETFFLPLVELRQTPMYTHSIAALLKEAKGLIFYDTKVTVMNRVLNATVQRTADHAAPEITLDPLEIVGGEIRASENSYFCQAARQLASVPSSQLCVKLASGGDPTYAFNIRFTGEEVHGTSGSFRHFLWQVCKELQSSSLSLLLLCPSSAVNKNKGKYILTPSPITYGEEQLLHFLGQLLGIAIRADVPLPLDLLPSFWKTLVGEPLDPEQDLQEADILTYNYVKKFESINDETELEALCAEIASQHLATESPDSPNKPCCRFTYLTMTGEEVELCSRGRHILVAWENKDIYAAAIRSLRLRELQNVECVTAVRAGLGSIIPLQLLTMLSPLEMELRTCGLPYINLEFLKAHTMYQVGLMETDQHIEFFWGALEMFTQEELCKFIKFACNQERIPFTCPCKDGGPDTAHVPPYPMKIAPPDGTAGSPDSRYIRVETCMFMIKLPQYSSLEIMLEKLRCAIHYREDPLSG

SEQ ID NO: 41839 - protein, 3996 aa, Artificial Sequence
  derived and/or modified sequence
MPANHLPIGSTMSTVHLSSDGTYFYWIWSPASLNEKTPKGHSVFMDIFELVVENGVFVANPLQERTILMRKEGESAKSINEMLLSRLSRYRASPSATLAALTGSTISNTLKEDQAANTSCGLPLKMLRKTPIYTCGTYLVMLVPPPGGSGSSATRSLFGGTSGLSSLKRACYDTVNNMLWTCSNDYIDQWCNPGNQAFHYVCQRLGVSHIITEPKEEAITTNEVINQLLHHVGAMCIHQLNLLATNPNLPITSVLGKQHPIEAHHLSSICDIMEKAMVNGDTCIIRCILVVFQVVFKFFFSPQTERNRDIIRRSGLLLWQLLMAPKDQICPEIQKEVCLAISSGLNILYPGETEINNLLKLVLTEGERNSGLSQLRDVILTNLAEQLQNNRFGSDEDDHYRLNDELLHYILKIVVRESCILITKCQTVSKDDFQKLLSTVPAASSCLRYLMAVQNHLLSNTILIKPDENDDSDSSLQGETLKVQELKVSILALATQILTGCDEVLEMLQQVTTALINSDIADREQRLKGLEQVTKATMLGHLLPVLLTSLMHPNLQTLIMADALMPQLVQLVLYTSQTALLLKTQCPVFAEVGCSPCGAPDQKCRLFPDERMLEEKEEPGFLTGLKIPAPWAAGKTVETVHPVRDNYKFKETVHIPGARCLYLRFDSRCSSQYDYDKLVIYAGPNTNSRKVAEYGGNTLGYGSRSVLGTGWPKDLVKCISPPSLNFKVEGDTVTFSFEMRSGREHNTPDKAMWGFACTVRAQESSEDVSGGLPFLVDLALGLSVLACSMLRILYNGPEITKEEEACQELLRSKLLQRCQWQVEANGVISPALTPSPSPLPLTIEEDREFTYPSDVLVPPVGNYFDLPRIRLPPGIMIKLREISGRARPQFRPSIKEVIQPDVMEEMVVSCVIKHLNLVDALQSLINFQYQEEHAEEYDLLCKIMGETFKKLNAMERQLQSVAELEQKWQSEVDDAMQGKLENNMPFFYDYHFNENKMKELELLCSMKEVSFDGNDLENMVLSLREKFLQEVNSLIQKPSHPLAKTKTLVKSLMNRAELLLHVTIAAQSGLTRSISGTPAETPACKSASETKVISHAVRQPVFLRSMSAPSDLEMIGNEDLEFTRANQRRRHVTSHRSSSFTLLQSLAIEDSRDKPTYSVLLGQLFAFIGTNPDQAVSSSSFLLAAQTRWRRGNTRKQALVHMRELLTAAVRVGGVTHLVGPVTMVLQGGPRIEELTCGGMVEQVQEAFGETMTSVVSLCARYPIACANSIGLLCTIPYTRSEEKCLVRSGLVQLMDRLCSLSNQTESSSSEKQTKKQKVATMAWAAFQVLANRCVEWEKEEGGSTEAVHSGLARQVSSLLTNHLARATECCGNQAAGNDALQDVLSLLNDLSRSHIGKAILSQPACVSKLLSLLLDQRPSPKLVLIILQLCRAALPLMSVEDCGNVELPPWSYSVPSLNSEQEDPSDPASKIASLLLAKLADYVVPGCQTVLSPTASEPDTTLTKTSPKNSLKGDKDPGEESEAVDGKLSIFIHKREDQSSHEVLQPLLSSSEGRPFRLGTGANMEKVVKMDRDMTKGGCCEVITEEAAAALRKATKWAQSGLIVSIGPPVESINPETVSGLSTGDKKKTAQTSICRERNSELARTDPVRPFISGHVANSMAAEVIALLHSLLMAPESNAAQIWTTTAEKVLSRALMYIPQLGKYAESILENGSSSGRKLAKLQRIARQAVAALCALGGFKETIKIGSEVQVLGRGISGSIGVVASINEQEGIATVRFPPIDCRKTSQASDTLTIPLSRLCVPRSEALPLHKLSITEKVVQAVQSMLLPQEGSLSIHTSLPATGDGSAPVMAVVRLLAEIRTRACLVMAQLLEDSLFCEEFIQQCPAAVEVLNLVAQECSAGERLAVVEVQCERLRMLYRDCARPPPPPLQADRRQPKEITWSPSRVFPPVRACMFSSHLTSVTFLADPSAGGGLPRGTFIYATSPLPVQAPSFYWEIEIVSYGDTDDDTGPIVSFGFTTEAEKRDGAWTNPVGTCLFHNNGRAVHYNGSSLLQWKSVRLDVTLSPGDVAGIGWERTEGTPPPPGQPAKGRVYFTYCGQRLSPYLEDVSGGMWPVVHIQKKNTKTRANFGSRPFAYAEGQAHRNAADLCTDLAEEISANFEALPFAMASDSDNDAGTSIASDPGTHGPPCRIAAVATAQQQYDSDTSCHYKVELSYENFITSGPDPHPPPIADDESDDDDDDDIPQEDHYALLVKAWETKVFPTIRRRFRNEAERKSGLDQIKGALQLGMVDIARQTVEFLYEENGGIPRDLYLPTIEDIKDEANKFTIDKVRKGLTVVTRSPDSNNVASSAVGTALPKFAIRGMLKTFGLHGVVLDVDSVNELVQVETYLRSEGVLVRYWYPIDMLERPPAGYRRTATNGLVTLDNTNLQIHRELLRCEAALARLYCRMALLNIFAPKLPHLFTRLFHIPAIRDITLEHLQLLSNQLLAPPLPDGTISSSSILLAQSLQHCIHSQNCSATDLFYQGNSQTVREWLNVAITRTLHQGEESLLELTKQICSFLQTAPEQFPSEEFPISESKVNMDVNFPGAAFVVVSCKESQSGFRKDSSLYKAPWARVLVYGLGHKVKRNGQLNLIEAACYPRDASPANTGLAPPPTADQYPSVVLSTDRVHIKLGVSPPPGAVLVLHSLPLEFPLAMAFAEQLLSWKSEDSEGKSEDEPDTIPTSVLLQVVELLGNFLWTTDMAACVKELVFHLLAELLRTVHTLEQRRHPAGLSSSIALQLNPCLAMLMALQSELHKLYDEETQNWVSGGACGGSGGAAAGDQGRFSTYFHALMEGCLAVAEVTLPTNMSVTASGVTSATAPNLSDSSSSSSSSPGQTPQSPSLLSKRKKVKMKREKASSSGKRQSSRTVDSDPTVLSIGGSKPEDMLWFHRALTLLIILRHLTRKDPQGLGVTSDAIADACQALVGPTAHSRLLVISGIPTHLDEGVVRGAIRKACNAHGGVFKDEIYIPLQEEDTKKPKDKAEGGDGKVEPEKTLAFPGTDSMEVSTSSSLTPAMSISASASTSQASICSSQGISQTVSDLSVDPLPAGLELPIPPGLLEPHAVSSQESLDISLCSTGSLGSLGSLGEPLDNAETASVSDMGSMYTVTSLDNQPLAARPIKGFAVVEIRSRAKIEKIRASLFNNNDLIGLSSLDGEDELMEMSTEEILTVSVVNQSLFDTQGSPGLEDYFNDKSIKGEKLVPGAREVLTEIFKSCAHSEQTLSLTPAKPIRVSDIYLSKEQINSQTPGNLLHLFFTNVRPPKKVLEDQLTQILRKYGVPKPKFDKSKYSKAGKEQHPVKVVSTKRPITKPPAKDKAVLNSVSRTALSEKKPTVKPKSPEKSKPDEKDPEKSPTKKQEVPEEKYLTLEGFHKFVIDRARQDIRSVWRAILSCGYDLHFERCACIDVRHAQKASRKWTLEMDVALVQYINQLCRHLAITPARLHPHEVYLDPADAADPRVACLLNVPIESLRLRFALLQSLNTTLETFFLPLVELRQTPMYTHSIAALLKEAKGLIFYDTKVTVMNRVLNATVQRTADHAAPEITLDPLEIVGGEIRASENSYFCQAARQLASVPSSQLCVKLASGGDPTYAFNIRFTGEEVHGTSGSFRHFLWQVCKELQSSSLSLLLLCPSSAVNKNKGKYILTPSPITYGEEQLLHFLGQLLGIAIRADVPLPLDLLPSFWKTLVGEPLDPEQDLQEADILTYNYVKKFESINDETELEALCAEIASQHLATESPDSPNKPCCRFTYLTMTGEEVELCSRGRHILVAWENKDIYAAAIRSLRLRELQNVECVTAVRAGLGSIIPLQLLTMLSPLEMELRTCGLPYINLEFLKAHTMYQVGLMETDQHIEFFWGALEMFTQEELCKFIKFACNQERIPFTCPCKDGGPDTAHVPPYPMKIAPPDGTAGSPDSRYIRVETCMFMIKLPQYSSLEIMLEKLRCAIHYREDPLSG

SEQ ID NO: 41840 - DNA, 15336 bp, Artificial Sequence
  derived and/or modified sequence
gcggccgctgactcggcgcagtggctctcggtgaaggaagagaccatcttcctgcacgacgggctgatccgggtcaccgacctggccgagctgcccagcgagatcctcggggccccagaggccgcggacaccgacctggagattttaacctttgagaccaagaacccgtcggaattagcagaacgtttgcgctctgtttgtgggaatcagagcaatgcctatgcccggctgctggaataccgcctgaatgccttgcgaggactgtggaatgcccagcgccagctggccttagaagaacagcatgaaagggaaagttcaggtgatgaggaaactttggccctgctcaaacgccagggcttgttgcagcaacctgagcaagcgcccttcacatcgaggatggggctcctgctggtcttcccccttattcagtcccagagtagaacagacccctctctctgtaacataactgctgaggtgctattgaactgccttcgtgactgccagcctttgagcttgaccaaggagcctgctgactgtctcaatggaattgaaactttgctgtgctcttggctagaggagacttctgacacaggccgacacatcccacataagcaaaaagaaaatgctgctgctgccctggtggctttggcttgtgccaggggatcattgaaaactttcgtccacacagtccatctattacagaaacagacggatctagggtccctgcctgtagctgatgtgctatataggctgttgcttttggaaggggggcctggatctccctcctgtttgcttgggggcaaacacatagtatcatggggttatgaagacatgttgcctgcgccggatagcaacactggctccagttctgaaaataaagatgctgacttgggacgctgtctcacggcagatggtctttacctgtatactactaactcagttggaagaggagtaagcaaattgggatctggattacatggtactctcagaggttttgtgtactgccggaacgaggagttggaaccaggatgggtggcttttggcagcggcagtcttctccaccggcctgtctctttcgataataaacctcactcccttttccaggtcattgaccagaacacccttcaggtgtgccaggtggtgccaatgccagccaatcacctccccattggcagcaccatgagcactgtgcacctgtcttcagatggcacttacttctattggatctggtctcctgccagcctgaatgagaaaacaccgaagggacattctgtcttcatggacatttttgaacttgtggttgaaaatggtgtatttgtagccaacccacttcaggaacgtacaattctaatgagaaaagagggcgaatctgccaaaagcattaatgagatgcttctaagtagactttctcggtatagagcctccccgtcagcaacgcttgctgccctgactggttccaccatctccaacacactgaaagaggatcaagcagcaaatactagctgtgggctgcctctaaaaatgctgcggaagacacccatatatacctgtggcacctacttggtgatgctggtgcctcctccagggggatcaggcagctctgccacccgatctctttttggtggaacaagtggtttgtcatctttaaaaagagcgtgttatgacacagtgaacaacatgctatggacatgctcaaatgactatatcgatcagtggtgtaaccctgggaatcaagccttccattatgtctgccagagacttggagtcagtcacattatcactgagcccaaagaagaggctataaccacgaatgaggttataaaccaattattgcaccacgttggtgcgatgtgcatacaccaactcaatcttcttgccaccaaccccaatcttccaatcacaagtgtcttgggcaagcagcatccaattgaagcacatcatcttagcagtatttgtgacattatggagaaggccatggttaatggagatacctgtattatacgctgcattctcgttgtctttcaggtggtatttaaatttttcttcagcccacaaactgaaaggaatcgagacatcattcgacggtcgggattgcttctttggcagttgttgatggctccaaaagatcaaatttgccctgaaattcagaaggaagtctgccttgccatcagctctggtttaaatatcttgtacccaggtgaaactgaaatcaataacttacttaaactggtcttaacagaaggagagagaaacagtggactctcccagctacgggatgtgatcctaaccaacctggctgaacagctccaaaacaaccgatttggcagtgatgaggatgatcattacagactaaatgatgaacttttacactacattctgaagattgttgtacgagaatcctgtatcttaatcaccaagtgccaaactgtctctaaagatgattttcaaaagctcctttcaactgtgcctgctgcatcctcctgcctgcgctatctgatggcagttcagaatcaccttctcagtaacactattttgattaaacctgatgagaatgatgacagtgacagctccttgcagggagagacattgaaggtacaggagctaaaagtcagtattttggctcttgccacccaaatcctgactggatgtgatgaagtgttggaaatgctacagcaggtcacaactgccctcataaatagtgacatagcagaccgtgagcagaggttaaaaggcttggaacaagttactaaggctactatgcttggtcaccttcttccagtgttactgacctccttgatgcatccaaatttacagactctgatcatggcggatgccctgatgcctcagctagtgcagctggtactctataccagccagacggcgttgctgcttaaaacccagtgtccggtttttgctgaggtgggctgttccccgtgtggtgcaccagaccagaagtgcaggctgttccctgatgagagaatgttagaagagaaggaagagccaggatttctcactggtttaaagattcctgccccatgggctgctggaaagactgtggaaacagtccaccccgtcagagacaactataaatttaaagaaacggtccatatcccaggagctcgctgcctgtaccttagatttgatagcagatgctcttcgcaatatgactatgacaaattggtgatatatgcggggcctaacacaaacagtaggaaggttgctgaatatggaggcaacacactgggatatggcagccgtagtgtcttaggaactggttggccgaaagacttggtgaagtgcatttcccccccttccttaaattttaaggtggaaggagatacagtcaccttctcctttgaaatgagaagtggccgtgaacacaacactcctgataaagccatgtggggctttgcttgcacagttcgcgctcaggagtcttcggaggatgtctcaggaggcttgccctttctggtagacctggctttaggtctgtctgtgttagcttgttccatgttaagaatcctgtacaatggaccagaaattaccaaagaagaagaagcctgtcaggagctattgcggtccaaacttttacaaaggtgccagtggcaggtggaggccaatggcgtgatctcccctgcccttactccgagcccctctccactgcctctgaccatagaggaagacagagaattcacctacccctctgatgtcctcgtgcctcctgttggaaactactttgatctgcctcggatcagactgcctccaggaatcatgataaagctcagggaaatttctgggcgtgctagacctcaatttagaccaagtataaaagaagtgattcagccagacgtgatggaggaaatggtggtatcttgtgttattaagcacttgaacttggttgatgcactgcagtctctaataaatttccaatatcaagaagaacatgctgaagaatatgatttattatgtaaaattatgggagagacctttaagaaactcaatgccatggagagacagctgcagagtgttgcagaactggaacaaaaatggcaaagtgaagttgatgatgccatgcaggggaaactggagaacaacatgcctttcttttatgattaccattttaatgagaacaaaatgaaagaactagaacttttatgttcaatgaaggaagtctcctttgatgggaatgatcttgaaaacatggtcctatcactgagggagaagttcctacaagaagtgaattctcttattcagaaaccctcacacccactggctaaaacaaagacgttagtgaagagtttaatgaaccgagccgagctgttgctgcatgtcaccatcgcagcccagtcgggcctcacgagaagcatctctgggacccctgctgaaacaccagcttgtaaatcagcttctgaaacaaaagtgatatctcacgctgtcaggcagcctgtttttcttcgcagcatgtcagctccttctgacctggaaatgattggtaatgaagatttggaatttactagagcaaatcagaggcgtcgccacgtgaccagccaccgcagcagctcctttacactcctgcagtcgctggccattgaggacagcagggacaagcccacctacagtgtcctgctagggcagctgtttgctttcatcggcaccaaccctgaccaagctgtgtccagcagcagtttccttttggctgcacagacaaggtggcggcggggaaacactcgcaagcaggcactggtgcacatgcgggaattgctgacagctgccgtacgagtcgggggagtgacgcatcttgtgggtccagtgacgatggtccttcagggaggacccagaattgaagaactcacatgtggtgggatggtcgagcaggtccaggaagcctttggcgagaccatgacctctgttgtgtctctgtgtgctcgttaccctatcgcttgcgcaaatagcattggactcttatgtaccataccttacaccaggagcgaagagaagtgcctggtacgcagtggccttgtgcagctcatggatcgactgtgtagcttgagcaatcagaccgagtccagctccagtgagaaacagaccaagaagcagaaggtggccaccatggcctgggctgccttccaggtgcttgccaaccgctgtgttgagtgggaaaaagaggaaggtggctccacagaggctgtgcactcaggtctggcccggcaggtgtccagccttctcactaaccatcttgcccgagccacagagtgctgtggcaaccaggctgctgggaatgacgcgctccaggatgtccttagtcttctcaatgatctctcaaggagccacataggtaaagccatcctgagccagccagcttgtgtgtccaaactcctctccctgctgcttgaccaacgcccgtctccaaagctagtccttattattctccagctgtgccgggcggcgctgcccctgatgagcgtagaagactgtggaaacgtggagctcccaccctggagctactctgtcccctccttaaacagtgagcaggaggatcccagcgacccagcttccaagatcgcctccctgctcttagcaaagctggcagattatgtggttccaggatgtcagacagttctttctccaaccgcttctgaacctgacaccacattgacaaaaaccagtcccaagaattccttgaaaggagataaagatcctggagaagagagtgaggctgtggatggcaagctctcgatatttatccacaagcgggaagaccagtcatcccatgaagtcctccagccattgctaagtagttcagaaggacggcccttccgacttggtactggcgccaacatggagaaagttgtgaagatggatcgagacatgaccaagggtggctgttgcgaagtgattacagaagaggctgcagccgccctgcggaaagccaccaagtgggcacagtcaggcctcatcgtcagcattgggccacctgtagagtctatcaacccagagactgtgagtggactatccacaggcgacaaaaagaaaactgcccaaacttccatttgccgagagaggaactcggagcttgcaaggactgatcctgtgcgtcccttcatcagtgggcatgtggcaaacagcatggctgcagaagtgatcgccttgctacatagcttgctcatggcacctgaatcaaatgctgctcaaatatggaccacaacagcagagaaggttctgtctagagcactgatgtacattccacaattggggaaatacgcagaaagcattctggaaaatggcagcagcagtggcaggaaacttgccaaacttcagagaattgcacgccaggccgttgccgcactgtgtgcacttggaggcttcaaagagacaatcaagataggatccgaggttcaggttttaggtagaggaatttcaggaagcattggagtagtggcttctatcaatgaacaggaaggtatagctacagtcagattcccacccatagactgtagaaagacttcgcaagcgtcagacacattgactattccattgtctagactttgtgttccaagatcagaggcattgcctcttcataaactgtccattactgagaaggtagtacaggcagtccagtccatgttgcttcctcaggagggaagtctctctattcacacctcacttcctgcaacaggagatgggtcagctcctgtgatggcagtcgttcggctccttgctgaaataaggacaagagcatgcctggtcatggcccagcttttagaagacagcttattttgtgaagaattcatacaacaatgtccagcagctgttgaagttcttaacctagtagcccaggaatgtagtgctggagagcgacttgcagttgtggaggtacagtgtgaacggctgaggatgctctaccgggactgtgctcggcccccaccacctcctttgcaggctgaccgaagacagcccaaagagattacttggagcccctcgcgagtgtttccgcctgttcgagcctgcatgttctcatctcaccttacctcagtcaccttcctggctgaccccagcgctgggggaggcctgccccggggcacttttatctatgccacttcaccactgccagttcaggccccgtctttttactgggaaattgaaatcgtttcctatggagacaccgatgatgacaccggacccatagtttcctttggcttcactacagaagcagagaagcgagatggggcttggactaatccagtgggcacttgtcttttccataacaacggccgagccgtgcactataatggctccagtttgttacagtggaagagcgttcgcttagacgtgactctctcccccggtgacgtggcaggaattggctgggagagaactgaggggactccacctcctccgggacagccagccaagggccgggtgtacttcacatactgcgggcagcgcctctcaccatatcttgaagacgtctctggtggcatgtggccagtggttcacattcagaaaaagaacaccaaaacccgagctaactttggctcccggccgtttgcctacgcggaagggcaggcccaccgcaatgctgctgacctgtgcactgacctagcagaagagatcagcgctaactttgaggccctgcctttcgccatggcatctgacagtgacaatgatgctggcaccagtattgcatcagacccaggcactcatgggccaccatgccggattgctgccgtggccaccgctcagcaacaatatgatagtgacacctcctgtcattataaagtcgagctcagctatgagaatttcatcacctctggcccagaccctcacccgcctcccattgcagatgatgaaagcgatgatgatgacgatgatgacatccctcaggaggaccactacgccctgctggtgaaagcatgggagaccaaggtttttcctaccatccgaagacgcttccgcaatgaagcagagcggaaatcgggcctggaccagataaagggggccttacaactaggtatggtggatattgcccgacagacggttgaatttctctacgaagagaatggtggcatcccaagagacctttatcttcccaccattgaagacattaaagacgaagcaaacaagttcacaattgataaagttcgaaaaggtctcacagtagtaacccgctctccagacagcaataatgtagccagcagtgctgttggaactgctctgccaaaatttgccatccgagggatgctgaaaacctttgggcttcatggagtcgtcttagatgttgattcagtgaatgaactggtgcaggtagaaacgtacctccgcagtgaaggtgtgctggtgcgatactggtatcctattgacatgttggaaaggcccccagcaggctaccgaaggactgccaccaatgggctggtcacactggacaataccaaccttcaaattcacagggagctgctgcgctgcgaggctgcgctggccaggctgtactgccgcatggccctgctcaatatcttcgccccgaagttgcctcacttgttcactcgcctcttccacatccctgccatccgggacattaccctggagcacctgcaactgctgtccaatcagctcctcgcacctcctctcccagacggcaccatcagctccagctcgatcctcctggcgcagtctttacagcattgcatccattcccagaactgctccgccacggacctcttttaccagggcaactcccagacagtgagagagtggctcaacgtggccatcacccggaccctgcaccagggcgaggagagccttttagagctgacgaaacagatctgctctttcctgcagacagcaccagagcagttcccctccgaagagttcccaatttccgaatccaaagtcaacatggacgtgaatttccccggggcagcttttgttgttgtgtcttgtaaagaaagtcaatctggattccgcaaagactcctctctgtacaaggcaccgtgggcacgggtgctcgtatatggcctcggccacaaagtgaagcgaaatggccagctgaacctcatcgaggccgcctgttacccgcgggacgcgtccccagccaacactgggcttgcacctccccccaccgctgaccagtacccctctgtggtcctctccacagacagggtccacatcaaactgggggtgtctccacctcctggagcagtcctggtgttacattccctgcccctggagttcccactggctatggccttcgcagagcagctgctgtcctggaaatcagaggacagtgaagggaagtccgaagatgagcctgacaccattccgacatccgtcctcctgcaggtggtggagctgctaggaaacttcttgtggaccacggacatggcagcctgcgtgaaggagcttgttttccatctcctggcagagctcctgcgcacggtgcacaccctggagcagaggcggcaccccgctggcctgtcctcctcaatcgccctccagctgaacccctgcctggccatgctgatggccttgcagtcggagctccacaagctgtacgacgaggagacgcagaactgggtctcaggcggcgcctgcgggggctccgggggggcggcggccggtgaccagggcaggttctctacgtattttcatgcactcatggaagggtgcctggctgtggccgaagtgaccctgcctactaacatgagtgtcacagccagtggggtgacctcagcgaccgccccaaatctcagtgactcgtcctcctcctcctcgtcctccccaggacagaccccacagagtcccagcctcctctccaagaggaaaaaagtcaagatgaagcgggaaaaggcctcctcgtcgggcaagcgccagtcttcccgcaccgtggactcggaccccaccgtgctcagcatcggaggcagcaagcccgaggacatgctgtggttccaccgcgcactcaccctgctcatcatcctccgccacctcaccaggaaggacccacaggggctgggcgtgacgagtgacgccatcgccgatgcctgccaggccctggtgggccccaccgcccacagccgcttgctggtgatctccgggatccccacccacctggacgagggcgtagtcagaggcgccatccgcaaggcctgcaacgcccacggcggggtcttcaaagacgagatctacatcccgctgcaggaagaagacaccaagaagccaaaagacaaggccgagggcggggacgggaaagttgagcccgagaagacactggccttccccggcacagacagcatggaggtcagcacgtccagcagcctgacccccgccatgagcatcagcgcctccgcctccaccagccaggcctccatctgcagctcgcagggcatctcccaaaccgtcagcgacctctctgtggatccgctgcctgccggcctcgagctgcccatccctccgggcctgttggagccccacgcggtgtccagccaggaaagcctggacatttccctgtgcagcaccggcagcctgggcagcctgggcagcctgggggagcccctggacaatgcagagacggcctcggtgtcggacatgggctccatgtacacagtcacttccctggacaaccagcccctcgccgcccgccccatcaaaggcttcgcagtcgtggagataagatcccgagccaaaattgagaaaattcgagcaagtttatttaacaataatgacttgattggtttgtcaagtttggatggtgaagatgaattgatggaaatgtcaacagaagagattctaaccgtgtctgtagtaaatcagagtctctttgatactcaagggagcccagggttagaagattatttcaatgataagtcaattaaaggggagaagctggtgcccggagccagagaggttctgacggagatatttaagagttgtgcccattcagagcagacgctgagcctgacaccagcgaagcccatcagagtctctgacatttatcttagcaaagagcagatcaactcccagaccccaggcaacctcctccacctcttcttcaccaatgtccggccgccaaaaaaggtgctggaggatcagctcacccagatcctgaggaagtatggcgtgccaaagcccaagtttgacaagagcaagtacagcaaggccgggaaggagcagcaccccgtgaaggtggtgagcaccaagcggcctatcaccaagccgcccgccaaggacaaggctgtgctcaacagcgtcagcaggactgccttaagtgagaagaagccaactgtgaagccaaaatcaccagaaaagagcaaaccagatgaaaaggacccagaaaagtcacctaccaaaaaacaagaagtccctgaggaaaaatacctgacgctggaaggatttcacaaatttgttattgaccgagccaggcaagatatccgtagcgtctggagggcgatcttgtcctgtggttacgatcttcactttgagaggtgcgcatgcatcgatgtccgacatgcacagaaggcctcaagaaagtggaccctggagatggacgtggcacttgtgcagtacatcaaccagctatgccgccacctcgccatcacacccgcacggctccatccccatgaggtgtacctggaccccgcggatgctgctgaccccagagtggcctgtctcctgaacgtgcccatcgagagcctgcgcctgcgcttcgccttgctgcagtccctcaacaccacactggagaccttcttcctgcccctggtggagctgcgccagacacccatgtatacccacagcatcgccgccctgctgaaggaggccaaagggctgatcttctatgacacgaaggtgaccgtgatgaatcgagtgctgaatgccactgtgcagaggacagcggaccacgcggcccctgagatcaccttggacccactggaaattgtgggaggggaaatcagagcttctgaaaactcctacttctgtcaggctgccaggcagctggcctcagtgccgtcgtctcagctctgcgtcaagctggccagtggcggtgaccccacatatgccttcaacatccgcttcactggcgaggaggtccatggcaccagcggctctttccgccacttcctgtggcaggtgtgtaaggagctgcagagttcctcgctgtcgctgctgctgctgtgccccagctcagctgtcaataagaacaagggcaagtatatcctgaccccgagccccatcacctacggggaggagcagctgctgcacttcctggggcagctgctggggattgcaattcgggcagacgtcccgctgcccctggacctcctgccctccttctggaagacgctggtgggcgagcccttggaccctgagcaagacctgcaggaagcggatatcctcacctacaattacgtcaagaagtttgagagcatcaatgatgagaccgagctggaggccctgtgcgctgagatcgcctcccagcacctggccacggagagccctgacagccccaacaagccctgctgcaggttcacctacctgaccatgacgggcgaggaggtggagctgtgcagccggggccggcacatccttgtggcgtgggagaacaaggacatctacgcggcagccatccggagcctgcggctgcgggagctgcagaatgtggagtgcgtgacggccgtgcgggccggcctgggctccatcatccccctgcagctgctgaccatgctcagcccactggagatggagctgcgcacctgcggcctcccctacatcaacctcgagttcctcaaggcccacaccatgtaccaagtggggctgatggagacggaccagcacatcgagttcttctggggggccctggagatgttcacccaggaggagctgtgcaagttcatcaagtttgcctgcaaccaggagcgcatcccgttcacctgcccctgcaaagatgggggtcccgacactgcccatgtgcccccgtaccccatgaagatcgcccccccagatggcacagcaggttccccagactctcgctacatccgcgtggagacctgcatgttcatgatcaagcttccccagtactcctctctggaaatcatgctggagaaacttcgttgtgccattcactaccgtgaagaccccctcagtggctgatgggagggagccccagaattaggctgtcactgaggcacccactctgctggcttgggaagccaccactgcggcccgtccctccagggccctgcgtgaggagttggcaacattttgcttttccaaactttcgtccacattccagggcctcctggaagacttaaccttttgtctttgtacgtttcgtgatgggttggttcttttgctgcctgtttgtggtctatttgtaggatagtttagttcccagacagtttgtgtctaatttgatcttcttggacattgtccctcatggccaccagattctaatgccataaggccccagctggttccccatcacagaaccacccagcaggaagccgggggtacaatgacctcggccacacagagcgctcgtgctttcagcagagcgcctccacagacaagcctgtggccagccctgccctccagcctcgagctggagttgctccagaggcagccccagcaggcctccctccacatagaggtggctgggccaattgcccaaacacgtgagacacacagggagctttatgtgttcatcttcctgctttagaacttgctcccggtcttggtttttctgaggaaaagcccacagtggttcccctgcccctcccatacctccctatctgccgtctgtctctttgggccctggtctgacagttttcatctgaggcctcctcgggagcaggagacttaagggttcatcccgaccttagttcacagagcctagctgggtgcatcccagccgcagggggtgagaagacacccagagatgggggacaatgctcaggtgggggcctcctccgagactctggttgagaggaaagcacatgattcaagcctaccccacaaaaaaggagcacaaaatgctcagaaatggcccttcctccctgcagtgacgtaggacaagggaaagggccacacccattttcaaaagagtggactgaggtgctctgctcaatttggggtctgctttagtgacccagacactcaagtccagatggagactccaggggggtccttctgcccctctggccagccccacccagcactccccatcaccccatgtaagtgtgtatgccagggctgagctgcctccaggctcacccactgcatctttgccccaaataggtctttgtccagtggtactttgttcatgagcagcacaggccatcttgttggacactgtcactttgggccttgccaggtctcacagaatcacatcgctgtatttattgtataatattgtgaatattggaagttttgagtgagtgctgtctagaaggttttggagtgtggatgctggtccaagaaagaagatgtgccctggcctgctggaaagattgtgaattctagagatagagccgttagcatccatctcctccctgtaactcttaggaaatgcatcaaggaccattatagaaaggatcccctgacctaaggatgaaatcgacctagggttaatcatgacagctgcatcagttgtattggatgcaagtcaactctggaggtgagtgcccgcaagcagttcccctgctttgaaagaagatggtcagcccgctgcctccccagcggccacagctcctttgagtgtggggggtcacagccaggatgtattcctgacaataaggatccttttattttcatttctgcataatgaaagagcctttcgatttattagaagtggtttttcctccctacatctttaaattcttggttctctttagtcctcatcccttgaatggacttgtcagctacctccccaggaggagttcagaagcttctgttggccatcacttgagtagatgacaagctgtaaggtatctgctgctaacgtggctgcttctccgagagcacattgaggtccagacagatccaaaccttggccctaaaaaatgtgtgctgtaaagttacttgatgtatatttattataattatttatggttgcatttaacaaacttttcattcaatctgatgctatttacaccatgctgtgtaaaggaagctcactaaaggaaaaaagtcacaccaataaataaccttcatctaattttgatttaccttaagagttgtgtgatcatctactcttgctgagcaagttcaaaggctggcatgcttggatggctctgatatttaagtgctgccaagtggctaggaattaaagtgtttctaattattatggtc

SEQ ID NO: 41841 - DNA, 12741 bp, Artificial Sequence
  derived and/or modified sequence
atgggcctgctgctggtgttccccctgatccagagccagagcagaaccgaccccagcctgtgcaacatcaccgccgaggtgctgctgaactgcctgagagactgccagcccctgagcctgaccaaggagcccgccgactgcctgaacggcatcgagaccctgctgtgcagctggctggaggagaccagcgacaccggcagacacatcccccacaagcagaaggagaacgccgccgccgccctggtggccctggcctgcgccagaggcagcctgaagaccttcgtgcacaccgtgcacctgctgcagaagcagaccgacctgggcagcctgcccgtggccgacgtgctgtacagactgctgctgctggagggcggccccggcagccccagctgcctgctgggcggcaagcacatcgtgagctggggctacgaggacatgctgcccgcccccgacagcaacaccggcagcagcagcgagaacaaggacgccgacctgggcagatgcctgaccgccgacggcctgtacctgtacaccaccaacagcgtgggcagaggcgtgagcaagctgggcagcggcctgcacggcaccctgagaggcttcgtgtactgcagaaacgaggagctggagcccggctgggtggccttcggcagcggcagcctgctgcacagacccgtgagcttcgacaacaagccccacagcctgttccaggtgatcgaccagaacaccctgcaggtgtgccaggtggtgcccatgcccgccaaccacctgcccatcggcagcaccatgagcaccgtgcacctgagcagcgacggcacctacttctactggatctggagccccgccagcctgaacgagaagacccccaagggccacagcgtgttcatggacatcttcgagctggtggtggagaacggcgtgttcgtggccaaccccctgcaggagagaaccatcctgatgagaaaggagggcgagagcgccaagagcatcaacgagatgctgctgagcagactgagcagatacagagccagccccagcgccaccctggccgccctgaccggcagcaccatcagcaacaccctgaaggaggaccaggccgccaacaccagctgcggcctgcccctgaagatgctgagaaagacccccatctacacctgcggcacctacctggtgatgctggtgcccccccccggcggcagcggcagcagcgccaccagaagcctgttcggcggcaccagcggcctgagcagcctgaagagagcctgctacgacaccgtgaacaacatgctgtggacctgcagcaacgactacatcgaccagtggtgcaaccccggcaaccaggccttccactacgtgtgccagagactgggcgtgagccacatcatcaccgagcccaaggaggaggccatcaccaccaacgaggtgatcaaccagctgctgcaccacgtgggcgccatgtgcatccaccagctgaacctgctggccaccaaccccaacctgcccatcaccagcgtgctgggcaagcagcaccccatcgaggcccaccacctgagcagcatctgcgacatcatggagaaggccatggtgaacggcgacacctgcatcatcagatgcatcctggtggtgttccaggtggtgttcaagttcttcttcagcccccagaccgagagaaacagagacatcatcagaagaagcggcctgctgctgtggcagctgctgatggcccccaaggaccagatctgccccgagatccagaaggaggtgtgcctggccatcagcagcggcctgaacatcctgtaccccggcgagaccgagatcaacaacctgctgaagctggtgctgaccgagggcgagagaaacagcggcctgagccagctgagagacgtgatcctgaccaacctggccgagcagctgcagaacaacagattcggcagcgacgaggacgaccactacagactgaacgacgagctgctgcactacatcctgaagatcgtggtgagagagagctgcatcctgatcaccaagtgccagaccgtgagcaaggacgacttccagaagctgctgagcaccgtgcccgccgccagcagctgcctgagatacctgatggccgtgcagaaccacctgctgagcaacaccatcctgatcaagcccgacgagaacgacgacagcgacagcagcctgcagggcgagaccctgaaggtgcaggagctgaaggtgagcatcctggccctggccacccagatcctgaccggctgcgacgaggtgctggagatgctgcagcaggtgaccaccgccctgatcaacagcgacatcgccgacagagagcagagactgaagggcctggagcaggtgaccaaggccaccatgctgggccacctgctgcccgtgctgctgaccagcctgatgcaccccaacctgcagaccctgatcatggccgacgccctgatgccccagctggtgcagctggtgctgtacaccagccagaccgccctgctgctgaagacccagtgccccgtgttcgccgaggtgggctgcagcccctgcggcgcccccgaccagaagtgcagactgttccccgacgagagaatgctggaggagaaggaggagcccggcttcctgaccggcctgaagatccccgccccctgggccgccggcaagaccgtggagaccgtgcaccccgtgagagacaactacaagttcaaggagaccgtgcacatccccggcgccagatgcctgtacctgagattcgacagcagatgcagcagccagtacgactacgacaagctggtgatctacgccggccccaacaccaacagcagaaaggtggccgagtacggcggcaacaccctgggctacggcagcagaagcgtgctgggcaccggctggcccaaggacctggtgaagtgcatcagcccccccagcctgaacttcaaggtggagggcgacaccgtgaccttcagcttcgagatgagaagcggcagagagcacaacacccccgacaaggccatgtggggcttcgcctgcaccgtgagagcccaggagagcagcgaggacgtgagcggcggcctgcccttcctggtggacctggccctgggcctgagcgtgctggcctgcagcatgctgagaatcctgtacaacggccccgagatcaccaaggaggaggaggcctgccaggagctgctgagaagcaagctgctgcagagatgccagtggcaggtggaggccaacggcgtgatcagccccgccctgacccccagccccagccccctgcccctgaccatcgaggaggacagagagttcacctaccccagcgacgtgctggtgccccccgtgggcaactacttcgacctgcccagaatcagactgccccccggcatcatgatcaagctgagagagatcagcggcagagccagaccccagttcagacccagcatcaaggaggtgatccagcccgacgtgatggaggagatggtggtgagctgcgtgatcaagcacctgaacctggtggacgccctgcagagcctgatcaacttccagtaccaggaggagcacgccgaggagtacgacctgctgtgcaagatcatgggcgagaccttcaagaagctgaacgccatggagagacagctgcagagcgtggccgagctggagcagaagtggcagagcgaggtggacgacgccatgcagggcaagctggagaacaacatgcccttcttctacgactaccacttcaacgagaacaagatgaaggagctggagctgctgtgcagcatgaaggaggtgagcttcgacggcaacgacctggagaacatggtgctgagcctgagagagaagttcctgcaggaggtgaacagcctgatccagaagcccagccaccccctggccaagaccaagaccctggtgaagagcctgatgaacagagccgagctgctgctgcacgtgaccatcgccgcccagagcggcctgaccagaagcatcagcggcacccccgccgagacccccgcctgcaagagcgccagcgagaccaaggtgatcagccacgccgtgagacagcccgtgttcctgagaagcatgagcgcccccagcgacctggagatgatcggcaacgaggacctggagttcaccagagccaaccagagaagaagacacgtgaccagccacagaagcagcagcttcaccctgctgcagagcctggccatcgaggacagcagagacaagcccacctacagcgtgctgctgggccagctgttcgccttcatcggcaccaaccccgaccaggccgtgagcagcagcagcttcctgctggccgcccagaccagatggagaagaggcaacaccagaaagcaggccctggtgcacatgagagagctgctgaccgccgccgtgagagtgggcggcgtgacccacctggtgggccccgtgaccatggtgctgcagggcggccccagaatcgaggagctgacctgcggcggcatggtggagcaggtgcaggaggccttcggcgagaccatgaccagcgtggtgagcctgtgcgccagataccccatcgcctgcgccaacagcatcggcctgctgtgcaccatcccctacaccagaagcgaggagaagtgcctggtgagaagcggcctggtgcagctgatggacagactgtgcagcctgagcaaccagaccgagagcagcagcagcgagaagcagaccaagaagcagaaggtggccaccatggcctgggccgccttccaggtgctggccaacagatgcgtggagtgggagaaggaggagggcggcagcaccgaggccgtgcacagcggcctggccagacaggtgagcagcctgctgaccaaccacctggccagagccaccgagtgctgcggcaaccaggccgccggcaacgacgccctgcaggacgtgctgagcctgctgaacgacctgagcagaagccacatcggcaaggccatcctgagccagcccgcctgcgtgagcaagctgctgagcctgctgctggaccagagacccagccccaagctggtgctgatcatcctgcagctgtgcagagccgccctgcccctgatgagcgtggaggactgcggcaacgtggagctgcccccctggagctacagcgtgcccagcctgaacagcgagcaggaggaccccagcgaccccgccagcaagatcgccagcctgctgctggccaagctggccgactacgtggtgcccggctgccagaccgtgctgagccccaccgccagcgagcccgacaccaccctgaccaagaccagccccaagaacagcctgaagggcgacaaggaccccggcgaggagagcgaggccgtggacggcaagctgagcatcttcatccacaagagagaggaccagagcagccacgaggtgctgcagcccctgctgagcagcagcgagggcagacccttcagactgggcaccggcgccaacatggagaaggtggtgaagatggacagagacatgaccaagggcggctgctgcgaggtgatcaccgaggaggccgccgccgccctgagaaaggccaccaagtgggcccagagcggcctgatcgtgagcatcggcccccccgtggagagcatcaaccccgagaccgtgagcggcctgagcaccggcgacaagaagaagaccgcccagaccagcatctgcagagagagaaacagcgagctggccagaaccgaccccgtgagacccttcatcagcggccacgtggccaacagcatggccgccgaggtgatcgccctgctgcacagcctgctgatggcccccgagagcaacgccgcccagatctggaccaccaccgccgagaaggtgctgagcagagccctgatgtacatcccccagctgggcaagtacgccgagagcatcctggagaacggcagcagcagcggcagaaagctggccaagctgcagagaatcgccagacaggccgtggccgccctgtgcgccctgggcggcttcaaggagaccatcaagatcggcagcgaggtgcaggtgctgggcagaggcatcagcggcagcatcggcgtggtggccagcatcaacgagcaggagggcatcgccaccgtgagattcccccccatcgactgcagaaagaccagccaggccagcgacaccctgaccatccccctgagcagactgtgcgtgcccagaagcgaggccctgcccctgcacaagctgagcatcaccgagaaggtggtgcaggccgtgcagagcatgctgctgccccaggagggcagcctgagcatccacaccagcctgcccgccaccggcgacggcagcgcccccgtgatggccgtggtgagactgctggccgagatcagaaccagagcctgcctggtgatggcccagctgctggaggacagcctgttctgcgaggagttcatccagcagtgccccgccgccgtggaggtgctgaacctggtggcccaggagtgcagcgccggcgagagactggccgtggtggaggtgcagtgcgagagactgagaatgctgtacagagactgcgccagacccccccccccccccctgcaggccgacagaagacagcccaaggagatcacctggagccccagcagagtgttcccccccgtgagagcctgcatgttcagcagccacctgaccagcgtgaccttcctggccgaccccagcgccggcggcggcctgcccagaggcaccttcatctacgccaccagccccctgcccgtgcaggcccccagcttctactgggagatcgagatcgtgagctacggcgacaccgacgacgacaccggccccatcgtgagcttcggcttcaccaccgaggccgagaagagagacggcgcctggaccaaccccgtgggcacctgcctgttccacaacaacggcagagccgtgcactacaacggcagcagcctgctgcagtggaagagcgtgagactggacgtgaccctgagccccggcgacgtggccggcatcggctgggagagaaccgagggcaccccccccccccccggccagcccgccaagggcagagtgtacttcacctactgcggccagagactgagcccctacctggaggacgtgagcggcggcatgtggcccgtggtgcacatccagaagaagaacaccaagaccagagccaacttcggcagcagacccttcgcctacgccgagggccaggcccacagaaacgccgccgacctgtgcaccgacctggccgaggagatcagcgccaacttcgaggccctgcccttcgccatggccagcgacagcgacaacgacgccggcaccagcatcgccagcgaccccggcacccacggccccccctgcagaatcgccgccgtggccaccgcccagcagcagtacgacagcgacaccagctgccactacaaggtggagctgagctacgagaacttcatcaccagcggccccgacccccaccccccccccatcgccgacgacgagagcgacgacgacgacgacgacgacatcccccaggaggaccactacgccctgctggtgaaggcctgggagaccaaggtgttccccaccatcagaagaagattcagaaacgaggccgagagaaagagcggcctggaccagatcaagggcgccctgcagctgggcatggtggacatcgccagacagaccgtggagttcctgtacgaggagaacggcggcatccccagagacctgtacctgcccaccatcgaggacatcaaggacgaggccaacaagttcaccatcgacaaggtgagaaagggcctgaccgtggtgaccagaagccccgacagcaacaacgtggccagcagcgccgtgggcaccgccctgcccaagttcgccatcagaggcatgctgaagaccttcggcctgcacggcgtggtgctggacgtggacagcgtgaacgagctggtgcaggtggagacctacctgagaagcgagggcgtgctggtgagatactggtaccccatcgacatgctggagagaccccccgccggctacagaagaaccgccaccaacggcctggtgaccctggacaacaccaacctgcagatccacagagagctgctgagatgcgaggccgccctggccagactgtactgcagaatggccctgctgaacatcttcgcccccaagctgccccacctgttcaccagactgttccacatccccgccatcagagacatcaccctggagcacctgcagctgctgagcaaccagctgctggccccccccctgcccgacggcaccatcagcagcagcagcatcctgctggcccagagcctgcagcactgcatccacagccagaactgcagcgccaccgacctgttctaccagggcaacagccagaccgtgagagagtggctgaacgtggccatcaccagaaccctgcaccagggcgaggagagcctgctggagctgaccaagcagatctgcagcttcctgcagaccgcccccgagcagttccccagcgaggagttccccatcagcgagagcaaggtgaacatggacgtgaacttccccggcgccgccttcgtggtggtgagctgcaaggagagccagagcggcttcagaaaggacagcagcctgtacaaggccccctgggccagagtgctggtgtacggcctgggccacaaggtgaagagaaacggccagctgaacctgatcgaggccgcctgctaccccagagacgccagccccgccaacaccggcctggcccccccccccaccgccgaccagtaccccagcgtggtgctgagcaccgacagagtgcacatcaagctgggcgtgagccccccccccggcgccgtgctggtgctgcacagcctgcccctggagttccccctggccatggccttcgccgagcagctgctgagctggaagagcgaggacagcgagggcaagagcgaggacgagcccgacaccatccccaccagcgtgctgctgcaggtggtggagctgctgggcaacttcctgtggaccaccgacatggccgcctgcgtgaaggagctggtgttccacctgctggccgagctgctgagaaccgtgcacaccctggagcagagaagacaccccgccggcctgagcagcagcatcgccctgcagctgaacccctgcctggccatgctgatggccctgcagagcgagctgcacaagctgtacgacgaggagacccagaactgggtgagcggcggcgcctgcggcggcagcggcggcgccgccgccggcgaccagggcagattcagcacctacttccacgccctgatggagggctgcctggccgtggccgaggtgaccctgcccaccaacatgagcgtgaccgccagcggcgtgaccagcgccaccgcccccaacctgagcgacagcagcagcagcagcagcagcagccccggccagaccccccagagccccagcctgctgagcaagagaaagaaggtgaagatgaagagagagaaggccagcagcagcggcaagagacagagcagcagaaccgtggacagcgaccccaccgtgctgagcatcggcggcagcaagcccgaggacatgctgtggttccacagagccctgaccctgctgatcatcctgagacacctgaccagaaaggacccccagggcctgggcgtgaccagcgacgccatcgccgacgcctgccaggccctggtgggccccaccgcccacagcagactgctggtgatcagcggcatccccacccacctggacgagggcgtggtgagaggcgccatcagaaaggcctgcaacgcccacggcggcgtgttcaaggacgagatctacatccccctgcaggaggaggacaccaagaagcccaaggacaaggccgagggcggcgacggcaaggtggagcccgagaagaccctggccttccccggcaccgacagcatggaggtgagcaccagcagcagcctgacccccgccatgagcatcagcgccagcgccagcaccagccaggccagcatctgcagcagccagggcatcagccagaccgtgagcgacctgagcgtggaccccctgcccgccggcctggagctgcccatcccccccggcctgctggagccccacgccgtgagcagccaggagagcctggacatcagcctgtgcagcaccggcagcctgggcagcctgggcagcctgggcgagcccctggacaacgccgagaccgccagcgtgagcgacatgggcagcatgtacaccgtgaccagcctggacaaccagcccctggccgccagacccatcaagggcttcgccgtggtggagatcagaagcagagccaagatcgagaagatcagagccagcctgttcaacaacaacgacctgatcggcctgagcagcctggacggcgaggacgagctgatggagatgagcaccgaggagatcctgaccgtgagcgtggtgaaccagagcctgttcgacacccagggcagccccggcctggaggactacttcaacgacaagagcatcaagggcgagaagctggtgcccggcgccagagaggtgctgaccgagatcttcaagagctgcgcccacagcgagcagaccctgagcctgacccccgccaagcccatcagagtgagcgacatctacctgagcaaggagcagatcaacagccagacccccggcaacctgctgcacctgttcttcaccaacgtgagaccccccaagaaggtgctggaggaccagctgacccagatcctgagaaagtacggcgtgcccaagcccaagttcgacaagagcaagtacagcaaggccggcaaggagcagcaccccgtgaaggtggtgagcaccaagagacccatcaccaagccccccgccaaggacaaggccgtgctgaacagcgtgagcagaaccgccctgagcgagaagaagcccaccgtgaagcccaagagccccgagaagagcaagcccgacgagaaggaccccgagaagagccccaccaagaagcaggaggtgcccgaggagaagtacctgaccctggagggcttccacaagttcgtgatcgacagagccagacaggacatcagaagcgtgtggagagccatcctgagctgcggctacgacctgcacttcgagagatgcgcctgcatcgacgtgagacacgcccagaaggccagcagaaagtggaccctggagatggacgtggccctggtgcagtacatcaaccagctgtgcagacacctggccatcacccccgccagactgcacccccacgaggtgtacctggaccccgccgacgccgccgaccccagagtggcctgcctgctgaacgtgcccatcgagagcctgagactgagattcgccctgctgcagagcctgaacaccaccctggagaccttcttcctgcccctggtggagctgagacagacccccatgtacacccacagcatcgccgccctgctgaaggaggccaagggcctgatcttctacgacaccaaggtgaccgtgatgaacagagtgctgaacgccaccgtgcagagaaccgccgaccacgccgcccccgagatcaccctggaccccctggagatcgtgggcggcgagatcagagccagcgagaacagctacttctgccaggccgccagacagctggccagcgtgcccagcagccagctgtgcgtgaagctggccagcggcggcgaccccacctacgccttcaacatcagattcaccggcgaggaggtgcacggcaccagcggcagcttcagacacttcctgtggcaggtgtgcaaggagctgcagagcagcagcctgagcctgctgctgctgtgccccagcagcgccgtgaacaagaacaagggcaagtacatcctgacccccagccccatcacctacggcgaggagcagctgctgcacttcctgggccagctgctgggcatcgccatcagagccgacgtgcccctgcccctggacctgctgcccagcttctggaagaccctggtgggcgagcccctggaccccgagcaggacctgcaggaggccgacatcctgacctacaactacgtgaagaagttcgagagcatcaacgacgagaccgagctggaggccctgtgcgccgagatcgccagccagcacctggccaccgagagccccgacagccccaacaagccctgctgcagattcacctacctgaccatgaccggcgaggaggtggagctgtgcagcagaggcagacacatcctggtggcctgggagaacaaggacatctacgccgccgccatcagaagcctgagactgagagagctgcagaacgtggagtgcgtgaccgccgtgagagccggcctgggcagcatcatccccctgcagctgctgaccatgctgagccccctggagatggagctgagaacctgcggcctgccctacatcaacctggagttcctgaaggcccacaccatgtaccaggtgggcctgatggagaccgaccagcacatcgagttcttctggggcgccctggagatgttcacccaggaggagctgtgcaagttcatcaagttcgcctgcaaccaggagagaatccccttcacctgcccctgcaaggacggcggccccgacaccgcccacgtgcccccctaccccatgaagatcgccccccccgacggcaccgccggcagccccgacagcagatacatcagagtggagacctgcatgttcatgatcaagctgccccagtacagcagcctggagatcatgctggagaagctgagatgcgccatccactacagagaggaccccctgagcggctag

SEQ ID NO: 41842 - DNA, 11991 bp, Artificial Sequence
  derived and/or modified sequence
atgcccgccaaccacctgcccatcggcagcaccatgagcaccgtgcacctgagcagcgacggcacctacttctactggatctggagccccgccagcctgaacgagaagacccccaagggccacagcgtgttcatggacatcttcgagctggtggtggagaacggcgtgttcgtggccaaccccctgcaggagagaaccatcctgatgagaaaggagggcgagagcgccaagagcatcaacgagatgctgctgagcagactgagcagatacagagccagccccagcgccaccctggccgccctgaccggcagcaccatcagcaacaccctgaaggaggaccaggccgccaacaccagctgcggcctgcccctgaagatgctgagaaagacccccatctacacctgcggcacctacctggtgatgctggtgcccccccccggcggcagcggcagcagcgccaccagaagcctgttcggcggcaccagcggcctgagcagcctgaagagagcctgctacgacaccgtgaacaacatgctgtggacctgcagcaacgactacatcgaccagtggtgcaaccccggcaaccaggccttccactacgtgtgccagagactgggcgtgagccacatcatcaccgagcccaaggaggaggccatcaccaccaacgaggtgatcaaccagctgctgcaccacgtgggcgccatgtgcatccaccagctgaacctgctggccaccaaccccaacctgcccatcaccagcgtgctgggcaagcagcaccccatcgaggcccaccacctgagcagcatctgcgacatcatggagaaggccatggtgaacggcgacacctgcatcatcagatgcatcctggtggtgttccaggtggtgttcaagttcttcttcagcccccagaccgagagaaacagagacatcatcagaagaagcggcctgctgctgtggcagctgctgatggcccccaaggaccagatctgccccgagatccagaaggaggtgtgcctggccatcagcagcggcctgaacatcctgtaccccggcgagaccgagatcaacaacctgctgaagctggtgctgaccgagggcgagagaaacagcggcctgagccagctgagagacgtgatcctgaccaacctggccgagcagctgcagaacaacagattcggcagcgacgaggacgaccactacagactgaacgacgagctgctgcactacatcctgaagatcgtggtgagagagagctgcatcctgatcaccaagtgccagaccgtgagcaaggacgacttccagaagctgctgagcaccgtgcccgccgccagcagctgcctgagatacctgatggccgtgcagaaccacctgctgagcaacaccatcctgatcaagcccgacgagaacgacgacagcgacagcagcctgcagggcgagaccctgaaggtgcaggagctgaaggtgagcatcctggccctggccacccagatcctgaccggctgcgacgaggtgctggagatgctgcagcaggtgaccaccgccctgatcaacagcgacatcgccgacagagagcagagactgaagggcctggagcaggtgaccaaggccaccatgctgggccacctgctgcccgtgctgctgaccagcctgatgcaccccaacctgcagaccctgatcatggccgacgccctgatgccccagctggtgcagctggtgctgtacaccagccagaccgccctgctgctgaagacccagtgccccgtgttcgccgaggtgggctgcagcccctgcggcgcccccgaccagaagtgcagactgttccccgacgagagaatgctggaggagaaggaggagcccggcttcctgaccggcctgaagatccccgccccctgggccgccggcaagaccgtggagaccgtgcaccccgtgagagacaactacaagttcaaggagaccgtgcacatccccggcgccagatgcctgtacctgagattcgacagcagatgcagcagccagtacgactacgacaagctggtgatctacgccggccccaacaccaacagcagaaaggtggccgagtacggcggcaacaccctgggctacggcagcagaagcgtgctgggcaccggctggcccaaggacctggtgaagtgcatcagcccccccagcctgaacttcaaggtggagggcgacaccgtgaccttcagcttcgagatgagaagcggcagagagcacaacacccccgacaaggccatgtggggcttcgcctgcaccgtgagagcccaggagagcagcgaggacgtgagcggcggcctgcccttcctggtggacctggccctgggcctgagcgtgctggcctgcagcatgctgagaatcctgtacaacggccccgagatcaccaaggaggaggaggcctgccaggagctgctgagaagcaagctgctgcagagatgccagtggcaggtggaggccaacggcgtgatcagccccgccctgacccccagccccagccccctgcccctgaccatcgaggaggacagagagttcacctaccccagcgacgtgctggtgccccccgtgggcaactacttcgacctgcccagaatcagactgccccccggcatcatgatcaagctgagagagatcagcggcagagccagaccccagttcagacccagcatcaaggaggtgatccagcccgacgtgatggaggagatggtggtgagctgcgtgatcaagcacctgaacctggtggacgccctgcagagcctgatcaacttccagtaccaggaggagcacgccgaggagtacgacctgctgtgcaagatcatgggcgagaccttcaagaagctgaacgccatggagagacagctgcagagcgtggccgagctggagcagaagtggcagagcgaggtggacgacgccatgcagggcaagctggagaacaacatgcccttcttctacgactaccacttcaacgagaacaagatgaaggagctggagctgctgtgcagcatgaaggaggtgagcttcgacggcaacgacctggagaacatggtgctgagcctgagagagaagttcctgcaggaggtgaacagcctgatccagaagcccagccaccccctggccaagaccaagaccctggtgaagagcctgatgaacagagccgagctgctgctgcacgtgaccatcgccgcccagagcggcctgaccagaagcatcagcggcacccccgccgagacccccgcctgcaagagcgccagcgagaccaaggtgatcagccacgccgtgagacagcccgtgttcctgagaagcatgagcgcccccagcgacctggagatgatcggcaacgaggacctggagttcaccagagccaaccagagaagaagacacgtgaccagccacagaagcagcagcttcaccctgctgcagagcctggccatcgaggacagcagagacaagcccacctacagcgtgctgctgggccagctgttcgccttcatcggcaccaaccccgaccaggccgtgagcagcagcagcttcctgctggccgcccagaccagatggagaagaggcaacaccagaaagcaggccctggtgcacatgagagagctgctgaccgccgccgtgagagtgggcggcgtgacccacctggtgggccccgtgaccatggtgctgcagggcggccccagaatcgaggagctgacctgcggcggcatggtggagcaggtgcaggaggccttcggcgagaccatgaccagcgtggtgagcctgtgcgccagataccccatcgcctgcgccaacagcatcggcctgctgtgcaccatcccctacaccagaagcgaggagaagtgcctggtgagaagcggcctggtgcagctgatggacagactgtgcagcctgagcaaccagaccgagagcagcagcagcgagaagcagaccaagaagcagaaggtggccaccatggcctgggccgccttccaggtgctggccaacagatgcgtggagtgggagaaggaggagggcggcagcaccgaggccgtgcacagcggcctggccagacaggtgagcagcctgctgaccaaccacctggccagagccaccgagtgctgcggcaaccaggccgccggcaacgacgccctgcaggacgtgctgagcctgctgaacgacctgagcagaagccacatcggcaaggccatcctgagccagcccgcctgcgtgagcaagctgctgagcctgctgctggaccagagacccagccccaagctggtgctgatcatcctgcagctgtgcagagccgccctgcccctgatgagcgtggaggactgcggcaacgtggagctgcccccctggagctacagcgtgcccagcctgaacagcgagcaggaggaccccagcgaccccgccagcaagatcgccagcctgctgctggccaagctggccgactacgtggtgcccggctgccagaccgtgctgagccccaccgccagcgagcccgacaccaccctgaccaagaccagccccaagaacagcctgaagggcgacaaggaccccggcgaggagagcgaggccgtggacggcaagctgagcatcttcatccacaagagagaggaccagagcagccacgaggtgctgcagcccctgctgagcagcagcgagggcagacccttcagactgggcaccggcgccaacatggagaaggtggtgaagatggacagagacatgaccaagggcggctgctgcgaggtgatcaccgaggaggccgccgccgccctgagaaaggccaccaagtgggcccagagcggcctgatcgtgagcatcggcccccccgtggagagcatcaaccccgagaccgtgagcggcctgagcaccggcgacaagaagaagaccgcccagaccagcatctgcagagagagaaacagcgagctggccagaaccgaccccgtgagacccttcatcagcggccacgtggccaacagcatggccgccgaggtgatcgccctgctgcacagcctgctgatggcccccgagagcaacgccgcccagatctggaccaccaccgccgagaaggtgctgagcagagccctgatgtacatcccccagctgggcaagtacgccgagagcatcctggagaacggcagcagcagcggcagaaagctggccaagctgcagagaatcgccagacaggccgtggccgccctgtgcgccctgggcggcttcaaggagaccatcaagatcggcagcgaggtgcaggtgctgggcagaggcatcagcggcagcatcggcgtggtggccagcatcaacgagcaggagggcatcgccaccgtgagattcccccccatcgactgcagaaagaccagccaggccagcgacaccctgaccatccccctgagcagactgtgcgtgcccagaagcgaggccctgcccctgcacaagctgagcatcaccgagaaggtggtgcaggccgtgcagagcatgctgctgccccaggagggcagcctgagcatccacaccagcctgcccgccaccggcgacggcagcgcccccgtgatggccgtggtgagactgctggccgagatcagaaccagagcctgcctggtgatggcccagctgctggaggacagcctgttctgcgaggagttcatccagcagtgccccgccgccgtggaggtgctgaacctggtggcccaggagtgcagcgccggcgagagactggccgtggtggaggtgcagtgcgagagactgagaatgctgtacagagactgcgccagacccccccccccccccctgcaggccgacagaagacagcccaaggagatcacctggagccccagcagagtgttcccccccgtgagagcctgcatgttcagcagccacctgaccagcgtgaccttcctggccgaccccagcgccggcggcggcctgcccagaggcaccttcatctacgccaccagccccctgcccgtgcaggcccccagcttctactgggagatcgagatcgtgagctacggcgacaccgacgacgacaccggccccatcgtgagcttcggcttcaccaccgaggccgagaagagagacggcgcctggaccaaccccgtgggcacctgcctgttccacaacaacggcagagccgtgcactacaacggcagcagcctgctgcagtggaagagcgtgagactggacgtgaccctgagccccggcgacgtggccggcatcggctgggagagaaccgagggcaccccccccccccccggccagcccgccaagggcagagtgtacttcacctactgcggccagagactgagcccctacctggaggacgtgagcggcggcatgtggcccgtggtgcacatccagaagaagaacaccaagaccagagccaacttcggcagcagacccttcgcctacgccgagggccaggcccacagaaacgccgccgacctgtgcaccgacctggccgaggagatcagcgccaacttcgaggccctgcccttcgccatggccagcgacagcgacaacgacgccggcaccagcatcgccagcgaccccggcacccacggccccccctgcagaatcgccgccgtggccaccgcccagcagcagtacgacagcgacaccagctgccactacaaggtggagctgagctacgagaacttcatcaccagcggccccgacccccaccccccccccatcgccgacgacgagagcgacgacgacgacgacgacgacatcccccaggaggaccactacgccctgctggtgaaggcctgggagaccaaggtgttccccaccatcagaagaagattcagaaacgaggccgagagaaagagcggcctggaccagatcaagggcgccctgcagctgggcatggtggacatcgccagacagaccgtggagttcctgtacgaggagaacggcggcatccccagagacctgtacctgcccaccatcgaggacatcaaggacgaggccaacaagttcaccatcgacaaggtgagaaagggcctgaccgtggtgaccagaagccccgacagcaacaacgtggccagcagcgccgtgggcaccgccctgcccaagttcgccatcagaggcatgctgaagaccttcggcctgcacggcgtggtgctggacgtggacagcgtgaacgagctggtgcaggtggagacctacctgagaagcgagggcgtgctggtgagatactggtaccccatcgacatgctggagagaccccccgccggctacagaagaaccgccaccaacggcctggtgaccctggacaacaccaacctgcagatccacagagagctgctgagatgcgaggccgccctggccagactgtactgcagaatggccctgctgaacatcttcgcccccaagctgccccacctgttcaccagactgttccacatccccgccatcagagacatcaccctggagcacctgcagctgctgagcaaccagctgctggccccccccctgcccgacggcaccatcagcagcagcagcatcctgctggcccagagcctgcagcactgcatccacagccagaactgcagcgccaccgacctgttctaccagggcaacagccagaccgtgagagagtggctgaacgtggccatcaccagaaccctgcaccagggcgaggagagcctgctggagctgaccaagcagatctgcagcttcctgcagaccgcccccgagcagttccccagcgaggagttccccatcagcgagagcaaggtgaacatggacgtgaacttccccggcgccgccttcgtggtggtgagctgcaaggagagccagagcggcttcagaaaggacagcagcctgtacaaggccccctgggccagagtgctggtgtacggcctgggccacaaggtgaagagaaacggccagctgaacctgatcgaggccgcctgctaccccagagacgccagccccgccaacaccggcctggcccccccccccaccgccgaccagtaccccagcgtggtgctgagcaccgacagagtgcacatcaagctgggcgtgagccccccccccggcgccgtgctggtgctgcacagcctgcccctggagttccccctggccatggccttcgccgagcagctgctgagctggaagagcgaggacagcgagggcaagagcgaggacgagcccgacaccatccccaccagcgtgctgctgcaggtggtggagctgctgggcaacttcctgtggaccaccgacatggccgcctgcgtgaaggagctggtgttccacctgctggccgagctgctgagaaccgtgcacaccctggagcagagaagacaccccgccggcctgagcagcagcatcgccctgcagctgaacccctgcctggccatgctgatggccctgcagagcgagctgcacaagctgtacgacgaggagacccagaactgggtgagcggcggcgcctgcggcggcagcggcggcgccgccgccggcgaccagggcagattcagcacctacttccacgccctgatggagggctgcctggccgtggccgaggtgaccctgcccaccaacatgagcgtgaccgccagcggcgtgaccagcgccaccgcccccaacctgagcgacagcagcagcagcagcagcagcagccccggccagaccccccagagccccagcctgctgagcaagagaaagaaggtgaagatgaagagagagaaggccagcagcagcggcaagagacagagcagcagaaccgtggacagcgaccccaccgtgctgagcatcggcggcagcaagcccgaggacatgctgtggttccacagagccctgaccctgctgatcatcctgagacacctgaccagaaaggacccccagggcctgggcgtgaccagcgacgccatcgccgacgcctgccaggccctggtgggccccaccgcccacagcagactgctggtgatcagcggcatccccacccacctggacgagggcgtggtgagaggcgccatcagaaaggcctgcaacgcccacggcggcgtgttcaaggacgagatctacatccccctgcaggaggaggacaccaagaagcccaaggacaaggccgagggcggcgacggcaaggtggagcccgagaagaccctggccttccccggcaccgacagcatggaggtgagcaccagcagcagcctgacccccgccatgagcatcagcgccagcgccagcaccagccaggccagcatctgcagcagccagggcatcagccagaccgtgagcgacctgagcgtggaccccctgcccgccggcctggagctgcccatcccccccggcctgctggagccccacgccgtgagcagccaggagagcctggacatcagcctgtgcagcaccggcagcctgggcagcctgggcagcctgggcgagcccctggacaacgccgagaccgccagcgtgagcgacatgggcagcatgtacaccgtgaccagcctggacaaccagcccctggccgccagacccatcaagggcttcgccgtggtggagatcagaagcagagccaagatcgagaagatcagagccagcctgttcaacaacaacgacctgatcggcctgagcagcctggacggcgaggacgagctgatggagatgagcaccgaggagatcctgaccgtgagcgtggtgaaccagagcctgttcgacacccagggcagccccggcctggaggactacttcaacgacaagagcatcaagggcgagaagctggtgcccggcgccagagaggtgctgaccgagatcttcaagagctgcgcccacagcgagcagaccctgagcctgacccccgccaagcccatcagagtgagcgacatctacctgagcaaggagcagatcaacagccagacccccggcaacctgctgcacctgttcttcaccaacgtgagaccccccaagaaggtgctggaggaccagctgacccagatcctgagaaagtacggcgtgcccaagcccaagttcgacaagagcaagtacagcaaggccggcaaggagcagcaccccgtgaaggtggtgagcaccaagagacccatcaccaagccccccgccaaggacaaggccgtgctgaacagcgtgagcagaaccgccctgagcgagaagaagcccaccgtgaagcccaagagccccgagaagagcaagcccgacgagaaggaccccgagaagagccccaccaagaagcaggaggtgcccgaggagaagtacctgaccctggagggcttccacaagttcgtgatcgacagagccagacaggacatcagaagcgtgtggagagccatcctgagctgcggctacgacctgcacttcgagagatgcgcctgcatcgacgtgagacacgcccagaaggccagcagaaagtggaccctggagatggacgtggccctggtgcagtacatcaaccagctgtgcagacacctggccatcacccccgccagactgcacccccacgaggtgtacctggaccccgccgacgccgccgaccccagagtggcctgcctgctgaacgtgcccatcgagagcctgagactgagattcgccctgctgcagagcctgaacaccaccctggagaccttcttcctgcccctggtggagctgagacagacccccatgtacacccacagcatcgccgccctgctgaaggaggccaagggcctgatcttctacgacaccaaggtgaccgtgatgaacagagtgctgaacgccaccgtgcagagaaccgccgaccacgccgcccccgagatcaccctggaccccctggagatcgtgggcggcgagatcagagccagcgagaacagctacttctgccaggccgccagacagctggccagcgtgcccagcagccagctgtgcgtgaagctggccagcggcggcgaccccacctacgccttcaacatcagattcaccggcgaggaggtgcacggcaccagcggcagcttcagacacttcctgtggcaggtgtgcaaggagctgcagagcagcagcctgagcctgctgctgctgtgccccagcagcgccgtgaacaagaacaagggcaagtacatcctgacccccagccccatcacctacggcgaggagcagctgctgcacttcctgggccagctgctgggcatcgccatcagagccgacgtgcccctgcccctggacctgctgcccagcttctggaagaccctggtgggcgagcccctggaccccgagcaggacctgcaggaggccgacatcctgacctacaactacgtgaagaagttcgagagcatcaacgacgagaccgagctggaggccctgtgcgccgagatcgccagccagcacctggccaccgagagccccgacagccccaacaagccctgctgcagattcacctacctgaccatgaccggcgaggaggtggagctgtgcagcagaggcagacacatcctggtggcctgggagaacaaggacatctacgccgccgccatcagaagcctgagactgagagagctgcagaacgtggagtgcgtgaccgccgtgagagccggcctgggcagcatcatccccctgcagctgctgaccatgctgagccccctggagatggagctgagaacctgcggcctgccctacatcaacctggagttcctgaaggcccacaccatgtaccaggtgggcctgatggagaccgaccagcacatcgagttcttctggggcgccctggagatgttcacccaggaggagctgtgcaagttcatcaagttcgcctgcaaccaggagagaatccccttcacctgcccctgcaaggacggcggccccgacaccgcccacgtgcccccctaccccatgaagatcgccccccccgacggcaccgccggcagccccgacagcagatacatcagagtggagacctgcatgttcatgatcaagctgccccagtacagcagcctggagatcatgctggagaagctgagatgcgccatccactacagagaggaccccctgagcggctag

SEQ ID NO: 41843 - DNA, 12741 bp, Artificial Sequence
  derived and/or modified sequence
atgggacttctcttggtgttccccctgatacagagtcaaagcaggacggatccctcactgtgtaacatcacggctgaagtcttactgaactgtctgagagactgccagcctctgagcttaaccaaggaacccgccgattgtctcaatgggatcgagactctgctgtgtagctggcttgaggaaacatccgacactggtagacacattccccacaaacagaaggagaacgctgctgcagcattggtcgccctggcttgcgcccgcggctcactgaagaccttcgtgcacaccgttcacctccttcagaaacagaccgacctggggagtctgccggtggcagatgtgttatatagattgctgcttttagaaggagggcctggaagcccttcgtgcctccttggcggaaagcatatcgtcagctggggctatgaggacatgctgcccgcacctgactccaacaccgggtccagttcggaaaacaaagatgcagatctgggtcggtgcttgaccgctgacggtttgtatctctacacaacaaactccgtaggacgcggggtctccaagctgggaagcggcctgcacgggaccttacggggcttcgtatattgtaggaacgaagagctggaaccaggatgggtggcgtttggcagcggcagcttgctgcatagacccgtgtccttcgacaataagcctcattccctcttccaggtgatcgatcagaacacactgcaggtgtgtcaggtagtgccaatgcccgccaaccacctccccataggaagcacgatgtcaacagtgcacttaagcagcgatgggacttacttttattggatttggtctcccgccagtctgaatgagaagaccccaaaggggcatagcgtgttcatggatatttttgagctggtggtggagaatggcgtgtttgttgcaaacccgctgcaggaacgaactattttaatgcgcaaagagggcgagtctgctaagtccattaacgaaatgttgttgagcagactgagccggtacagagcctccccttcggctactctggcagccctcaccggctcaactatcagcaacacactgaaggaagaccaggcagcaaatacaagctgcggcctgcctttgaagatgctccggaaaacccctatctacacctgtgggacatatctggtaatgctggttccaccacctggagggagcggctcatcggccactcgatctctgttcggcgggacaagcgggctgagtagcttgaaacgcgcctgctacgatactgtgaacaatatgctctggacttgtagcaacgactacattgaccagtggtgcaatccaggtaatcaggcattccattacgtatgtcaacgacttggcgtctcacatattatcaccgagcctaaagaggaggcgattactacaaacgaggtcataaaccagctcctacaccatgtgggcgccatgtgtattcatcaacttaacctgctggccactaatcctaacctgcccatcactagtgtactcgggaagcagcatcccatcgaagcgcatcatctatccagtatctgcgatattatggaaaaggccatggtaaatggtgatacatgtatcatacgttgtatcttagtagtcttccaggtcgtattcaagttctttttctcacctcaaactgaacgcaatagggatattatcaggcgcagcgggctgttgctttggcagctgttgatggctcccaaagatcagatttgccctgaaatccagaaggaggtctgtttggctatctcctccggacttaacattctgtatccaggagaaactgagatcaataacctgctgaaacttgttttgacagaaggcgagcgcaattcaggcctatctcagctgcgcgacgtcattttgacaaatctggccgagcagcttcagaacaatagattcgggagcgatgaagatgaccactataggctgaacgacgagcttctgcactatattctgaagatcgtggtgagggaatcttgtatcctcatcacgaaatgtcagacggtgtcaaaggatgattttcagaaactcctctccacggtgcccgcagctagttcatgtctcagatatctgatggctgtgcagaatcacctactctctaacactatcctgatcaaacctgatgagaatgacgacagtgattcgagtcttcagggcgaaacgctcaaagttcaggaactgaaagtcagcatactcgcactcgcaactcagattctgacaggatgcgacgaggtattggagatgttgcagcaggtcacgaccgcacttataaattctgacatcgcagaccgagagcaacggctcaagggtcttgagcaggtgactaaagctactatgttgggacacctgttgccagtattgcttaccagtttaatgcacccaaacctccagacgctcatcatggccgacgctctaatgccccagcttgtccagctggttctgtacacctcacagaccgccttattgctgaagacacagtgccctgtcttcgccgaagtgggatgctctccttgcggtgccccggaccagaagtgccgactgtttcctgatgagcgtatgctggaagagaaagaggaacctggcttcctcaccggactcaagataccagccccatgggccgctggaaagaccgttgagactgtccatccggtccgcgataactataaattcaaggagaccgtccacatacccggcgctcgctgtctgtacctcagattcgacagccgctgctcctcacaatacgattatgacaagctcgtaatctacgcagggcccaataccaattctcggaaggttgccgaatacgggggcaatacccttggttatggctccagatccgtgctcgggaccgggtggcctaaagacctggtgaaatgcatctcccctcccagtttgaactttaaagtggaaggcgacaccgtgaccttctcattcgaaatgcgctcaggccgggaacataatacccccgacaaggccatgtggggattcgcatgtaccgtacgggctcaagagagctcagaggacgtgagcggcggcttaccattcctggtggacctcgcactcgggctgtctgtgttagcttgctcaatgctcaggattctatataacggtcctgagatcactaaagaagaggaagcctgtcaggagctgctcagaagtaagctacttcagcggtgccagtggcaggtggaagctaacggcgtgatctctcccgccctgacaccatcccccagtcccctgcccctgaccatcgaggaagatcgggagtttacttacccatcagacgtcctagtcccccccgtgggaaactactttgacttgccccgcattcgacttcctcctggtatcatgattaagcttagggagatatctggaagagccagaccccagtttcgcccatctataaaagaggtgatccagccagacgtgatggaagagatggtcgtctcctgcgtaatcaagcatctgaacctggtcgatgcactgcagtcacttatcaacttccagtatcaagaggagcacgctgaggagtatgatctgttgtgtaagatcatgggcgaaacgttcaagaagctgaatgccatggagcgacagttgcagtctgtggccgaacttgaacagaagtggcaaagcgaggtcgatgacgccatgcagggaaagctggagaacaacatgcctttcttttatgactatcatttcaacgagaacaaaatgaaggaactggaactgctttgtagtatgaaagaggtctcattcgacggtaatgatctggaaaacatggtactgtctctccgtgaaaagttccttcaagaggtgaattccctcattcaaaagccaagccatcccctcgccaaaaccaagacactcgttaagagccttatgaaccgggccgaattgctgctacacgtcactatagctgcccaatctgggctgacacgatccataagtgggaccccggcagagactcctgcatgcaagtcggcctctgagaccaaagtgattagccacgcagtcagacaacctgtgtttctgaggtcaatgtctgccccgtcagatctagagatgattgggaacgaggacttggagttcacgagagccaatcagaggcggcgacatgtcacctcccacagatcctcgtcgtttaccctgctgcagagcctcgccatcgaggacagtcgggacaagccgacatattctgttctgcttggacaactgttcgcgttcatcgggactaatcctgaccaggctgttagctcgagttcattcctcctagcggcgcaaactagatggcggcgcgggaatacacgcaaacaagcactcgttcacatgcgcgagctcctgaccgccgcagttcgggtcggaggcgtgacacacttagtgggacccgtgacaatggtgctgcaagggggccctagaatcgaggaattgacttgcggcgggatggtcgaacaggtccaagaagcatttggtgagactatgacctcggtggtttccctttgcgctcgctatcccatcgcttgcgccaacagtataggcctactgtgtactatcccatacacccgaagcgaagagaagtgcctcgtacggagcggacttgtccaactcatggataggctttgtagtctctcaaaccaaacggagtcctcctcttctgagaagcagacaaaaaaacagaaagtggcgactatggcctgggcggccttccaagtgctggctaaccgatgcgtggagtgggaaaaagaagaaggagggtctaccgaggctgtccactccgggctggccagacaagtcagttctctccttaccaaccatttggcacgcgccacagaatgctgcgggaatcaggccgccgggaatgatgccctccaggacgtcctcagtctgctgaatgacttgtcaagatcacacatcggcaaagcaattttgtcccagccggcctgcgtctctaaacttctctcactcttattggaccagcgcccgagcccgaaattggtgttgattatactgcaactatgcagagcagcactgccgctcatgtccgtggaagattgcgggaatgtcgagctccctccgtggagctatagcgtgccgtcattaaatagcgaacaggaagatccgtccgatcccgccagcaaaatcgccagcctgttgctggccaagttagcagactatgttgtacctggttgtcagaccgttctcagccccacagcatcagagcctgatactaccctgacaaaaacctcaccaaaaaactcgctgaaaggcgacaaagatcctggcgaagagagtgaggccgtggacggaaaactctctatttttatccataaaagagaggatcagagctcccacgaagtgctgcagcctttgttgagtagctccgagggaaggcccttccgcttagggactggtgccaacatggagaaggtggtgaagatggacagggacatgacgaagggcgggtgttgtgaagtgatcacagaggaagccgctgctgccttgaggaaggcgaccaaatgggcccagtctgggcttatcgtgtccattgggccaccagttgaatcaatcaaccccgaaaccgtaagtggccttagcactggggacaaaaaaaagactgcccaaacatcgatctgtagagagcgtaactccgaactggcaagaacggaccctgttcggcccttcattagcggacatgtggctaatagtatggctgcagaagtgattgccctgctgcatagcctcctcatggccccagaaagtaacgctgcccagatttggactacaacagcggagaaggtgcttagccgagctctcatgtacattccccagctcggtaagtacgctgaatctatcctagagaacggtagctcctcaggccggaaacttgcaaaactgcagcgcatagcgagacaggccgttgcagccttatgcgctttgggaggcttcaaggaaacaatcaagataggcagcgaagtgcaagtcttaggcagaggcatcagcggcagcatcggtgtggtggcctctatcaatgagcaagaagggattgcaacggtgcggtttcctccaatcgactgccggaagaccagtcaggcaagcgacaccctgaccatccccctgtcccgactgtgtgttccccggtctgaagcactgccgttgcataaactgagcatcaccgagaaggttgtgcaagctgtccagagcatgctactgcctcaggaaggatctctgtctattcacactagcttgcctgccacgggcgatgggtcagccccggtcatggccgtggtcaggttgctcgctgagatccgaactcgagcctgcttggttatggcccagctgctggaggactctctcttctgcgaagagttcatccagcaatgtccagctgctgttgaagtacttaatctcgtcgcacaagaatgctcagcaggcgaacggctggccgtggtagaagtgcaatgcgaaaggttgagaatgctgtatagggactgtgccaggccccccccgcctccattgcaagctgacagaaggcagcctaaggaaattacgtggagtccaagcagagtgtttccgcccgtgcgggcctgcatgttttcgagccaccttacaagtgtgacctttctcgccgacccttcagccggcgggggtctccccaggggcacgtttatctatgctacttctccgttacccgtgcaggcccctagtttctactgggaaatcgaaatcgttagttacggcgatacagacgacgacacagggcccatcgtttctttcggcttcaccaccgaggcagagaagcgcgacggggcctggacgaacccagttgggacatgcctgttccacaacaacggtcgcgcggtacactataacgggagttctttgctgcagtggaagagcgtgagactcgatgtcacactgagccctggcgatgttgccgggatagggtgggagagaaccgagggtacacccccaccaccaggacagcccgccaaagggcgagtttattttacctactgcggtcagcgtctgtcaccatacctcgaagatgtgtctggaggcatgtggcctgtggtgcacattcaaaaaaagaacactaagacccgcgccaattttggctctcgtcccttcgcctatgccgaagggcaggctcatcgcaatgctgccgatctctgcactgacctggccgaagagatctctgcaaactttgaggcactcccatttgccatggccagtgattctgacaatgacgcggggacatccatagcctcagatcctggtacccacgggcccccatgcaggatcgccgctgtggccacggctcagcagcaatatgactcagacacctcatgccactataaggtagaactgtcctatgagaacttcatcactagcgggcccgaccctcatccaccacccatagccgatgacgagagtgatgatgatgacgacgacgacatcccacaggaggaccactacgccctgcttgttaaagcatgggaaaccaaagtctttcctaccatccgcagacgattccggaatgaagccgagcgcaaatcagggctcgatcagatcaagggcgctctccaactggggatggtggacatagccagacagacagtggagtttttatatgaggagaatggtggcatacctcgggatctgtacctacctactatagaagatattaaggatgaggccaataagttcaccatcgataaagtccggaaagggttgacagtcgtgaccagatctcccgactccaataatgtagcctcgtctgccgtggggactgctctgccaaaattcgcgatccgggggatgctgaagaccttcggcctccatggtgtggtactagatgttgacagcgtaaacgaactcgtgcaggtggaaacttacctaagatcagagggtgtgttggtgcggtactggtatcccatcgacatgttggaaaggcctcccgccgggtataggcgaactgccaccaatggcttggtgacactggataataccaatctgcagattcaccgcgagctgctgcgctgtgaggcggcactcgccagactgtactgccgcatggccctgcttaacatcttcgctcctaagttaccccatctctttactcggctgttccacattcctgctatccgggatattaccctggagcacctgcagctgctgtccaaccagctgttggccccccccctgccagatggtacaattagctcaagttccattttgctcgcgcagagcctgcaacattgtattcactcacagaactgttctgcgacggatctcttttatcagggcaattctcaaactgtacgcgagtggttgaacgtcgccataacccgcaccctacaccagggtgaagagtctctcctggagctaaccaaacagatctgctcctttttgcagacagctccggagcagttcccctcagaggaattcccgatctctgagagcaaagtaaacatggatgttaatttccctggagccgcgtttgtggttgtatcttgtaaagaatcgcaatctggcttcagaaaagattcttctctgtacaaagcaccctgggccagagtactcgtgtacggattagggcataaggtgaaacgaaacggccagttgaatcttattgaagccgcctgctaccctagagatgcgtctcctgcaaacaccggactcgcgccccccccgaccgctgaccaatacccatccgtagtgctgtccactgatcgggtccacattaaacttggggtctctccaccccccggcgccgtattggtactgcatagcctccctttggagttccccctggcgatggcatttgctgagcagctgttgtcatggaagagtgaggacagcgaagggaagtcagaagatgagcctgataccattccaacaagcgtcctgctccaggtcgtggagctgctcggcaactttctgtggaccacagacatggccgcatgtgttaaagagctagtcttccatctcctggccgaactccttcggactgttcacaccctggaacagcgtcgacacccagcaggactatccagtagcatcgcgctccagctaaacccttgtctggcaatgcttatggctctgcagagcgaactgcataaactttatgacgaggaaacccagaactgggtgtccggcggtgcctgcggaggcagtggcggtgccgccgccggggaccagggccgtttcagtacatatttccacgccttaatggagggctgcttggccgtggctgaggtgacactgcccacaaatatgtcagtgaccgcatcaggcgttacctctgcaactgcccctaatttatctgactcttcttccagctcatcgtctagcccaggacaaactcctcagagcccaagcctcctgtctaagaggaaaaaggtcaaaatgaaaagggaaaaggcctcctcttccggcaagaggcagtcttcacggactgtcgactccgatccaactgtcctaagcataggcggctcaaagcctgaggacatgttatggtttcatagagccctgactttgcttatcattcttcgccatcttactcgcaaagacccacagggtcttggagtgacctcagacgccattgccgatgcctgccaagccttggtgggaccaaccgcacacagtcgtctgcttgttatcagtggcatccctacgcaccttgatgaaggggtggtgcgtggggccatacggaaggcctgcaatgcccatggcggtgtgtttaaggacgagatttacatcccacttcaggaggaggacacaaaaaagcctaaagacaaagcagaaggcggggacggcaaagtcgagcctgagaagacactggccttccccgggaccgactctatggaagtgagtaccagctcatctctcacacccgcaatgagcatcagtgccagtgcaagtacgtctcaggcctctatatgcagttcacaggggataagccagactgtctcagatttaagcgttgacccactccccgcaggtctcgagctacccattccccctgggctcctggagccacacgccgtatcttcccaagagtccctggacatctccctatgctcaaccggcagcctcggctcactcggatctctgggagagcctcttgataatgctgagaccgcctccgtgagcgatatggggtcaatgtacacggtgacctccctggacaaccagcctctcgcagcacggccaataaaagggttcgccgtggtggaaatccggagcagggctaaaattgagaagataagagcaagcctgtttaacaacaacgatctaatcggactgtccagcctggatggtgaggacgagctgatggaaatgagtactgaggagattctcacagtttccgtggtcaaccagtccctctttgatacccagggcagtccggggctcgaggattattttaatgataagagtatcaaaggggaaaaactggtgcccggggccagggaagtgctgactgaaatcttcaagtcctgcgctcatagtgagcagaccttatcccttactccagccaagccgatccgggtgtcagacatctaccttagtaaagaacagatcaactcacagactccagggaatctgttgcacctgttctttactaatgtgcgaccccctaaaaaggtgctggaggatcaactgacccagattcttaggaagtatggggtgcctaagcctaagttcgataagtctaaatattctaaagcgggaaaagagcagcacccagtaaaggtagttagcactaaaagaccaatcacaaaaccgccagcaaaagataaagctgtactcaactctgtctctcgaactgcacttagtgagaaaaaaccaaccgtgaagccgaagtcacccgagaaatctaagccagacgaaaaagatcctgaaaagtcccctactaaaaagcaggaagtacccgaggagaagtacttgacgttggaagggttccataagttcgtcattgatcgggctcgccaagacatccggagcgtttggcgcgctattttgtcatgtggatatgatctccacttcgagaggtgcgcctgcatcgatgtgcggcacgcccaaaaagcaagccgaaaatggacactcgagatggatgttgccctggtgcagtacatcaaccagctctgtagacacctggcaattaccccagcccgccttcaccctcatgaggtctatctggatccagcagatgctgccgatcctagggttgcctgtctgctgaacgtgccaattgaaagtctacgactcagattcgcgctgctgcagtcgctaaacaccacactcgagaccttctttctgcccctggtggaactgcgccagaccccgatgtatacccactccatcgcggccctgctgaaggaagccaaaggactcattttttacgataccaaggtgaccgttatgaacagagtactcaacgccaccgttcagcgcactgcggaccatgccgcccccgagataacactggaccctctggaaattgtgggcggagagatcagagcttccgaaaattcttacttctgtcaggccgcaaggcagctggcaagcgtccctagtagtcaactgtgcgtaaaactggcatccggaggggaccccacctacgccttcaacatacgattcaccggtgaagaagtacatgggacaagcggaagcttcagacacttcttatggcaggtgtgtaaggagctgcagtcttcttctctctctcttctgctcctgtgccccagcagcgccgtgaataaaaacaaagggaaatacattcttacgccatctcctatcacttatggagaggaacagctgctgcatttcctaggacagctgcttggaattgccattagagctgacgtccctctgccgctggatctcctgccaagcttctggaaaaccttagtgggagagccactggatcccgaacaggatctgcaggaggctgatattttgacgtacaattatgtcaagaaattcgaatcaatcaatgacgaaacagagttagaggcactatgtgccgagatagcttcacagcaccttgccacagagtcaccagactcacccaataaaccttgctgcaggtttacgtatctgaccatgaccggggaggaggtggagctgtgctccaggggcagacacattctggtcgcctgggaaaataaagacatttacgcagccgccatccggtccctgcggctgcgcgagctacagaacgtggaatgcgtcactgccgtgcgggcaggattgggctcaataatccctttgcagctgctcaccatgctgtctccactcgagatggaactgcgaacctgcggacttccctatataaacttggagtttctgaaggctcatactatgtaccaggtcggactgatggaaaccgaccagcacattgagttcttttggggagcgctagagatgtttacccaagaggagctgtgcaaattcattaagtttgcttgtaaccaggagaggatcccctttacgtgtccttgtaaggatggagggcctgacacggcccatgtgccgccctacccaatgaagattgccccaccagacggtactgctggctcccctgacagtcggtacatccgtgtagagacctgcatgttcatgattaagctgccccagtactcctcgctggaaattatgcttgagaagctccgatgtgccatccattatagggaggatccactgagcggctag

SEQ ID NO: 41844 - DNA, 11991 bp, Artificial Sequence
  derived and/or modified sequence
atgccggccaatcaccttcccatagggtctactatgagcaccgtccacctctccagtgacgggacctacttctactggatttggtcccccgccagcctgaatgaaaagacgcccaagggacattctgtgtttatggatattttcgagctggtcgtggagaacggtgtgttcgtggctaacccactgcaggaacggaccattctcatgagaaaggaaggagagagcgccaagtcaatcaacgagatgttattgtctagactgtctagataccgtgcctctccgagtgcaaccctggccgcgctcacggggagcacaatcagcaatacattaaaggaggaccaggccgcgaataccagctgtggactcccacttaaaatgctgcgtaagaccccaatctatacgtgtggtacttacctcgtgatgctcgtgcctccacctgggggtagtgggtcttcagccacgagatctctgtttggcgggacatccggactgtcatctttaaaacgagcctgttacgatactgtgaacaacatgctgtggacgtgctcaaacgactacatcgaccaatggtgtaaccccggcaatcaagccttccactacgtatgccagcggctgggcgtgtcccacatcatcactgagcctaaagaagaagctatcaccaccaacgaggtgatcaaccagcttctccaccatgtgggtgctatgtgtattcaccaactaaacctcctggccaccaaccccaacttgccaattacctcagtcctcggaaaacagcatcctatcgaagcacaccacctgagctccatttgcgacattatggagaaagccatggttaatggtgacacctgtattatccgctgcatacttgtggtgtttcaggtcgtgtttaaattcttcttctctcctcagactgagcgcaatagggatattataagaagaagcggactgctcctctggcagttgctgatggcacctaaggaccagatttgccccgaaattcaaaaagaagtctgtcttgctatctcaagcggcctgaatatactctaccctggagaaacggaaatcaacaacctacttaagctcgtgctcacagaaggtgaacgcaatagcgggctgtcccagctacgggacgttatcctaaccaacctggccgaacagctgcagaacaaccggtttgggtctgacgaggatgaccactaccgattgaatgatgagctgctccattatatcctcaagatcgtggtgagagagtcttgtatactgatcaccaagtgtcagacagtgagcaaagatgatttccagaaactgttgtccaccgttcctgccgctagcagctgtctgagataccttatggctgttcaaaaccatctgctctctaacacaatactaataaagccggacgagaacgacgactccgattccagcttgcagggcgaaaccctgaaggtgcaagaactaaaggtctctatcttggccttggcaacacagatcctgaccggatgcgatgaagtgctggagatgctccagcaggtgactaccgcccttataaattccgacattgccgacagggagcagagactgaagggactagagcaagtaaccaaggccacaatgctgggacatctgttacccgtgctcctgactagtctgatgcatcctaatctgcaaacactaataatggctgatgccctgatgccccagctggtacaactggttctctacacgagtcagacagccttgctgctcaaaactcagtgtcccgtttttgccgaggtagggtgttccccatgtggggctcctgaccagaaatgtcgtctcttccccgacgagagaatgctggaagaaaaggaagagcccggatttcttacagggcttaagatccctgcgccgtgggccgccggcaagactgtcgaaactgtgcatcccgtgagggataattacaagtttaaagaaacggtgcacatccctggcgctcgctgcctgtacctgcggtttgactcacgatgctcttcccaatatgattacgacaaactggtcatttacgcagggcccaacacaaatagcagaaaggtcgcagaatacggaggcaacaccctcggatacggaagccgctccgtgcttggcaccggctggcctaaggacctggtaaagtgtatctcaccaccgagtctcaacttcaaggtggagggagataccgttaccttctctttcgaaatgcgctcaggacgagagcataatacacccgataaggcaatgtggggattcgcctgcaccgtaagggcccaggagtcatcggaggacgtaagtggcggactgccattcctcgtagacctcgcactggggttatccgtgctggcctgttcaatgctgcgcattctgtacaacggtcctgagatcacaaaggaggaagaggcctgtcaagaactcctccggagcaagctgcttcagaggtgtcagtggcaagtcgaggcgaacggcgtcatcagtcccgctctgactccctctccatccccactccctctcacaatagaggaagacagggagtttacctacccctcagatgttcttgtcccccctgtcggtaattactttgacctgccccggatccgcctgccacctggcattatgatcaaactgagggagatctccggtcgcgccagaccacagttcagaccaagcatcaaagaagtcattcagccagatgtcatggaggaaatggtcgtgtcctgtgttattaaacatctaaacctcgtggacgcccttcagtctctgatcaactttcagtaccaagaggaacacgctgaagaatatgatttgctatgtaagattatgggagagaccttcaagaaacttaatgcgatggaacgacagctgcagtctgttgccgagctcgagcagaaatggcagagcgaggtagacgacgccatgcagggtaagctggaaaacaatatgccgtttttctacgattatcatttcaatgaaaataaaatgaaggagttggagctgctgtgttctatgaaggaggtgtcgtttgacggtaatgacctggagaacatggtactctctcttcgcgaaaagtttttacaggaggtgaacagtctcatccagaaaccgtctcatcctttggccaagaccaaaacccttgtcaagtcattgatgaatcgcgccgagttattgctgcacgtgactattgcagctcagagcgggctgaccaggtctatttcaggtacccccgcggagacgcctgcctgcaagtccgcttcagaaacaaaagttattagccacgccgtgagacaaccggtctttctgagaagtatgagtgctccttcagacctggaaatgataggcaatgaggacctcgagtttacccgcgccaaccagaggcggaggcatgtgaccagtcaccgttcaagttcattcacacttctacagtcacttgccatcgaagactcccgtgacaagccaacctattctgtgctcctgggccagctcttcgccttcatcggtaccaacccggatcaggccgtgtcttcctcatcttttctcctggccgcccagaccagatggcgccgcgggaacactaggaaacaagcccttgtccacatgcgtgagctactcactgctgccgtccgtgttggcggggttacccatttggtgggacctgtcacaatggtgctccaaggcgggccccgcattgaagagctgacctgcggcggtatggtcgagcaagtgcaggaggcatttggggagacaatgacatctgttgtctccctgtgcgccagatacccgatcgcatgtgccaactcaatcggtcttttatgtacaatcccgtatacccgctccgaagaaaagtgcctggtgcgaagcggcttggtgcagctaatggatcgcttgtgcagcttgtctaatcagacagagtcttcctccagtgagaaacagactaagaagcagaaagttgctaccatggcctgggctgccttccaggtactggccaatcgctgcgtagaatgggagaaagaggagggaggcagcactgaggccgtccattccggactggcacggcaggtgtccagcttgcttactaaccacctcgcccgggccacagagtgttgcgggaaccaggccgcaggaaacgatgccctgcaggatgttttgtccctgcttaacgatctttcacggagccatattggtaaggcaattctgtcccaacctgcatgtgtgagcaaattactgtcactgcttctggaccagaggccctctcccaaactcgttctgattattctgcagctttgccgggccgccctgcccctgatgtccgtggaggattgtggaaatgtggaacttcctccttggagctactcagtcccaagcctcaactccgaacaggaggacccctctgatcctgcctctaagattgcgtctctgcttcttgccaagttagccgattatgtcgtccccggctgtcaaacagttttgagtcctaccgcctcggaaccggacactacactgacaaagacctctcctaaaaatagcctgaagggagataaagatcccggggaggagagcgaggctgtggatggcaagctttctatattcatccataagagggaagaccagagttctcacgaagtgttacagcctctgctaagctcgtctgaagggagaccttttcggctcggcaccggcgcaaatatggagaaagtagttaagatggatcgtgatatgaccaagggggggtgttgcgaagtcatcactgaagaggccgctgcagcactcaggaaggctaccaagtgggcccagagcggcctcatcgtctctataggcccgcccgtagaatcaatcaaccctgaaactgtctccggactatcaaccggagacaagaaaaaaacagcccagacatccatttgccgggagcgtaatagcgaactggccaggacagacccggtccggccttttatcagtggtcacgtagctaattcaatggccgccgaggttatcgctttgttgcattccctgctgatggccccggaatctaatgccgcgcagatatggactacaaccgctgagaaggtcctgagccgagctctgatgtatatccctcagttggggaaatacgcagagtccatcctggaaaacggcagttcttcagggaggaagctggctaagctccagagaatcgcccggcaggctgtggccgctctgtgtgccctgggagggtttaaagagactattaagatcgggtctgaagtccaagttttaggacgtggaatctcaggaagcataggcgtggtggcctccatcaacgaacaagagggaatcgccaccgtccgatttccccccatcgattgtcgcaagacctcgcaagcctccgacacgcttactattcccctttctcggctgtgcgtaccccgatcagaagctctcccgctgcacaaactgtccattactgagaaagtggttcaggcggtgcagtccatgctgttgccccaggagggctcgctgtctatccataccagcctacccgcgaccggagatggtagcgctccagtgatggcagtggtgcgcttgttggccgagatcagaactcgggcctgtctggtaatggcccaactactggaagactcccttttttgtgaagaattcattcagcaatgtcctgccgccgtggaggtgctgaatctggtggcccaggagtgctcagccggagaacggttggccgtcgtggaggtccagtgcgaaagactacgcatgctctatagagattgtgcccgcccaccgcccccaccactacaggccgaccgtcgccagccaaaggagatcacctggtccccatcacgtgtgttccctcccgtgcgtgcctgcatgttttcatctcaccttacatcagtgaccttcctggcagatccaagcgccggggggggactgcccaggggtacattcatttacgccacgagtcccctcccagtgcaggcccccagcttttactgggagatcgaaatagtgagctacggcgacaccgatgacgatacagggcctatcgtgtctttcggattcacaaccgaggcagaaaaaagagatggggcctggaccaacccagtgggcacatgcctctttcacaacaacgggcgcgctgtgcattacaatggttcctccctgctgcagtggaagagcgttcggctcgacgtcaccctgagccccggggatgtggctggtattggctgggagcggaccgaggggacgccacctccccctggacaaccagcgaagggaagagtgtattttacgtattgcggccagcggttgagcccatacctcgaagacgtgtccggcggtatgtggccagtggtacatattcagaagaaaaatacgaagacccgagctaacttcggcagtaggccattcgcttatgctgagggccaagcccaccgcaacgcagctgatctgtgcacagatctagccgaggagattagcgccaactttgaagcactgccgtttgccatggcttccgattccgacaacgacgctggtacaagtatcgcctcagaccctggcacacacggcccgccttgtaggatcgcggctgtggcaaccgctcagcagcaatacgactcagacacatcctgccattacaaggtagagctctcttacgaaaattttataacatccgggccagatcctcatccccctccaatcgcagacgatgagagtgacgacgacgacgatgacgatatcccacaagaggatcactacgcccttcttgtcaaggcatgggagaccaaagtgttccctaccatacggcgccggttccgaaacgaggccgaacgcaagagcggcctcgaccagatcaagggcgcactgcaattgggaatggttgatatcgcgcgccagactgtcgagtttctgtacgaggagaacgggggcattccccgcgacctctatctgcctaccatagaggatattaaagatgaagctaacaagttcactattgacaaggttcgtaaaggcctgaccgtcgtcactagatcaccagacagcaacaacgtggcctccagcgccgttggaacggctttacccaagtttgccatccgcggaatgctaaagacttttgggctgcatggagtggttctcgacgtagattccgtgaacgagctcgtccaagtcgaaacgtacctcagatcagagggagtgctcgttaggtattggtatccaatcgatatgctggagcggcccccagccggatatcgccgaacggccactaacggtttagtcactttggataacactaatttacagattcaccgggagctgcttcgctgcgaggccgctttggctaggttatactgtcgtatggcgctgctcaatatcttcgctcctaagttgccccatctcttcacacggctgttccatattccggctattcgcgacatcactctggaacatctccagttattgtccaaccagctgttagctccccctcttcccgatgggaccatatcaagctcctccatattgctggcacagtcgctgcagcattgtatccactcacaaaactgttccgctacagacctcttctatcagggaaactcacagacagttagggagtggctgaacgtcgccataaccagaacgttacaccagggagaagagagccttctggaacttacaaaacagatatgttcctttctacagactgcgcccgagcagtttccatccgaggaatttcctatcagtgagagcaaggtgaacatggatgtgaacttccccggggcagccttcgtggtcgtcagctgcaaggaaagtcagagtggattccgaaaagattccagcttatataaggccccttgggcaagagtgcttgtgtatgggctcggccataaggtcaagagaaatggccaacttaatctaatcgaagccgcctgctatccaagggacgcttccccggcaaataccggtttggcccctccgcccaccgctgaccaatatcccagtgtggtattgtccactgatcgggtgcacattaaactgggtgtcagtcctcctcctggggctgtcttggtattacactccctcccacttgaatttcccctggccatggcctttgctgaacagctgcttagctggaaatctgaggacagcgagggaaaaagcgaggacgaacccgacaccattcccacctctgtgctgcttcaggtcgtcgaattgctcggtaatttcctgtggaccacagacatggctgcctgtgtgaaggagttggtctttcacctgctcgcagaactcctacgcactgtacacaccctcgaacagagacgtcatccagccggactctcttccagtattgctttgcaactgaacccctgtcttgccatgcttatggccttgcagagtgagctgcataaactgtatgatgaggagacccagaactgggtgagcgggggagcctgcggcggatcgggcggggcagctgctggcgaccaaggacgctttagcacttactttcacgcattgatggagggctgtttggcggtagccgaggtcactctgccaactaatatgagcgtgacggcctcaggggtgacttcggccaccgcccctaacctttccgacagttcctcaagttcaagcagttctcccggacagacgccccaaagcccttcgctcctctccaaacggaaaaaggtgaagatgaagcgcgagaaagcctcaagctctggaaaacgtcaaagttcacggacggtggattcagaccccacagtgttgagtatagggggctcaaagcctgaggacatgctttggttccaccgggccttgaccttgttaataatcctgaggcacctaaccaggaaagaccctcaaggcctgggggtcacgagtgacgctattgcggatgcatgtcaggccctggtcggcccaacagctcattcacgcctgttggtgatcagcggtataccaacccacctcgacgagggcgtggtgcgcggcgccatccggaaggcctgtaacgcacatggcggtgtgtttaaggacgagatttatattcccctgcaggaggaagacactaaaaaaccaaaagacaaggctgaagggggtgatgggaaggtggagcctgagaaaacacttgccttcccagggacagactccatggaggtctcaacttcatcctcactaacccctgcaatgagcattagcgcctcagcatctacttcccaggcatcaatctgctcatcacagggtatcagccaaacagtctctgacctgtcagtcgatccactcccagctggcctggagttgcctatcccccccggactattggaacctcacgcggtcagctcacaggagtcattggacatcagtctgtgtagcactggatcgctaggctcattgggatcactaggcgaaccactcgataacgccgagaccgctagcgtctcagacatgggcagcatgtacaccgtcacatccctcgataaccagcccttggcagcccggcccatcaagggctttgcagtagtggaaatcaggtcccgggctaagatcgaaaagattcgagcctcgctgttcaataataacgacctgattgggttatcttcgctggacggagaagacgagttgatggagatgtcgactgaagaaattctgacagtttccgtggtgaaccaatccctcttcgacacacaaggctccccgggcctggaggattatttcaatgacaaaagtatcaaaggggaaaaactcgtcccaggagccagggaagtcctaactgagattttcaaatcgtgtgcccacagcgagcagactctctccttaactccggccaaacctatcagggtcagcgatatctacctgagcaaggaacagatcaatagccagacccctgggaatctccttcacctttttttcacaaacgtacgacccccgaaaaaggtgctggaagatcaactgacgcagatacttcgtaagtacggcgtacctaaacccaaatttgacaaatctaaatattcaaaggctgggaaagagcagcatcccgtcaaggtggtctcaaccaaacggcccataaccaaacccccagccaaggataaagctgtgctcaactccgtgtctagaactgccctgtcagagaaaaaacccacagtgaagccgaaaagcccagaaaaatctaagcctgatgagaaagacccagagaagtcgcccaccaaaaaacaagaggttccggaggaaaaatatcttacactggagggatttcacaaatttgtgattgaccgggcaaggcaagatattcgaagcgtgtggcgcgcaatcctgagctgtggatacgacctgcacttcgagaggtgcgcttgcattgacgtcaggcatgcacagaaggccagcaggaagtggacgctcgagatggacgtcgctcttgtgcagtacattaatcaactgtgtcgccacctagccataacccctgcccgtctgcatccacatgaagtctacctggatccggcagatgccgctgatccccgggtggcctgtttgctgaatgtgcccatcgagtctttgcggctgagatttgctttgctgcagagtctgaacacaaccctggagacctttttcctgccgttagttgaactccggcaaactcccatgtatacacatagcattgccgcccttctcaaggaagcaaagggactaattttttatgatacgaaggtgacagtgatgaatagggttttaaacgccaccgtccagcgcactgccgatcatgctgctcccgagatcaccttggatcctctggagatcgtcgggggcgagataagagctagcgaaaattcctatttctgtcaggccgctaggcagctggcgagcgtgccaagttcccagctctgcgtaaagttggccagcggcggtgacccaacctacgcttttaatatacgatttacgggagaagaagtccacggaacctccggatcctttaggcatttcctgtggcaagtgtgtaaagaattacagtctagttctttgtcgctgctccttttgtgtccaagttctgccgtaaacaaaaataagggaaagtacattctaacaccatccccaatcacatacggggaagagcagttgctccacttccttggccagcttctgggcatcgccatcagggccgacgtccccctcccgctggatttactgccctccttctggaaaacactggtgggagagccactggacccggaacaggatcttcaggaagctgatatcctcacttacaactacgtcaaaaagttcgagtccattaatgatgagacagagctagaagcactgtgcgccgaaattgcttcacagcacttggcaactgagagtcccgattcacctaacaaaccatgttgccgattcacttacctcacaatgaccggcgaagaagtggagctctgttccaggggccggcacatccttgtggcctgggagaacaaggacatctatgccgccgcaatacggtcattgaggttgcgggaactccagaacgtggaatgcgttaccgcggtcagggccggactgggaagtatcattccactgcagttactgacgatgctgagcccgctggaaatggagctgcgcacatgcggcctgccgtacattaacctggaatttctgaaggcgcacactatgtaccaggttggcctaatggaaactgaccaacacatagaatttttttggggcgctcttgaaatgtttacacaggaggaattgtgtaaatttataaagttcgcctgcaaccaggaacgcatccctttcacctgtccatgcaaggacggcgggcccgatacagcccacgtgccgccataccctatgaaaattgccccaccagatggtaccgccggctcacccgattctcgctacatccgtgtggaaacctgcatgtttatgatcaaactgccacagtactcaagcttggaaattatgctggagaagcttagatgtgccatccattatagagaggacccactgtcaggctag

SEQ ID NO: 41845 - DNA, 12741 bp, Artificial Sequence
  derived and/or modified sequence
atgggcctgctgctggtgttccccctcatccagagccagagcaggacagaccccagcctgtgcaacatcacagctgaggtgctgctgaactgcctgcgggactgccagcccctgagcctgaccaaggagcctgctgactgcctgaatggaattgagaccctgctgtgctcctggctggaggagaccagtgacaccggccgccacatcccccacaagcagaaggaaaatgctgctgctgccctggtggccctggcctgtgcccggggcagcctgaagacctttgtgcacacagtgcacctgctgcagaagcagacagacctgggcagcctgcctgtggctgatgtgctgtaccgcctgctgctgctggagggcggccctggcagccccagctgcctgctgggcggcaagcacatcgtgtcctggggctatgaggacatgctgcctgccccagacagcaacacaggcagcagcagcgagaacaaggatgctgacctgggccgctgcctgacagcagatggcctgtacctgtacaccaccaacagcgtgggccggggcgtgtccaagctgggcagcggcctgcacggcaccctgcggggctttgtgtactgcagaaatgaggagctggagcccggctgggtggcctttggaagtggcagcctgctgcacaggcctgtgtcctttgacaacaagccccacagcctcttccaggtgattgaccagaacaccctgcaggtgtgccaggtggtgcccatgcctgccaaccacctgcccatcggcagcaccatgagcacagtgcacctgagcagtgatggcacctacttctactggatctggagccctgccagcctgaatgagaagacccccaagggccacagcgtcttcatggacatctttgagctggtggtggagaatggagtgtttgtggccaaccccctgcaggagaggaccatcctgatgaggaaggagggggagagcgccaagagcatcaatgagatgctgctgagccggctgagccgctaccgggccagccccagcgccaccctggccgccctgaccggcagcaccatcagcaacaccctgaaggaggaccaggccgccaacaccagctgtggcctgcccctgaagatgctgaggaagacccccatctacacctgtggcacctacctggtgatgctggtgcccccacctgggggcagcggcagcagcgccaccaggagcctgtttggaggcaccagcggcctgagcagcctgaagagggcctgctatgacacagtgaacaacatgctgtggacctgcagcaatgactacatcgaccagtggtgcaaccctggcaaccaggccttccactacgtgtgccagaggctgggcgtgagccacatcatcacagagcccaaggaggaggccatcaccaccaatgaggtgatcaaccagctgctgcaccacgtgggcgccatgtgcatccaccagctgaacctgctggccaccaaccccaacctgcccatcacctctgtgctgggcaagcagcaccccatcgaggcccaccacctgagcagcatctgtgacatcatggagaaggccatggtgaatggagacacctgcatcatccgctgcatcctggtggtgttccaggtggtgttcaagttcttcttcagcccccagacagagaggaacagagacatcatccgccgcagcggcctgctgctgtggcagctgctgatggcccccaaggaccagatctgcccagagatccagaaggaggtgtgcctggccatcagcagcggcctgaacatcctgtacccaggagaaacagagatcaacaacctgctgaagctggtgctgacagaaggagagaggaacagcggcctgagccagctgagagatgtgatcctgaccaacctggccgagcagctgcagaacaaccgcttcggcagtgatgaagatgaccactaccgcctgaatgatgagctgctgcactacatcctgaagatcgtggtgcgggagagctgcatcctgatcaccaagtgccagacagtgtccaaggatgacttccagaagctgctgagcacagtgcctgctgccagcagctgcctgcgctacctgatggctgtgcagaaccacctgctgagcaacaccatcctgatcaagccagatgaaaatgatgacagcgacagcagcctgcagggcgagaccctgaaggtgcaggagctgaaggtgtccatcctggccctggccacccagatcctgaccggctgtgatgaggtgctggagatgctgcagcaggtgaccacagccctgatcaacagcgacattgctgaccgggagcagaggctgaagggcctggagcaggtgaccaaggccaccatgctgggccacctgctgcctgtgctgctgaccagcctgatgcaccccaacctgcagaccctcatcatggctgatgccctgatgccccagctggtgcagctggtgctgtacaccagccagacagccctgctgctgaagacccagtgccctgtgtttgctgaggtgggctgcagcccctgtggggccccagaccagaagtgccgcctcttcccagatgagaggatgctggaggagaaggaggagcccggcttcctgaccggcctgaagatcccagccccctgggccgccggcaagacagtggagaccgtgcaccctgtgcgggacaactacaagttcaaggagaccgtgcacatccctggggcccgctgcctgtacctgcgctttgacagccgctgcagcagccagtatgactatgacaagctggtgatctatgccggccccaacaccaacagcaggaaggtggccgagtatggaggcaacaccctgggctacggcagccgctctgtgctgggcaccggctggcccaaggacctggtgaagtgcatcagcccccccagcctgaacttcaaggtggagggggacacagtgaccttctcctttgagatgaggagcggccgggagcacaacaccccagacaaggccatgtggggctttgcctgcaccgtgcgggcccaggagagcagtgaagatgtgtctgggggcctgcccttcctggtggacctggccctgggcctgtctgtgctggcctgcagcatgctgcgcatcctgtacaatggacctgagatcaccaaggaggaggaggcctgccaggagctgctgcggagcaagctgctgcagcgctgccagtggcaggtggaggccaatggagtcatcagccctgccctgacccccagccccagccccctgcccctgaccattgaagaagatcgggagttcacctaccccagtgatgtgctggtgccccctgtgggcaactactttgacctgccccgcatccggctgcccccaggcatcatgatcaagctgcgggagatcagcggccgggcccggccccagttccggcccagcatcaaggaggtgatccagccagatgtgatggaggagatggtggtgtcctgtgtgatcaagcacctgaacctggtggatgccctgcagagcctcatcaacttccagtaccaggaggagcacgccgaggagtatgacctgctgtgcaagatcatgggagagaccttcaagaagctgaatgccatggagcggcagctgcagagcgtggccgagctggagcagaagtggcagagcgaggtggatgatgccatgcagggcaagctggagaacaacatgcccttcttctatgactaccacttcaatgaaaacaagatgaaggagctggagctgctgtgcagcatgaaggaggtgtcctttgatggaaatgacctggagaacatggtgctgagcctgcgggagaagttcctgcaggaggtgaacagcctcatccagaagcccagccaccccctggccaagaccaagaccctggtgaagagcctgatgaacagagctgagctgctgctgcacgtgaccatcgccgcccagagcggcctgaccaggagcatcagcggcaccccagctgagaccccagcctgcaagagcgccagcgagaccaaggtgatcagccatgctgtgcggcagcccgtcttcctgcgctccatgtctgcccccagcgacctggagatgattggaaatgaagacctggagttcacccgggccaaccagaggagaagacatgtgaccagccacaggagcagcagcttcaccctgctgcagagcctggccatcgaggacagccgggacaagcccacctacagcgtgctgctgggccagctgtttgccttcatcggcaccaacccagaccaggccgtgagcagcagcagcttcctgctggccgcccagacccgctggaggcggggcaacaccaggaagcaggccctggtgcacatgagggagctgctgacagctgctgtgcgggtgggcggcgtgacccacctggtgggccctgtgaccatggtgctgcagggcggcccccgcatcgaggagctgacctgtggcggcatggtggagcaggtgcaggaggccttcggggagaccatgacctctgtggtgtccctgtgtgcccgctaccccatcgcctgtgccaacagcatcggcctgctgtgcaccatcccctacaccaggtctgaggagaagtgcctggtgcgcagcggcctggtgcagctgatggaccggctgtgcagcctgagcaaccagacagagagcagcagcagcgagaagcagaccaagaagcagaaggtggccaccatggcctgggccgccttccaggtgctggccaacagatgtgtggagtgggagaaggaggagggcggcagcacagaagctgtgcacagcggcctggcccggcaggtgagcagcctgctgaccaaccacctggcccgggccacagagtgctgcggcaaccaggccgctggaaatgatgccctgcaggatgtgctgagcctgctgaatgacctgagccgcagccacatcggcaaggccatcctgagccagcctgcctgtgtgtccaagctgctgagcctgctgctggaccagaggcccagccccaagctggtgctgatcatcctgcagctgtgcagagctgccctgcccctgatgtctgtggaggactgtggaaatgtggagctgcccccctggagctacagcgtgcccagcctgaacagcgagcaggaggaccccagcgaccctgccagcaagatcgccagcctgctgctggccaagctggccgactatgtggtgcccggctgccagacagtgctgagccccacagccagcgagccagacaccaccctgaccaagaccagccccaagaacagcctgaagggggacaaggaccccggggaggagagcgaggccgtggatggcaagctgagcatcttcatccacaagcgggaggaccagagcagccatgaggtgctgcagcccctgctgagcagcagcgagggccggcccttccggctgggcactggagccaacatggagaaggtggtgaagatggaccgggacatgaccaagggcggctgctgtgaggtgatcacagaggaggccgccgccgccctgaggaaggccaccaagtgggcccagagcggcctcatcgtgtccatcggcccccctgtggagagcatcaaccctgagaccgtgtctggcctgagcactggagacaagaagaagacagcccagaccagcatctgccgggagagaaattctgagctggccaggacagatcctgtgcggcccttcatcagcggccacgtggccaacagcatggctgctgaggtgattgccctgctgcacagcctgctgatggcccctgagagcaatgctgcccagatctggaccaccacagctgagaaggtgctgagccgggccctgatgtacatcccccagctgggcaagtatgcagagagcatcctggagaatggcagcagcagcggcaggaagctggccaagctgcagagaattgcccggcaggccgtggccgccctgtgtgccctgggcggcttcaaggagaccatcaagattggcagcgaggtgcaggtgctgggccggggcatcagcggcagcattggagtggtggccagcatcaatgagcaggagggcatcgccaccgtgcgcttcccccccatcgactgcaggaagaccagccaggccagtgacaccctgaccatccccctgagccggctgtgtgtgcccaggtctgaggccctgcccctgcacaagctgagcatcacagagaaggtggtgcaggccgtgcagagcatgctgctgccccaggagggcagcctgagcatccacaccagcctgcctgccactggagatggcagcgcccctgtgatggctgtggtgcggctgctggccgagatccgcacccgggcctgcctggtgatggcccagctgctggaggacagcctcttctgtgaggagttcatccagcagtgcccagctgctgtggaggtgctgaacctggtggcccaggagtgcagcgctggggagcggctggccgtggtggaggtgcagtgtgagcggctgaggatgctgtacagagactgtgcccggcccccacctccacccctgcaggccgaccggcggcagcccaaggagatcacctggagccccagcagggtcttcccccctgtgcgggcctgcatgttcagcagccacctgacctctgtgaccttcctggccgaccccagcgctgggggcggcctgccccggggcaccttcatctatgccaccagccccctgcctgtgcaggcccccagcttctactgggagattgagatcgtgtcctatggagacacagatgatgacaccggccccatcgtgtcctttggcttcaccacagaggccgagaagagagatggagcctggaccaaccctgtgggcacctgcctcttccacaacaacggccgggctgtgcactacaacggcagcagcctgctgcagtggaagtctgtgcggctggatgtgaccctgagccctggagatgtggccggcatcggctgggagaggacagagggcaccccacctcctcctggccagcctgccaagggccgggtgtacttcacctactgcggccagaggctgagcccctacctggaggatgtgtctgggggcatgtggcctgtggtgcacatccagaagaagaacaccaagacccgggccaactttggcagccggccctttgcctatgcagagggccaggcccacagaaatgctgctgacctgtgcacagacctggccgaggagatcagcgccaactttgaggccctgccctttgccatggccagtgacagcgacaatgatgctggcaccagcatcgccagtgaccccggcacccacggccccccctgcagaattgctgctgtggccacagcccagcagcagtatgacagcgacaccagctgccactacaaggtggagctgtcctatgagaacttcatcaccagcggccctgacccccaccccccacccatcgcagatgatgaaagtgatgatgatgatgatgatgacatcccccaggaggaccactacgccctgctggtgaaggcctgggagaccaaggtgttccccaccatcagaagacgcttcagaaatgaagctgagaggaagagcggcctggaccagatcaagggggccctgcagctgggcatggtggacatcgcccggcagacagtggagttcctgtatgaggagaatggaggcatcccccgggacctgtacctgcccaccatcgaggacatcaaggatgaggccaacaagttcaccatcgacaaggtgaggaagggcctgactgtggtgaccaggagcccagacagcaacaacgtggccagcagcgctgtgggcacagccctgcccaagtttgccatccggggcatgctgaagaccttcggcctgcacggcgtggtgctggatgtggacagcgtgaatgagctggtgcaggtggagacctacctgcggagtgaaggagtgctggtgcgctactggtaccccatcgacatgctggagcggcccccagctggctacagaagaacagccaccaacggcctggtgaccctggacaacaccaacctgcagatccaccgggagctgctgcgctgtgaggccgccctggcccggctgtactgcaggatggccctgctgaacatctttgcccccaagctgccccacctgttcaccaggctcttccacatcccagccatccgggacatcaccctggagcacctgcagctgctgagcaaccagctgctggccccacccctgcctgatggcaccatcagcagcagcagcatcctgctggcccagagcctgcagcactgcatccacagccagaactgcagcgccacagacctcttctaccagggcaacagccagacagtgcgggagtggctgaatgtggccatcaccaggaccctgcaccagggcgaggagagcctgctggagctgaccaagcagatctgcagcttcctgcagacagcccctgagcagttccccagcgaggagttccccatcagcgagagcaaggtgaacatggatgtgaacttccctggggccgcctttgtggtggtgtcctgcaaggagagccagagcggcttcaggaaggacagcagcctgtacaaggccccctgggcccgggtgctggtgtatggcctgggccacaaggtgaagagaaatggccagctgaacctgattgaggccgcctgctaccccagagatgccagccctgccaacacaggcctggcccccccacccacagctgaccagtaccccagcgtggtgctgagcacagacagagtgcacatcaagctgggcgtgtccccacctcctggagctgtgctggtgctgcacagcctgcccctggagttccccctggccatggcctttgctgagcagctgctgtcctggaagtctgaggacagcgagggcaagtcagaagatgagccagacaccatccccacctctgtgctgctgcaggtggtggagctgctgggcaacttcctgtggaccacagacatggccgcctgtgtgaaggagctggtgttccacctgctggccgagctgctgaggacagtgcacaccctggagcagaggaggcaccctgctggcctgagcagcagcatcgccctgcagctgaacccctgcctggccatgctgatggccctgcagagcgagctgcacaagctgtatgatgaggagacccagaactgggtgtctgggggcgcctgtggcggcagcggcggcgctgctgctggggaccagggccgcttcagcacctacttccacgccctgatggagggctgcctggccgtggccgaggtgaccctgcccaccaacatgtctgtgacagccagcggcgtgaccagcgccacagcccccaacctgagtgacagcagcagcagcagcagcagcagccctggccagaccccccagagccccagcctgctgagcaagaggaagaaggtgaagatgaagcgggagaaggccagcagcagcggcaagaggcagagcagcaggacagtggacagcgaccccaccgtgctgagcattggaggcagcaagccagaggacatgctgtggttccaccgggccctgaccctgctgatcatcctgcggcacctgaccaggaaggacccccagggcctgggcgtgaccagtgatgccatcgcagatgcctgccaggccctggtgggccccacagcccacagccggctgctggtgatcagcggcatccccacccacctggatgaaggagtggtgcggggggccatcaggaaggcctgcaatgcccacggcggcgtcttcaaggatgagatctacatccccctgcaggaggaggacaccaagaagcccaaggacaaggccgagggcggagatggcaaggtggagcctgagaagaccctggccttccctggaacagacagcatggaggtgtccaccagcagcagcctgaccccagccatgagcatcagcgccagcgccagcaccagccaggccagcatctgcagcagccagggcatcagccagacagtgtctgacctgtctgtggaccccctgcctgctggcctggagctgcccatccccccaggcctgctggagccccatgctgtgagcagccaggagagcctggacatcagcctgtgcagcacaggcagcctgggcagcctgggcagcctgggggagcccctggacaatgctgagacagcctctgtgtctgacatgggctccatgtacacagtgaccagcctggacaaccagcccctggccgcccggcccatcaagggctttgctgtggtggagatccgcagccgggccaagattgagaagatccgggccagcctcttcaacaacaatgacctgattggcctgagcagcctggatggagaagatgagctgatggagatgagcacagaggagatcctgactgtgtctgtggtgaaccagagcctgtttgacacccagggcagccctggcctggaggactacttcaatgacaagagcatcaagggggagaagctggtgcctggggcccgggaggtgctgacagagatcttcaagagctgtgcccacagcgagcagaccctgagcctgaccccagccaagcccatccgggtgtctgacatctacctgagcaaggagcagatcaacagccagaccccaggcaacctgctgcacctgttcttcaccaacgtgcggccccccaagaaggtgctggaggaccagctgacccagatcctgaggaaatatggagtgcccaagcccaagtttgacaagagcaagtacagcaaggccggcaaggagcagcaccctgtgaaggtggtgtccaccaagaggcccatcaccaagcccccagccaaggacaaggctgtgctgaacagcgtgtccaggacagccctgtctgagaagaagcccaccgtgaagcccaagagccctgagaagagcaagccagatgagaaggaccctgagaagagccccaccaagaagcaggaggtgcctgaggagaagtacctgaccctggagggcttccacaagtttgtgattgaccgggcccggcaggacatccgctctgtgtggagggccatcctgagctgtggctatgacctgcactttgagcgctgtgcctgcattgatgtgagacatgcccagaaggccagcaggaagtggaccctggagatggatgtggccctggtgcagtacatcaaccagctgtgccgccacctggccatcaccccagcccggctgcacccccatgaggtgtacctggaccctgcagatgctgctgacccccgggtggcctgcctgctgaatgtgcccatcgagagcctgcggctgcgctttgccctgctgcagagcctgaacaccaccctggagaccttcttcctgcccctggtggagctgcggcagacccccatgtacacccacagcattgctgccctgctgaaggaggccaagggcctcatcttctatgacaccaaggtgacagtgatgaacagagtgctgaatgccaccgtgcagaggacagctgaccacgccgcccctgagatcaccctggaccccctggagatcgtgggcggggagatccgggccagcgagaacagctacttctgccaggccgcccggcagctggcctctgtgcccagcagccagctgtgtgtgaagctggccagcggcggggaccccacctacgccttcaacatccgcttcaccggggaggaggtgcacggcaccagcggcagcttccgccacttcctgtggcaggtgtgcaaggagctgcagagcagcagcctgagcctgctgctgctgtgccccagcagcgctgtgaacaagaacaagggcaagtacatcctgacccccagccccatcacctacggggaggagcagctgctgcacttcctgggccagctgctgggcatcgccatccgggcagatgtgcccctgcccctggacctgctgcccagcttctggaagaccctggtgggggagcccctggaccctgagcaggacctgcaggaggccgacatcctgacctacaactacgtgaagaagtttgagagcatcaatgatgaaacagagctggaggccctgtgtgccgagatcgccagccagcacctggccacagagagcccagacagccccaacaagccctgctgccgcttcacctacctgaccatgaccggggaggaggtggagctgtgcagccggggccgccacatcctggtggcctgggagaacaaggacatctatgctgctgccatccgcagcctgcggctgcgggagctgcagaatgtggagtgtgtgacagctgtgcgggccggcctgggcagcatcatccccctgcagctgctgaccatgctgagccccctggagatggagctgcggacctgtggcctgccctacatcaacctggagttcctgaaggcccacaccatgtaccaggtgggcctgatggagacagaccagcacatcgagttcttctggggcgccctggagatgttcacccaggaggagctgtgcaagttcatcaagtttgcctgcaaccaggagcgcatccccttcacctgcccctgcaaggatggcggccctgacacagcccacgtgcccccctaccccatgaagatcgcccccccagatggaacagctggcagcccagacagccgctacatccgggtggagacctgcatgttcatgatcaagctgccccagtacagcagcctggagatcatgctggagaagctgcgctgtgccatccactaccgggaggaccccctgtctggatag

SEQ ID NO: 41846 - DNA, 11991 bp, Artificial Sequence
  derived and/or modified sequence
atgcctgccaaccacctgcccatcggcagcaccatgagcacagtgcacctgagcagtgatggcacctacttctactggatctggagccctgccagcctgaatgagaagacccccaagggccacagcgtcttcatggacatctttgagctggtggtggagaatggagtgtttgtggccaaccccctgcaggagaggaccatcctgatgaggaaggagggggagagcgccaagagcatcaatgagatgctgctgagccggctgagccgctaccgggccagccccagcgccaccctggccgccctgaccggcagcaccatcagcaacaccctgaaggaggaccaggccgccaacaccagctgtggcctgcccctgaagatgctgaggaagacccccatctacacctgtggcacctacctggtgatgctggtgcccccacctgggggcagcggcagcagcgccaccaggagcctgtttggaggcaccagcggcctgagcagcctgaagagggcctgctatgacacagtgaacaacatgctgtggacctgcagcaatgactacatcgaccagtggtgcaaccctggcaaccaggccttccactacgtgtgccagaggctgggcgtgagccacatcatcacagagcccaaggaggaggccatcaccaccaatgaggtgatcaaccagctgctgcaccacgtgggcgccatgtgcatccaccagctgaacctgctggccaccaaccccaacctgcccatcacctctgtgctgggcaagcagcaccccatcgaggcccaccacctgagcagcatctgtgacatcatggagaaggccatggtgaatggagacacctgcatcatccgctgcatcctggtggtgttccaggtggtgttcaagttcttcttcagcccccagacagagaggaacagagacatcatccgccgcagcggcctgctgctgtggcagctgctgatggcccccaaggaccagatctgcccagagatccagaaggaggtgtgcctggccatcagcagcggcctgaacatcctgtacccaggagaaacagagatcaacaacctgctgaagctggtgctgacagaaggagagaggaacagcggcctgagccagctgagagatgtgatcctgaccaacctggccgagcagctgcagaacaaccgcttcggcagtgatgaagatgaccactaccgcctgaatgatgagctgctgcactacatcctgaagatcgtggtgcgggagagctgcatcctgatcaccaagtgccagacagtgtccaaggatgacttccagaagctgctgagcacagtgcctgctgccagcagctgcctgcgctacctgatggctgtgcagaaccacctgctgagcaacaccatcctgatcaagccagatgaaaatgatgacagcgacagcagcctgcagggcgagaccctgaaggtgcaggagctgaaggtgtccatcctggccctggccacccagatcctgaccggctgtgatgaggtgctggagatgctgcagcaggtgaccacagccctgatcaacagcgacattgctgaccgggagcagaggctgaagggcctggagcaggtgaccaaggccaccatgctgggccacctgctgcctgtgctgctgaccagcctgatgcaccccaacctgcagaccctcatcatggctgatgccctgatgccccagctggtgcagctggtgctgtacaccagccagacagccctgctgctgaagacccagtgccctgtgtttgctgaggtgggctgcagcccctgtggggccccagaccagaagtgccgcctcttcccagatgagaggatgctggaggagaaggaggagcccggcttcctgaccggcctgaagatcccagccccctgggccgccggcaagacagtggagaccgtgcaccctgtgcgggacaactacaagttcaaggagaccgtgcacatccctggggcccgctgcctgtacctgcgctttgacagccgctgcagcagccagtatgactatgacaagctggtgatctatgccggccccaacaccaacagcaggaaggtggccgagtatggaggcaacaccctgggctacggcagccgctctgtgctgggcaccggctggcccaaggacctggtgaagtgcatcagcccccccagcctgaacttcaaggtggagggggacacagtgaccttctcctttgagatgaggagcggccgggagcacaacaccccagacaaggccatgtggggctttgcctgcaccgtgcgggcccaggagagcagtgaagatgtgtctgggggcctgcccttcctggtggacctggccctgggcctgtctgtgctggcctgcagcatgctgcgcatcctgtacaatggacctgagatcaccaaggaggaggaggcctgccaggagctgctgcggagcaagctgctgcagcgctgccagtggcaggtggaggccaatggagtcatcagccctgccctgacccccagccccagccccctgcccctgaccattgaagaagatcgggagttcacctaccccagtgatgtgctggtgccccctgtgggcaactactttgacctgccccgcatccggctgcccccaggcatcatgatcaagctgcgggagatcagcggccgggcccggccccagttccggcccagcatcaaggaggtgatccagccagatgtgatggaggagatggtggtgtcctgtgtgatcaagcacctgaacctggtggatgccctgcagagcctcatcaacttccagtaccaggaggagcacgccgaggagtatgacctgctgtgcaagatcatgggagagaccttcaagaagctgaatgccatggagcggcagctgcagagcgtggccgagctggagcagaagtggcagagcgaggtggatgatgccatgcagggcaagctggagaacaacatgcccttcttctatgactaccacttcaatgaaaacaagatgaaggagctggagctgctgtgcagcatgaaggaggtgtcctttgatggaaatgacctggagaacatggtgctgagcctgcgggagaagttcctgcaggaggtgaacagcctcatccagaagcccagccaccccctggccaagaccaagaccctggtgaagagcctgatgaacagagctgagctgctgctgcacgtgaccatcgccgcccagagcggcctgaccaggagcatcagcggcaccccagctgagaccccagcctgcaagagcgccagcgagaccaaggtgatcagccatgctgtgcggcagcccgtcttcctgcgctccatgtctgcccccagcgacctggagatgattggaaatgaagacctggagttcacccgggccaaccagaggagaagacatgtgaccagccacaggagcagcagcttcaccctgctgcagagcctggccatcgaggacagccgggacaagcccacctacagcgtgctgctgggccagctgtttgccttcatcggcaccaacccagaccaggccgtgagcagcagcagcttcctgctggccgcccagacccgctggaggcggggcaacaccaggaagcaggccctggtgcacatgagggagctgctgacagctgctgtgcgggtgggcggcgtgacccacctggtgggccctgtgaccatggtgctgcagggcggcccccgcatcgaggagctgacctgtggcggcatggtggagcaggtgcaggaggccttcggggagaccatgacctctgtggtgtccctgtgtgcccgctaccccatcgcctgtgccaacagcatcggcctgctgtgcaccatcccctacaccaggtctgaggagaagtgcctggtgcgcagcggcctggtgcagctgatggaccggctgtgcagcctgagcaaccagacagagagcagcagcagcgagaagcagaccaagaagcagaaggtggccaccatggcctgggccgccttccaggtgctggccaacagatgtgtggagtgggagaaggaggagggcggcagcacagaagctgtgcacagcggcctggcccggcaggtgagcagcctgctgaccaaccacctggcccgggccacagagtgctgcggcaaccaggccgctggaaatgatgccctgcaggatgtgctgagcctgctgaatgacctgagccgcagccacatcggcaaggccatcctgagccagcctgcctgtgtgtccaagctgctgagcctgctgctggaccagaggcccagccccaagctggtgctgatcatcctgcagctgtgcagagctgccctgcccctgatgtctgtggaggactgtggaaatgtggagctgcccccctggagctacagcgtgcccagcctgaacagcgagcaggaggaccccagcgaccctgccagcaagatcgccagcctgctgctggccaagctggccgactatgtggtgcccggctgccagacagtgctgagccccacagccagcgagccagacaccaccctgaccaagaccagccccaagaacagcctgaagggggacaaggaccccggggaggagagcgaggccgtggatggcaagctgagcatcttcatccacaagcgggaggaccagagcagccatgaggtgctgcagcccctgctgagcagcagcgagggccggcccttccggctgggcactggagccaacatggagaaggtggtgaagatggaccgggacatgaccaagggcggctgctgtgaggtgatcacagaggaggccgccgccgccctgaggaaggccaccaagtgggcccagagcggcctcatcgtgtccatcggcccccctgtggagagcatcaaccctgagaccgtgtctggcctgagcactggagacaagaagaagacagcccagaccagcatctgccgggagagaaattctgagctggccaggacagatcctgtgcggcccttcatcagcggccacgtggccaacagcatggctgctgaggtgattgccctgctgcacagcctgctgatggcccctgagagcaatgctgcccagatctggaccaccacagctgagaaggtgctgagccgggccctgatgtacatcccccagctgggcaagtatgcagagagcatcctggagaatggcagcagcagcggcaggaagctggccaagctgcagagaattgcccggcaggccgtggccgccctgtgtgccctgggcggcttcaaggagaccatcaagattggcagcgaggtgcaggtgctgggccggggcatcagcggcagcattggagtggtggccagcatcaatgagcaggagggcatcgccaccgtgcgcttcccccccatcgactgcaggaagaccagccaggccagtgacaccctgaccatccccctgagccggctgtgtgtgcccaggtctgaggccctgcccctgcacaagctgagcatcacagagaaggtggtgcaggccgtgcagagcatgctgctgccccaggagggcagcctgagcatccacaccagcctgcctgccactggagatggcagcgcccctgtgatggctgtggtgcggctgctggccgagatccgcacccgggcctgcctggtgatggcccagctgctggaggacagcctcttctgtgaggagttcatccagcagtgcccagctgctgtggaggtgctgaacctggtggcccaggagtgcagcgctggggagcggctggccgtggtggaggtgcagtgtgagcggctgaggatgctgtacagagactgtgcccggcccccacctccacccctgcaggccgaccggcggcagcccaaggagatcacctggagccccagcagggtcttcccccctgtgcgggcctgcatgttcagcagccacctgacctctgtgaccttcctggccgaccccagcgctgggggcggcctgccccggggcaccttcatctatgccaccagccccctgcctgtgcaggcccccagcttctactgggagattgagatcgtgtcctatggagacacagatgatgacaccggccccatcgtgtcctttggcttcaccacagaggccgagaagagagatggagcctggaccaaccctgtgggcacctgcctcttccacaacaacggccgggctgtgcactacaacggcagcagcctgctgcagtggaagtctgtgcggctggatgtgaccctgagccctggagatgtggccggcatcggctgggagaggacagagggcaccccacctcctcctggccagcctgccaagggccgggtgtacttcacctactgcggccagaggctgagcccctacctggaggatgtgtctgggggcatgtggcctgtggtgcacatccagaagaagaacaccaagacccgggccaactttggcagccggccctttgcctatgcagagggccaggcccacagaaatgctgctgacctgtgcacagacctggccgaggagatcagcgccaactttgaggccctgccctttgccatggccagtgacagcgacaatgatgctggcaccagcatcgccagtgaccccggcacccacggccccccctgcagaattgctgctgtggccacagcccagcagcagtatgacagcgacaccagctgccactacaaggtggagctgtcctatgagaacttcatcaccagcggccctgacccccaccccccacccatcgcagatgatgaaagtgatgatgatgatgatgatgacatcccccaggaggaccactacgccctgctggtgaaggcctgggagaccaaggtgttccccaccatcagaagacgcttcagaaatgaagctgagaggaagagcggcctggaccagatcaagggggccctgcagctgggcatggtggacatcgcccggcagacagtggagttcctgtatgaggagaatggaggcatcccccgggacctgtacctgcccaccatcgaggacatcaaggatgaggccaacaagttcaccatcgacaaggtgaggaagggcctgactgtggtgaccaggagcccagacagcaacaacgtggccagcagcgctgtgggcacagccctgcccaagtttgccatccggggcatgctgaagaccttcggcctgcacggcgtggtgctggatgtggacagcgtgaatgagctggtgcaggtggagacctacctgcggagtgaaggagtgctggtgcgctactggtaccccatcgacatgctggagcggcccccagctggctacagaagaacagccaccaacggcctggtgaccctggacaacaccaacctgcagatccaccgggagctgctgcgctgtgaggccgccctggcccggctgtactgcaggatggccctgctgaacatctttgcccccaagctgccccacctgttcaccaggctcttccacatcccagccatccgggacatcaccctggagcacctgcagctgctgagcaaccagctgctggccccacccctgcctgatggcaccatcagcagcagcagcatcctgctggcccagagcctgcagcactgcatccacagccagaactgcagcgccacagacctcttctaccagggcaacagccagacagtgcgggagtggctgaatgtggccatcaccaggaccctgcaccagggcgaggagagcctgctggagctgaccaagcagatctgcagcttcctgcagacagcccctgagcagttccccagcgaggagttccccatcagcgagagcaaggtgaacatggatgtgaacttccctggggccgcctttgtggtggtgtcctgcaaggagagccagagcggcttcaggaaggacagcagcctgtacaaggccccctgggcccgggtgctggtgtatggcctgggccacaaggtgaagagaaatggccagctgaacctgattgaggccgcctgctaccccagagatgccagccctgccaacacaggcctggcccccccacccacagctgaccagtaccccagcgtggtgctgagcacagacagagtgcacatcaagctgggcgtgtccccacctcctggagctgtgctggtgctgcacagcctgcccctggagttccccctggccatggcctttgctgagcagctgctgtcctggaagtctgaggacagcgagggcaagtcagaagatgagccagacaccatccccacctctgtgctgctgcaggtggtggagctgctgggcaacttcctgtggaccacagacatggccgcctgtgtgaaggagctggtgttccacctgctggccgagctgctgaggacagtgcacaccctggagcagaggaggcaccctgctggcctgagcagcagcatcgccctgcagctgaacccctgcctggccatgctgatggccctgcagagcgagctgcacaagctgtatgatgaggagacccagaactgggtgtctgggggcgcctgtggcggcagcggcggcgctgctgctggggaccagggccgcttcagcacctacttccacgccctgatggagggctgcctggccgtggccgaggtgaccctgcccaccaacatgtctgtgacagccagcggcgtgaccagcgccacagcccccaacctgagtgacagcagcagcagcagcagcagcagccctggccagaccccccagagccccagcctgctgagcaagaggaagaaggtgaagatgaagcgggagaaggccagcagcagcggcaagaggcagagcagcaggacagtggacagcgaccccaccgtgctgagcattggaggcagcaagccagaggacatgctgtggttccaccgggccctgaccctgctgatcatcctgcggcacctgaccaggaaggacccccagggcctgggcgtgaccagtgatgccatcgcagatgcctgccaggccctggtgggccccacagcccacagccggctgctggtgatcagcggcatccccacccacctggatgaaggagtggtgcggggggccatcaggaaggcctgcaatgcccacggcggcgtcttcaaggatgagatctacatccccctgcaggaggaggacaccaagaagcccaaggacaaggccgagggcggagatggcaaggtggagcctgagaagaccctggccttccctggaacagacagcatggaggtgtccaccagcagcagcctgaccccagccatgagcatcagcgccagcgccagcaccagccaggccagcatctgcagcagccagggcatcagccagacagtgtctgacctgtctgtggaccccctgcctgctggcctggagctgcccatccccccaggcctgctggagccccatgctgtgagcagccaggagagcctggacatcagcctgtgcagcacaggcagcctgggcagcctgggcagcctgggggagcccctggacaatgctgagacagcctctgtgtctgacatgggctccatgtacacagtgaccagcctggacaaccagcccctggccgcccggcccatcaagggctttgctgtggtggagatccgcagccgggccaagattgagaagatccgggccagcctcttcaacaacaatgacctgattggcctgagcagcctggatggagaagatgagctgatggagatgagcacagaggagatcctgactgtgtctgtggtgaaccagagcctgtttgacacccagggcagccctggcctggaggactacttcaatgacaagagcatcaagggggagaagctggtgcctggggcccgggaggtgctgacagagatcttcaagagctgtgcccacagcgagcagaccctgagcctgaccccagccaagcccatccgggtgtctgacatctacctgagcaaggagcagatcaacagccagaccccaggcaacctgctgcacctgttcttcaccaacgtgcggccccccaagaaggtgctggaggaccagctgacccagatcctgaggaaatatggagtgcccaagcccaagtttgacaagagcaagtacagcaaggccggcaaggagcagcaccctgtgaaggtggtgtccaccaagaggcccatcaccaagcccccagccaaggacaaggctgtgctgaacagcgtgtccaggacagccctgtctgagaagaagcccaccgtgaagcccaagagccctgagaagagcaagccagatgagaaggaccctgagaagagccccaccaagaagcaggaggtgcctgaggagaagtacctgaccctggagggcttccacaagtttgtgattgaccgggcccggcaggacatccgctctgtgtggagggccatcctgagctgtggctatgacctgcactttgagcgctgtgcctgcattgatgtgagacatgcccagaaggccagcaggaagtggaccctggagatggatgtggccctggtgcagtacatcaaccagctgtgccgccacctggccatcaccccagcccggctgcacccccatgaggtgtacctggaccctgcagatgctgctgacccccgggtggcctgcctgctgaatgtgcccatcgagagcctgcggctgcgctttgccctgctgcagagcctgaacaccaccctggagaccttcttcctgcccctggtggagctgcggcagacccccatgtacacccacagcattgctgccctgctgaaggaggccaagggcctcatcttctatgacaccaaggtgacagtgatgaacagagtgctgaatgccaccgtgcagaggacagctgaccacgccgcccctgagatcaccctggaccccctggagatcgtgggcggggagatccgggccagcgagaacagctacttctgccaggccgcccggcagctggcctctgtgcccagcagccagctgtgtgtgaagctggccagcggcggggaccccacctacgccttcaacatccgcttcaccggggaggaggtgcacggcaccagcggcagcttccgccacttcctgtggcaggtgtgcaaggagctgcagagcagcagcctgagcctgctgctgctgtgccccagcagcgctgtgaacaagaacaagggcaagtacatcctgacccccagccccatcacctacggggaggagcagctgctgcacttcctgggccagctgctgggcatcgccatccgggcagatgtgcccctgcccctggacctgctgcccagcttctggaagaccctggtgggggagcccctggaccctgagcaggacctgcaggaggccgacatcctgacctacaactacgtgaagaagtttgagagcatcaatgatgaaacagagctggaggccctgtgtgccgagatcgccagccagcacctggccacagagagcccagacagccccaacaagccctgctgccgcttcacctacctgaccatgaccggggaggaggtggagctgtgcagccggggccgccacatcctggtggcctgggagaacaaggacatctatgctgctgccatccgcagcctgcggctgcgggagctgcagaatgtggagtgtgtgacagctgtgcgggccggcctgggcagcatcatccccctgcagctgctgaccatgctgagccccctggagatggagctgcggacctgtggcctgccctacatcaacctggagttcctgaaggcccacaccatgtaccaggtgggcctgatggagacagaccagcacatcgagttcttctggggcgccctggagatgttcacccaggaggagctgtgcaagttcatcaagtttgcctgcaaccaggagcgcatccccttcacctgcccctgcaaggatggcggccctgacacagcccacgtgcccccctaccccatgaagatcgcccccccagatggaacagctggcagcccagacagccgctacatccgggtggagacctgcatgttcatgatcaagctgccccagtacagcagcctggagatcatgctggagaagctgcgctgtgccatccactaccgggaggaccccctgtctggatag

SEQ ID NO: 41847 - DNA, 12741 bp, Artificial Sequence
  derived and/or modified sequence
atgggcctgctgctggtgttccccctgatccagagccagagccggaccgacccttcattatgcaatatcaccgccgaggtgttgctgaactgtctgcgtgactgtcaacccctgagtttaaccaaggagccagccgattgccttaatggtatagaaaccctcctgtgttcatggttagaggaaacaagcgataccggcagacatatcccacacaaacagaaggaaaacgcagcggccgcactcgtggccctcgcatgtgccagagggagtttgaagaccttcgtgcacacagtgcacctgctacaaaagcaaacggacctcggtagcctccctgtagccgacgtcctgtatcgcctgctcctgttggagggtgggcctggctctccgagctgcctactcggaggaaaacacattgtcagctggggctacgaagacatgctccctgctcccgactctaataccgggagttcctccgagaataaggacgcagacctggggcggtgcctgactgccgacggtctctatctgtacaccaccaacagcgtcggccgcggggtgtcgaagcttggcagcggcctgcacggaacgttgaggggattcgtttattgcagaaacgaagagctggaacccggttgggtcgcttttggttccggcagtctcctccacagacctgtgtccttcgataacaagccccacagtctgttccaggtgatcgaccagaatactctacaagtctgccaggtcgtgcctatgccggccaaccacctgcctattggcagtacgatgtccacggttcatttgagttctgacggtacctacttctactggatctggagtccagcatccctaaatgagaaaacccccaagggccacagtgtctttatggatatatttgagctcgttgtggagaacggggtgtttgtggccaatcctcttcaggagcggaccattttgatgcgcaaagaaggtgaatctgccaaaagcattaacgagatgctgctgagcaggctcagccgatacagggctagcccatccgcgacgctcgcagccctgactggatcaactatttctaatacactaaaggaagaccaggcggcaaacacatcttgcggcttacccctgaagatgctacggaaaactccaatctatacttgtggcacatatcttgtgatgctcgtcccacccccaggcggcagtgggagtagtgccacaaggtcacttttcggggggacatctgggttatcctcacttaagagggcctgttatgatacggtgaacaacatgctttggacgtgcagtaacgattatatcgaccagtggtgcaatccaggcaaccaggccttccactacgtgtgccagcgcctaggggttagccacattataaccgagcccaaggaagaagcaatcactacgaatgaagtcattaaccagctgctccaccacgtcggagcaatgtgtattcaccagctcaatttgctcgccacaaatcccaatctacccatcacttctgtgctcggtaagcagcatccaatcgaggctcaccacctgtccagtatctgtgatatcatggaaaaagctatggtaaacggcgatacatgcatcattaggtgcatcttagtggtgtttcaggtggtgtttaagtttttcttttcccctcagaccgagcgaaatcgcgatatcattcgacgctcaggcctgttgctttggcagcttcttatggccccaaaggaccagatctgccccgaaatacagaaggaggtatgcctggccatctcctctgggctgaatatactttacccaggagagaccgagatcaacaacttacttaagttggtcctgaccgaaggcgagcgcaattctgggctcagccagctgagagatgtcatactgactaaccttgctgagcagctccagaacaatcgttttgggtctgatgaggatgaccattaccgactgaacgatgaactacttcattatatcctgaaaatcgttgtgcgagagagttgtatccttatcaccaaatgtcagactgtgtccaaggatgacttccagaagctcctgtcgacggtgcctgctgcctccagctgtctcagatatcttatggcggtccaaaatcatctcctctctaacaccattctcatcaagcctgatgaaaacgatgactctgatagtagtttgcagggggagactcttaaagtacaggagctgaaagtgtcgattttggctttagccacccagatactgacaggttgcgatgaagttctggagatgctgcagcaggttaccaccgctctaatcaactccgacatcgctgacagggaacagcgattgaagggcctcgagcaggtcacgaaggctactatgctgggccaccttctccctgtgctcttgacctccttgatgcatccaaatctccaaactctgataatggcggacgcactaatgccccagctggtccagctggtgctgtacacctcccaaacagcgctgttacttaaaacgcagtgtcccgtgttcgccgaagtgggctgctccccttgcggcgctcctgatcagaagtgtcggctgttcccagacgaacggatgctagaggagaaggaagagcccggattcctgactggtctgaagatccctgccccctgggctgccggaaagacagttgaaacagttcaccctgtgcgtgacaattataagttcaaggagaccgtacatatcccaggtgcccggtgtctctatctgaggttcgactcgcggtgttcaagccagtatgattacgacaaactggtgatttacgcaggccccaatactaactcccgcaaggtagctgagtacggtgggaatactctaggctacgggtcccggtccgtgctgggaactggctggcctaaggatttagtgaaatgtatcagccctccctcactaaactttaaagtggagggcgataccgtgacattttcgttcgaaatgcgttccggtcgtgagcataacactcccgataaggcgatgtggggattcgcttgcacagtccgcgcacaggaatccagcgaagacgtcagcggcggcctcccattcctggtggatctggctttgggcctaagcgtgctggcatgctcaatgcttcggatcttgtataatggacccgagattaccaaggaggaagaagcgtgccaggaactgctcaggtctaagctcttgcagcgatgtcagtggcaggtagaggcaaatggcgtgatcagtcctgcacttacaccctcaccaagccccctccctcttactatcgaggaggatagggaatttacatacccgtctgatgtgcttgtgcccccggtaggcaactactttgatctccccagaatacgtctgcctccgggcattatgataaagcttcgcgagatctcgggacgcgcacgcccccagtttcggccaagcataaaggaggtgatccagccagatgtaatggaggagatggtagttagttgcgtgataaaacatctgaatctcgttgatgccctgcagtccctgatcaactttcagtatcaggaagagcatgccgaagagtacgatctcctatgcaagataatgggcgaaaccttcaagaaactgaatgctatggagcgacaactgcagtccgtcgcagaactcgaacagaagtggcaatccgaggtcgacgacgctatgcaggggaaactggagaataatatgccttttttttatgactaccacttcaatgaaaacaaaatgaaggagctcgagctactgtgttccatgaaggaagtatcttttgacggcaacgatcttgagaatatggttctgtcactcagggaaaagtttttgcaagaagtcaacagccttattcaaaaaccctcccatccactcgcaaagaccaagactctcgtcaagtccttaatgaatcgcgctgaactgcttcttcatgttactatcgcagcccaaagcggcttgaccagaagtatatcagggacccctgcagaaacacctgcctgtaaatctgctagtgaaacaaaggtcatatcacatgcagtccgtcagcctgttttccttcgttctatgtccgctcccagcgacctggagatgatcggaaatgaggatctcgagtttacccgcgcaaatcagcgtcgcagacatgttaccagccacagaagctctagctttactcttctccagtcactagcaattgaagacagtcgggataaacccacatatagcgttctgctgggccaactgttcgccttcattggcacgaacccagatcaggcagtgtcctctagcagtttccttctggctgcccaaactcgctggcgccggggaaatacgagaaaacaggcacttgtgcacatgcgggagttactcactgccgcagttcgggtcggaggggtgacgcatcttgttggacctgtgactatggtccttcaaggtggcccacggatagaagagcttacctgcggaggaatggtggagcaagtccaggaggcatttggcgaaaccatgacctctgtagtgagtctttgcgcaagatacccaatcgcatgcgcgaatagtataggattactctgcacgatcccatatactagaagcgaggagaaatgtctcgttaggtcggggttagttcaacttatggacaggctgtgttctctgtctaatcagacagagagttcatcttccgaaaaacagaccaagaagcagaaggtggctaccatggcctgggctgcttttcaggtgttagctaataggtgtgtcgagtgggagaaagaagagggcggctcaactgaagccgtgcattctggattggccaggcaggtctcctcactgctgaccaatcatttagcccgggcgactgagtgctgcggcaaccaggctgccggcaatgacgcgctccaagatgtgctgagtttgcttaacgatttatctaggtcccacatcggtaaggcgatactgtctcagcccgcctgcgtaagcaaattacttagcctgctgttagaccagaggccctctccgaagctggttttaattatcctccagttatgccgggctgcactaccactgatgagcgtcgaggattgtggcaatgtggagctgcctccttggtcctactctgtcccgtctctcaattcggagcaggaggacccctccgaccccgcgtccaagatcgcttccttgctccttgcaaagctggctgattacgtggtccctgggtgccagaccgtgttgagtcccaccgcaagcgagcctgatacaactctcaccaaaactagccccaagaattcactgaagggggacaaagatccaggcgaagaatctgaggctgtagacggtaagctgagcatcttcattcataaaagagaggaccagagctcccatgaagtgctccagccattgctgagcagcagcgaaggacgacccttcagactgggcaccggagctaacatggagaaagtggtgaaaatggaccgagatatgacaaagggcggctgttgcgaggtcatcacagaggaggctgccgccgccctgcgaaaggctaccaagtgggcgcagtcggggctgatagtgtctattggcccaccagtggagagtatcaatcctgaaacggtgagtggactgtctaccggagacaaaaaaaaaactgcccagacctccatctgcagggagcgaaactctgagctggcacgtaccgaccccgtgcgaccattcatctctggtcatgtcgcaaattccatggcggccgaggtaattgccctgttacactctttactgatggcgcctgagagtaacgccgctcagatctggacaacgactgcagagaaagtactgagcagagctctcatgtacatcccacagttgggcaagtatgccgagagtatcctcgagaatggcagcagttccggcaggaagttggcaaaattgcagcgaatcgctcgccaggccgttgcagcgctgtgtgcactcgggggctttaaagagacaatcaagatcgggagcgaagtgcaggtgctcggtagaggtatctcgggaagtataggggtcgtcgctagcattaacgaacaggaaggaatagctaccgtgcgcttccctcctattgactgcaggaagacttcacaagcgtcagatacactcaccataccgctgtcccggctttgtgtgccccggtccgaggctctgcctcttcacaaactcagcatcaccgagaaagttgtgcaggcagtgcaatcgatgctattgcctcaggaagggtccctctctatccacacttccctccctgcaaccggcgatgggtcggcaccagtgatggccgtggtacgtcttctggctgaaatcagaactagggcatgtctggttatggcccagctgcttgaagattctctcttttgcgaggagtttattcagcagtgccctgcagcagtcgaggttctgaacctggtggcgcaggaatgctcggctggagagcgtctggcggttgtcgaagtgcagtgcgaaaggctgagaatgttataccgcgactgtgcacggccgccaccccctcccttgcaggcagatcggcgccagcccaaagaaattacctggtctccgagcagagtgtttccaccagtcagggcttgtatgttcagcagccatctcacgtctgtgacatttctggcggacccctcagccgggggcggtcttcctagaggaacttttatttatgcaaccagcccgctgcccgtacaagcaccatctttctactgggagattgaaattgtatcttatggggatacggacgatgatactggaccgatagtgagctttggcttcaccacagaggcggaaaagagagacggcgcatggacgaaccctgtcggtacttgcctcttccacaacaatggaagagccgtccactacaatgggtcaagtctgctccagtggaaatccgtgaggcttgatgtcacactcagcccgggagacgttgctgggatcggctgggagcgcacagagggaactcccccacccccgggccagcccgcaaaggggagagtttatttcacctattgtgggcagcgcttgtccccttacctggaagatgttagcggcggtatgtggcccgttgtgcacattcagaagaaaaacactaagacacgggccaactttggctcacgcccattcgcctatgccgagggacaggcccacaggaacgcggcagacttatgtaccgacctggccgaagaaatatctgctaacttcgaggccctgcctttcgctatggcctccgattctgataacgacgcaggaactagtatcgcgagcgaccccgggactcatggccccccttgtcgcattgctgccgtcgcgacagcacagcaacagtatgactccgataccagctgccactacaaggtggagctttcatacgaaaacttcattacctcaggccccgacccccatccgccgcctatcgccgatgacgagtccgatgacgacgacgacgacgatatccctcaggaagaccactacgccctgctagtgaaggcatgggagacaaaagtgttccctacaatccggagacgctttcggaatgaagcagagagaaagtcgggactggatcagatcaaaggcgcgctgcaattaggtatggtcgacattgcccgacagaccgtggagtttctgtatgaagaaaatggcggaatacctcgcgatctgtacctgcctaccattgaggatatcaaggacgaggccaataaattcactatcgataaggtgcggaaagggctcacagtggtgacccgcagtccagattctaacaacgtcgcctcctctgctgtgggcaccgcgctgccgaaatttgccatcagaggaatgcttaagaccttcggactgcacggagtagtgcttgacgtggacagcgtcaacgagctggtgcaggtggagacatacttacgctccgaaggcgttctcgtgcgatattggtatcccattgacatgctggagcgacccccggcaggctaccggaggacagctacaaacgggttagtcactctggataacactaacctccagatacaccgcgaactattgagatgcgaagcggctctggcgaggttgtattgtcgcatggcgctgttgaatatctttgctcccaagctgcctcatttgtttactagattgtttcatatccccgcgatccgggacattactctggagcatttacagctcctcagtaaccagctcttggctccaccactccctgatggcactattagtagtagttcaatcctactcgcccaaagcctccagcactgtatccactcccagaactgctcagccacagaccttttttatcagggaaattcccagaccgtgcgcgaatggctgaacgtagcaatcacacgtacactccatcagggagaggagagcttgctggagctgacaaagcagatttgctccttcttgcagactgctccggagcagtttcccagtgaggagtttcctatctctgaatctaaggttaacatggatgtgaactttccaggagccgcattcgttgtggtctcctgtaaggagtctcagagtggctttcgcaaggactcttccctatataaggcaccttgggctcgtgttctcgtctacggtctggggcacaaagtaaaaaggaacggccagctcaacctgatcgaagccgcgtgctatcctagggatgcatctccggccaataccggactggccccccctccgaccgccgaccaatacccgtcagtggtgttgtccaccgatcgggtgcatattaagctcggagtcagtccgccgccaggcgccgttctggttctgcacagcctgcctctggagtttccgctcgccatggcctttgctgagcagttgctttcgtggaaatcagaggactccgagggaaagtcagaggacgagccagatacaattccaacatctgtgctgttacaagttgtggaactgctcgggaacttcctctggactaccgacatggccgcctgcgtgaaagagttggttttccaccttcttgccgagctcttacggaccgtccatacattggaacagcgccgccatcccgccgggttaagctcaagtattgccctgcagctgaatccatgcctggctatgctgatggcacttcaatcggaactccacaaactgtacgacgaggaaacacaaaattgggtttccggtggcgcgtgcggcggtagcggcggggcggccgcaggtgatcaagggcggtttagcacctactttcatgcccttatggaaggttgcttggccgttgccgaggtgacactccctacaaatatgtccgtgactgcctcaggcgtaacgtcggctaccgccccaaacttgagcgactcctcatcttcatcttcttcgtcgccaggacagaccccacagagccctagcctcttatctaagcgtaaaaaggtgaaaatgaaacgagaaaaggcttcttcctcaggaaaacgtcagagctctcgcacggtggatagcgatcctaccgtgctgtctatcgggggtagtaaacccgaagacatgctgtggttccatcgggctctcactctcctgatcattctgaggcacttgacaagaaaggacccgcagggactaggcgtgaccagcgatgccatcgctgacgcttgtcaggccttggtgggccccactgcccattcccggcttctggtcatcagcgggatccctacccatcttgacgagggcgtggtgagaggagccatcaggaaggcatgcaatgcacacggtggtgtctttaaggatgagatttatattccattgcaggaggaagacaccaagaaacctaaagacaaagctgagggcggcgacggcaaggtagagccagagaaaaccttggccttccctggaaccgacagcatggaggtttcaaccagttcatccctgaccccagcaatgtctatctctgcctcagcttccacgagccaggccagtatctgtagcagtcaaggaatctctcaaaccgtgtccgacttgtcggtggaccctttgccagcagggcttgagctgccgatcccacctggactcctggaaccacatgccgtatctagtcaagaaagcttggatatctctctgtgttctactggctctctgggctcacttgggtcactgggcgaacctctggacaatgcagagacggcatcagtctcggacatgggatcaatgtacactgttacatccctggacaatcagccccttgccgcacggcctatcaaggggttcgccgttgtggagattagatcgcgtgctaagatcgagaagatccgagcgtcattatttaacaataacgacctgataggactgtcctccctggacggcgaagacgagctcatggagatgtctactgaggaaattcttaccgtatctgtggtgaaccagagtttgttcgacacgcaagggagccctggtcttgaggactattttaacgacaaatcaatcaagggagaaaaacttgttccaggtgctcgcgaagttcttaccgagatcttcaaatcctgtgcccacagcgaacagacgctgagtctgactcccgccaagcccattagggtgtctgacatctacttaagcaaggagcaaatcaactcccagacccctgggaatctgctgcatctgttcttcacaaatgttagacctccaaagaaagttcttgaagatcagctcacacagattttgcgaaaatatggcgtgcccaagccgaagttcgataaatctaaatattccaaggcaggtaaggagcaacaccctgtaaaagtcgtctccacaaagcgccctattacaaagccacctgcaaaagataaagccgtgctcaactcagtcagccggactgctctttccgaaaagaaacctactgtgaagcctaaatctcccgagaaaagcaaacccgacgagaaggatcctgaaaagagccctactaagaaacaggaggtgccagaagaaaagtatctaaccctagagggattccacaagtttgtcatcgaccgcgcccgtcaggatataaggtcagtgtggagagcaatcctgtcttgcggctatgatctgcatttcgaacggtgcgcatgcatcgacgtacggcatgctcaaaaggcatcccgaaaatggactctggaaatggacgtggccctcgtccagtacatcaatcagctgtgccgccacttggcaataactcctgcacgtctgcaccctcacgaggtgtacctcgatccagcagacgctgctgacccccgcgtcgcctgtctgctgaacgtgccaatcgaatccctccgcctccgcttcgctctgctgcagagcctgaacaccaccttggaaacattcttcttgcctctcgtagagcttcgccagacccccatgtacactcattctatcgcagccctgctgaaggaagcaaaaggcttgatattttatgatacaaaagtgacagtgatgaatcgcgtcctgaatgccaccgtgcagagaactgcggaccacgccgcccccgagatcacacttgaccccctagagatcgttggaggggagattcgcgcgtcagagaacagctacttttgtcaggccgcccggcagttagcctctgttccaagttcacagctatgcgtcaaattggcttctgggggcgatccaacctatgctttcaatatccgttttacaggcgaggaggtacatggaacttccggcagcttcaggcacttcctttggcaggtgtgtaaagaactgcagagtagtagcctgtcgctgttactgctttgccccagctcggccgtgaataagaacaaagggaaatatatcctgacccccagtcctatcacctatggagaggagcagcttctccatttcctgggacaattactgggcattgctatccgcgcagacgtacccctgcccctggacttgctgccctccttttggaaaactctagtcggcgagcccctggaccccgagcaggacctgcaggaagcggacatcctgacatacaattatgtgaaaaagttcgaatccataaacgacgagactgagctcgaagccctgtgtgccgagattgcgagccagcacttggcaacggagtcccctgatagcccaaacaagccttgctgccggttcacttacctgactatgaccggtgaggaggtagagctctgttccaggggtcgtcacatcttggttgcctgggagaataaggacatttatgccgccgccatacggagtctccgcctgcgcgaacttcagaacgtggagtgcgttacagctgtgcgcgctggccttggcagcattatccctctgcagctcctgaccatgctgagtccgcttgaaatggaactgaggacatgcggtttgccatatattaacttagagttcctgaaggcacataccatgtatcaagtggggttgatggagacagaccagcatatcgagtttttctggggtgctctggagatgttcacccaagaggaactgtgcaagttcataaagtttgcttgtaaccaggaacggattcctttcacttgtccatgcaaagatggagggcctgataccgcccatgttcccccctaccctatgaagatcgcacctcctgacggaaccgctggcagccccgattctagatatattcgggttgagacttgtatgttcatgatcaaactcccccaatattcgtcactggagatcatgctggaaaagttgcgatgcgctatacattacagagaggacccactatccggctag

SEQ ID NO: 41848 - DNA, 11991 bp, Artificial Sequence
  derived and/or modified sequence
atgcccgccaaccacctgcccatcggcagcaccatgagcaccgtgcacttatctagcgacggcacttacttctattggatttggtctcctgcgtccctgaacgaaaaaacccccaaaggtcactccgtgttcatggatatttttgagttagtggttgaaaacggtgtattcgtggctaaccccctccaggaacgaactatcctaatgcgtaaggaaggagagtccgctaagagcatcaatgagatgctcctcagtcgtttatcccggtaccgtgcaagcccaagcgcaaccttggccgcgctgactggctccactatctcaaatacgctgaaggaggaccaagccgcgaatacaagttgtggcctacccctaaaaatgctgagaaagacgcccatctacacctgcggaacatatctggtgatgctcgtgccaccacccggagggtctggcagtagtgccacccgaagcctatttggaggcacctcaggcctgtcgagtttgaaacgcgcctgctacgacacagtgaacaacatgctttggacttgctcaaacgactacatcgaccagtggtgcaaccctggtaatcaggctttccactatgtctgtcaaaggcttggggtgtcacacattattactgaacccaaagaggaggccatcaccaccaatgaagtgatcaatcagctgctgcaccacgtaggagccatgtgcattcatcagctgaatttgctggctacaaaccctaacctccctattacctcagtactgggcaagcagcaccccatcgaggctcatcacctgagctccatctgcgacataatggaaaaggccatggtgaacggagatacgtgtatcataagatgtattttagtcgtatttcaggtagtgttcaagtttttcttcagtccacaaactgagaggaatcgcgacatcatacgaagatctggactgttgctctggcagcttctgatggccccaaaagatcagatttgtcccgaaatccagaaggaggtgtgcctggccatcagtagcggactgaacattctgtaccccggtgagacagaaataaacaatctgcttaagctcgtgctgacagaaggtgagcgcaatagtggcctatcccagctacgggatgtcattttaactaacctggccgagcagctgcagaacaaccggtttggatctgacgaggacgaccactaccggctgaacgacgagctgttgcactacatcctcaaaattgttgtgagagagagttgcatcctgatcactaagtgccagaccgtgagcaaggacgattttcaaaagcttctcagtaccgtcccagctgccagtagctgtctgcgttacctgatggcggtgcaaaatcatttgttaagcaacaccatcttaattaaaccagacgaaaatgatgacagtgacagctcactccagggggagacactgaaagtgcaggagttaaaggtcagcatactggcactggctacgcagatcctcactgggtgcgacgaagtgttggagatgcttcagcaggtgaccacagcgctgattaattcagacatcgcagatcgagaacagcgccttaaagggctggaacaggtgactaaggcaacaatgcttgggcacttgctgccggtgctgttgaccagcttgatgcatcccaatctgcagactctgattatggctgacgctcttatgccccagttagtgcagctggtcctgtacacatcccagaccgcactgctcctcaaaacccagtgcccagttttcgccgaagtcgggtgttcaccctgtggagcgccagaccaaaaatgccggctcttccccgacgaaagaatgcttgaagaaaaagaagagccggggttcctcaccggactgaagatccctgccccatgggccgctgggaaaacggtggagaccgttcacccggtgcgtgataattataaattcaaggagacggtacacattccgggcgctcggtgcttgtatttgcgcttcgatagccgctgttccagccagtacgattatgataagttggtgatctatgccgggcctaatacaaacagtcgcaaagttgccgagtacggcggcaatacgcttggttacggctccaggagcgtcctggggacggggtggccaaaggacctggtgaagtgcattagcccaccatctctgaactttaaggtggagggagatactgtgacattttctttcgagatgcgtagcggacgggagcataacacccccgataaagcgatgtgggggtttgcttgcaccgtgcgcgcgcaggaaagctcagaggacgtgagtggcggactgccttttttagtggacctggcactggggctgtctgtgctcgcctgctccatgttgcgcattttgtacaatggtcccgaaataaccaaagaggaggaggcgtgtcaagagctcctgcggtccaaactgctccagaggtgccagtggcaggtggaggctaatggcgtcatctcccccgccctgactccaagcccatcacctttacctctcacaattgaagaagaccgggagttcacatatccatcagatgtactggtcccccccgtgggcaattattttgacctgcccaggataagactccccccaggcatcatgatcaaactccgagagattagcgggcgcgccaggcctcagtttcggccgtcaattaaagaggtcatccagccagacgttatggaggaaatggtggtgtcatgtgtgataaaacatttaaacctggtggacgctctacaatctctcattaacttccaataccaggaggagcacgctgaagaatatgacctgctgtgcaagattatgggtgaaaccttcaagaaattgaacgccatggaaagacagctgcagtcagtcgccgagttagagcagaagtggcagtccgaagtggacgacgccatgcaagggaaactggaaaataatatgccctttttctatgattaccatttcaacgagaacaagatgaaagaactggaactgttatgttcgatgaaagaagttagttttgatgggaatgacttagaaaacatggttctttccctgcgggaaaaattcctgcaggaagtaaactccctcattcaaaaaccaagccaccctcttgcaaaaaccaagacccttgtcaagagtctgatgaatcgggctgagctgctcctgcacgttacgatcgcagcccagtcaggattaactcgcagcataagcggcacacccgcagagacacctgcgtgtaaatccgccagtgagactaaagtgatcagccatgcggtgcgccagcccgtgttccttaggagtatgagcgctccatcagacttagagatgatcgggaatgaagacctagagttcacccgggccaatcagaggcggaggcacgtcacttcccaccgctcttcctccttcacactcctacaaagtctggcaattgaagatagcagggataagccaacctactccgtactgctgggtcagttatttgccttcatcgggactaatcccgatcaagctgtgagctctagttcattcctgctcgcagcacagacgcgatggcggcgcggcaatacaaggaagcaggcccttgttcatatgagggaactcctgactgcagccgtgagagtggggggggtaacacacctcgttgggccggtaacaatggtgctgcaggggggacctagaatcgaggagctgacctgcgggggaatggtagaacaagttcaggaggccttcggcgaaacaatgacatcagtcgtttccctctgcgcacgataccctatcgcatgcgccaacagtatcggactgctgtgcactataccgtatacccgttctgaggaaaaatgtctcgttagaagcggacttgtgcagctgatggacaggctgtgtagcctgtcaaaccagactgagtccagttccagtgagaagcaaactaaaaaacaaaaggtggccaccatggcttgggcagcctttcaggtactggctaaccggtgcgtggagtgggagaaagaagagggcggaagcacagaggccgtacacagcggcctggcgcgccaggtgagcagcttactgactaatcacctcgcccgcgcaacggagtgttgtggcaaccaggcagcaggcaacgatgccctgcaggatgtgctgtctttgctgaatgatctctctcggtcgcatatcggtaaagcaattctcagccagcccgcatgtgtgagtaaattgctttcactgctcctcgatcagaggccatcccctaagctggtgctgattatcctgcagctgtgcagggccgcactccctctgatgtccgtggaggactgtggaaatgtggagctgcctccttggtcttattcagtgccgtccctgaactccgagcaagaagacccttccgaccctgcatccaaaatcgcaagtctgctcctggccaaactggctgactacgtcgtgccaggatgtcagaccgttctgtcccccactgctagtgaaccagatactaccttgaccaagactagtccaaagaacagcttgaagggcgacaaggaccccggcgaggaatctgaggctgtggacgggaagttatctattttcattcacaaaagagaagatcagtcttcacatgaggtactgcagccccttctgtcctcatcagagggccggccattccggctcgggactggagccaatatggagaaagtcgttaagatggatcgcgatatgaccaaaggcggatgctgtgaggtcatcaccgaagaggctgccgcggcattgcggaaggcaaccaagtgggctcaatccgggctgatcgtgagcattggaccacctgtggagtccattaatccagagaccgtgagcggcctgtctaccggagataaaaaaaagacagctcaaacaagcatatgtagagaacggaacagcgagctggctaggacagaccccgtgcggccctttatctctggccacgtggcaaacagcatggctgccgaagtcatcgccctgctgcatagcctgctaatggctcctgaatctaacgctgctcagatctggaccacgaccgcagaaaaagtcttgtcaagggccctgatgtacatcccccagttaggaaagtatgcggagagtatactagaaaacggctccagctccggccgtaagcttgcaaagctgcagaggatcgcccgacaagctgtcgctgccctttgcgcactcggggggtttaaagaaacaattaagataggaagcgaagtgcaggtgttggggcggggtatctctgggagcattggtgtggtcgctagtataaacgagcaggagggcatcgctactgtgcgcttcccccctattgactgccggaagacttctcaggccagcgatactctgaccatccctttaagcagactttgcgttccgcggagcgaagctttgcccttgcataagctcagcatcaccgagaaagtcgtgcaggcggttcagtcaatgctgttgccccaggagggaagtctgagtattcatacctccctgccggcaaccggcgacgggtctgcccctgttatggccgtggttcgccttctagccgaaattcgcacccgggcatgtctggtaatggcccagctacttgaagactccttattctgcgaagagtttattcaacaatgcccagctgccgtggaggtgttgaacttggtggcccaggaatgttctgccggcgaaagactggccgtggttgaagtgcagtgcgaaagattgcggatgctctacagagactgcgcgcgaccaccaccaccccccctgcaggccgaccggcggcagccaaaggagattacctggagtccatcacgcgtgttccctccagtgcgggcttgcatgttcagcagccatctgacatctgttacgttcctggccgatccatcggccggaggagggcttccacggggaacatttatctacgctacatcccctcttccggtccaggcccctagcttctattgggagatcgagatcgtgtcctacggggatactgacgatgataccggacccatcgtgagttttggctttacgactgaggctgagaagagagatggagcctggacaaatccagtgggcacgtgcctcttccacaacaatggcagagcagtgcactacaacggctcatctctgctccagtggaagtctgtgcggctggacgttacactatcccctggagacgtggcagggatcggctgggaacggaccgagggcactcctccccctccagggcagcctgccaaaggtcgcgtatattttacttattgtggacagcgcctctccccttacctcgaagatgtgagcggggggatgtggcctgtagtccacatccagaaaaagaacaccaagactagagccaattttgggtcaagacccttcgcatatgctgaaggtcaagcgcatcggaatgctgccgacttgtgcacggatctggctgaggaaatctctgcaaatttcgaagcccttccattcgccatggcatctgacagtgataatgatgccgggaccagcattgcctctgatcctggtacgcacgggccaccatgtaggatagcagcagtggctacggctcagcagcagtatgatagtgatacctcctgccattataaggtagagctgtcctacgagaatttcattaccagcggcccagacccccacccgcctccaattgcggacgatgagtccgatgatgacgatgatgacgatatcccacaagaggatcattatgccctgctcgttaaggcttgggaaaccaaggtgttccctaccattcgacgccgatttcggaatgaagccgaaagaaagagtggtttggatcagataaagggcgctctgcagctgggcatggtggatatcgcacgtcagactgttgagtttttatacgaagaaaatggcgggatccctagggatctgtacttacccacaattgaggatatcaaggacgaggcgaacaaattcaccattgacaaggtgaggaaaggactgacagtcgttacaaggagtccagactctaacaatgtcgctagcagtgctgtaggcacggcactgcctaagtttgccatcaggggaatgctgaagacctttggactgcacggggttgtgctggacgttgattcagtaaatgagctggttcaggtggaaacatatctacgcagcgaaggtgttctggtccgatactggtaccccattgacatgctagagagacccccagcaggctacagacggaccgcaaccaatggcctcgtcaccctagataatactaatctgcagatccatcgtgagctgttacggtgtgaggccgcactggcgaggctttattgtcgcatggcgctgctgaacatcttcgctcctaagctgcctcatctgtttacacgcttattccacattcctgcaataagagatattactctggaacatctgcaactgctctccaatcagctgctcgccccacccctccctgacgggactatctctagctcctctatcctcctggcccagtcactgcaacattgtattcattcccagaattgtagcgcgacagacctcttttatcagggcaattcccagactgtgcgcgaatggttgaacgtggctatcacccggactctccaccagggggaagaatcgctgctagagctgactaagcagatctgttcattcctgcagacggccccagaacagttcccaagcgaagagttcccgatctctgagtctaaagtgaacatggacgtcaacttcccgggagctgcctttgtggtggttagttgtaaggaatctcagtcaggcttcagaaaggactcatctctgtacaaagccccctgggccagggttctcgtatatggactagggcacaaggtgaaacggaatggacagctgaatctaatcgaagctgcctgctacccgagggacgccagtcccgcgaatacaggactcgctccaccacctactgctgatcagtacccttccgttgtgctatctaccgacagagtgcacattaagctgggcgtgagtccgccaccaggcgctgtgctggtgctacactccctgcctttagagtttcccctggcgatggcctttgccgagcagttgctttcgtggaaatcagaggattcggagggaaaaagcgaggacgagccggacaccatccccaccagcgtgctgctgcaagtcgttgagctcctcggcaactttttgtggactaccgacatggccgcctgcgtgaaagagctggtattccatctgcttgcggagcttttacggacagtgcatacattggaacagaggcgccacccagccgggctcagttccagcatcgccctgcagctgaatccttgcctggccatgctcatggctttgcaatctgaactacacaagctttacgacgaggagactcagaactgggtgtcgggtggcgcctgtggcggcagtggcggagccgctgctggggatcagggccgctttagcacttacttccacgcactgatggagggttgcctggccgtcgccgaagttaccctcccaacaaatatgagtgtaacagcctccggcgtcacaagcgcaactgctccgaacctgtcagacagctccagctcgtcatcttcgtcacccggacagaccccgcagtcaccctccctgcttagtaaaaggaagaaagtgaagatgaaacgggagaaagcttcttcttccggcaagcgtcagtctagccgcacagtcgacagtgaccccacagtgctgagcattgggggcagcaagcctgaagatatgctctggttccacagggccctgaccctccttatcatcctacgtcacctcacacgcaaggatccccaaggactgggggtaactagcgacgcaatagccgacgcttgtcaggccttagtgggaccaaccgcccactcacgattgctggttatctccgggatcccgacccacctggacgagggcgtcgtcaggggcgccattcgcaaggcatgtaacgctcacgggggggttttcaaggatgaaatctatattcccctccaggaggaggataccaaaaagccgaaagataaagctgaaggaggtgatgggaaggtagaaccggagaagaccctggcattccccggcacagactccatggaagtttccacaagtagctcccttacacccgccatgtccatctctgcttcagcaagcacttcacaggcctccatctgctccagccagggaatcagccagacagtcagtgacctgtcggtcgatcccctccccgccggactggaactgcctatcccacccggactgcttgagccccacgccgtgtcctcccaggaatccttagacatcagcctgtgctcaacggggagtttgggcagccttggatcactgggagagccactcgataacgccgagacggccagcgtgtctgacatgggctctatgtacaccgttacctccttggataaccagcccctggccgcccgcccgataaaaggctttgcagtcgttgagatccgctccagggctaagatcgaaaagattagggcttctctgtttaacaacaacgacctgatcggtctctccagtttagatggtgaggacgagttgatggaaatgtctaccgaggaaatacttacagtgtctgttgtcaaccagagtctgttcgatactcaagggagcccaggcctggaggactacttcaatgacaagagcatcaagggggaaaaattggtgcctggtgcccgggaggttctgacagaaatatttaaatcttgtgcacactccgagcagacactgtctctgactcctgccaaacctatcagagtgtccgatatttacttaagtaaggagcagatcaattcgcagacacctggaaacctcttgcatctgttctttaccaatgtgcgcccgcccaagaaggtactggaggaccaactgacacaaattctccggaaatacggggtgcctaagccgaaatttgacaaatccaagtatagcaaagcgggaaaggagcagcaccccgtcaaggttgtcagcacaaaacgacctatcaccaagcccccagccaaggacaaggccgtcttaaacagtgtcagcagaacagctttaagcgaaaagaagcccacagttaaaccaaagtcccccgagaagagcaagcccgatgagaaggacccggagaagtcaccgaccaaaaaacaggaggtgccagaagaaaagtatttaacgctagaagggtttcacaaatttgtcatcgatagggcgcgacaggacattaggagcgtctggagagctatcctgagctgcggttacgacctgcatttcgaaagatgcgcctgtatagacgtgaggcacgcccagaaggcttcgcgaaaatggaccctggagatggatgtggcgctggtgcaatacatcaatcaactctgccgtcatctcgctattactcccgctcgtctgcatccccacgaggtctatctcgatcccgccgacgctgctgatccccgggttgcttgcctgctgaacgtcccaattgagtcactccgtctgcggtttgccctcctgcagtccttgaataccacactcgaaactttcttcctgcctctcgtcgagctgcgccagacacctatgtatactcattctattgctgcattgcttaaagaagcaaagggactcatcttctatgacacaaaagtgacggtaatgaatagggttttgaatgccaccgtgcagagaaccgccgaccatgccgcgccagagattacccttgatccactcgaaatcgtgggaggtgaaatcagagcttccgagaactcttacttctgtcaggcagcgcgccaactcgccagcgtgccatctagtcaactgtgcgtgaagctcgcttccggtggggatcctacctacgccttcaatatccgctttaccggtgaagaggtacatggcacctcagggtctttccggcactttctgtggcaggtgtgtaaggaactgcagtcatctagcctgtctcttttgcttctatgcccatcatctgccgttaataaaaacaaaggaaaatatatcctgacaccaagtcctatcacctatggagaagagcagctgctgcacttcctcggccagctgttggggatagcaattcgcgccgacgtacccctaccgctggatctgctacctagcttttggaaaactttggtcggagagcccctggacccggagcaggacctgcaggaggctgacatactcacctacaattacgtcaagaagtttgaaagtatcaatgacgagacagaactcgaggctctttgcgcagaaattgccagccagcaccttgctactgagtctccagacagcccgaataaaccctgttgcaggtttacctatctgaccatgaccggcgaggaggtcgagctgtgttcccgcgggcggcacattctggtggcttgggaaaacaaagatatttacgccgccgccatccggtctctgcggctgagggaactgcagaacgtagagtgtgtgactgccgttcgagcaggcctcggcagcatcatcccgttacagctccttacgatgctctctcccctagagatggaactgagaacttgcggccttccatatataaacctggaattcctaaaagcccacactatgtaccaagtcggcctgatggagactgatcaacatattgagttcttttggggggccttggaaatgttcacacaggaggagctatgcaaattcatcaaatttgcttgtaatcaggagcgaattccatttacttgcccctgcaaagatggcggaccagatacagcccatgttcccccgtacccgatgaaaattgccccgcctgacggcactgctggttctccagactcacggtatatcagagtggagacctgcatgttcatgattaagctcccacagtactccagcctggagatcatgttggaaaagctacgatgcgccatacattaccgtgaagaccctttatcaggctag

SEQ ID NO: 41849 - DNA, 12741 bp, Artificial Sequence
  derived and/or modified sequence
atgggacttctcctcgtctttcctctcattcaatcccagtccaggacagatccctctctctgcaatatcaccgctgaggtcttgctgaattgcttgcgagactgtcagcccttatcactgacgaaagagccagccgattgcctgaatggaatcgagacactgctgtgttcctggttagaggagaccagcgacaccggacgacacatcccccataaacagaaggagaatgccgctgctgcacttgtcgccttggcctgcgctcgaggtagcctaaagactttcgtccacaccgttcatctgttacaaaagcagacagaccttggtagtttaccagttgcggatgtactgtataggctgcttttgctggagggcggacctggctctccttcttgtctgctggggggaaaacatatcgtgagctggggatatgaagatatgctgccagcacccgactcaaacacaggatccagcagcgagaataaggatgcagaccttggacgctgcctaacagcagacggactgtacctgtataccacaaattctgtaggccgaggagtaagcaagctgggcagcggactacatgggactcttaggggttttgtctactgtcggaatgaagagctcgaacccggatgggtggcatttggtagtggctccctgctgcaccgacctgtttcttttgataacaaacctcactcactattccaagtcatagaccaaaacaccttgcaggtgtgccaggtggtgccaatgcccgcaaaccaccttcctattgggagcacaatgtcaaccgtgcatttgagttccgacgggacctatttttattggatctggtcaccagcatcactgaatgagaagacaccgaagggccactccgtgttcatggatatctttgaattggtggtcgagaatggtgtcttcgtggcaaacccactccaagagcgcaccattctcatgagaaaggagggggagagcgccaaaagtatcaacgagatgctcctcagccgcttatctagatatagggcctcaccgagtgccacactggccgcactgacagggtccactatcagcaacacactgaaggaggaccaggccgcaaacacaagctgtgggctgcctctaaagatgttgaggaagacgcccatttacacgtgtgggacctacctagtgatgctggtccctccaccaggcggatctggctcaagcgcgacacgttcactcttcggagggacgtcgggcttgagctccttgaagagagcttgctacgataccgttaataatatgctgtggacttgctcaaacgactacatagatcagtggtgcaacccaggaaaccaggctttccattatgtctgccagagactgggggtgtctcatatcattacagaacctaaggaggaggccatcacaacaaacgaagtgataaatcagcttcttcaccacgttggcgctatgtgcatccaccagctgaacctcctcgcaacaaatcccaaccttccaatcacttctgtgcttgggaaacagcatcctattgaagcccatcacctaagcagtatttgtgacattatggaaaaagccatggttaacggggacacatgcatcatccggtgtattctagtggtcttccaagtagtcttcaagttctttttttcccctcagacagagagaaacagggacatcatccggagatctggccttctcctctggcaattgctgatggcacccaaggatcagatttgtccagaaattcaaaaagaagtgtgcctggccatttcctcaggactgaacatactttaccctggtgaaacagaaataaacaacttactgaaactggtgctgactgagggcgaacggaactccggtctcagtcagctcagagacgtgatcctgacgaatctggcggagcagcttcagaataatagattcggatcagatgaagatgatcactatcgcctcaacgacgaactgctgcactacattcttaaaatcgttgtgagagaatcctgtatccttattactaagtgccagaccgtatctaaggacgattttcaaaagctcctaagtaccgttcccgcagcttcaagttgcctcaggtatctcatggctgtccagaaccatcttctatccaacactatccttatcaaaccagacgagaacgatgactcagatagctctctacaaggagagaccctcaaggtgcaggaacttaaggtcagtatcctggctctcgcaactcagatcctgacaggctgtgacgaggtgctggaaatgttacaacaagtgacaaccgcgctgatcaactctgatatcgccgaccgtgagcagcgcctgaagggattagagcaggtcaccaaagcaactatgcttggccatttactgcctgtgctgcttaccagtctcatgcaccctaatctccagactcttatcatggccgacgctctgatgccacaacttgtgcagttggtgctgtacaccagccagactgccctgctcctcaagactcaatgtcccgtttttgccgaagtcggttgctccccttgcggcgcaccagaccagaagtgcaggctgttccccgatgagaggatgctggaagaaaaagaagagcccggatttctgacaggactgaaaattcctgccccttgggccgctggcaaaacagttgaaaccgttcaccctgtaagggacaactacaaattcaaggaaaccgtgcacatccctggcgctcggtgtctatacctccgctttgattctaggtgttcaagccagtacgactatgacaagctggtcatttatgccggtccaaatactaactccaggaaagttgccgagtatggaggaaacaccctcggctatggatcccgatcagtgctgggtaccgggtggccaaaggatcttgtgaaatgcatcagccctccatctttaaatttcaaggtggagggagacacagtcaccttttcgttcgagatgcgttccggaagagagcacaatacgcccgacaaggctatgtggggcttcgcctgtacagtgcgcgcacaagaatcttctgaagacgtcagcggagggttgccattcctggtggatctcgcccttgggttaagtgtactggcctgttccatgctgaggatactctacaacggaccggaaattactaaagaggaggaagcctgtcaggaactgcttcgatcaaaactcctgcagcgatgccagtggcaggtagaggctaacggggttatcagccccgcactgacccctagtcctagcccactccctttaactatcgaggaggatagagaattcacctacccctcagatgtgctggtacctcccgtgggaaactacttcgacctgcctagaattaggctccctccgggaattatgataaagctgcgcgaaatctccggacgagcccgtccacagttccgcccttctatcaaagaggtgattcaacccgacgtgatggaggagatggtagtgtcctgcgtgatcaagcatctgaacctcgtggacgcacttcagtcgcttatcaatttccagtaccaggaagagcacgccgaggaatacgacttgctgtgcaagataatgggcgaaaccttcaagaaacttaacgccatggagcggcagctgcagtcagtggcggagctggagcagaaatggcaatctgaggtggacgatgccatgcaggggaaactagagaataacatgcccttcttttacgactatcattttaacgaaaataagatgaaggaactagaattactttgttctatgaaggaggtaagtttcgacggcaatgatctggagaatatggtgctgagcctgcgggaaaaatttctccaagaggtgaactccctgattcagaagccaagtcatcccttggcgaagacaaaaaccttagtcaagagcctgatgaacagagccgaactgctcctccatgttactattgccgcacagtctgggctgacgcgatcaatctctgggacgcctgcagaaacaccggcttgtaagtctgcctccgaaacgaaggtgatttcccatgctgtccgccagcctgtgttcttaagaagcatgtcggccccatccgatctcgagatgataggcaatgaagatctagaatttacacgtgctaatcagagacggcgacacgtaacttctcacagatccagttcatttaccctgcttcaaagcctggcaattgaagacagcagggacaaaccaacttattcggtgctcctgggtcaactgttcgcgtttattggtacgaaccccgatcaggctgtgtcgtcatcctcatttctgttagccgctcagacgagatggagacgcggaaatacacggaagcaggcattggtgcacatgcgggaactgctaaccgccgctgtgagggtcggcggagtcacacacctggtgggccctgtcaccatggtgctgcagggcggtccaaggatcgaggagttgacatgtggagggatggtagaacaggttcaagaggcctttggcgagacaatgacatccgtggtttccctgtgcgctcgatacccaatcgcctgtgcgaactcaattggactgctttgtacaattccttacacgcgtagtgaagagaaatgcttggtgaggtccggtctagtccagttaatggacagactgtgtagcctcagtaaccagactgaaagctcatcctccgaaaagcagaccaagaaacagaaggtagccacaatggcttgggcagcattccaagtgctcgccaaccggtgcgtcgagtgggagaaagaggagggaggcagtacagaagccgtgcatagtggtcttgccagacaggtgagctctctactgaccaatcatctggctcgcgctacggagtgctgtgggaaccaagccgcagggaacgacgctctccaagacgttttgagtctgttaaatgacctgtctaggtcccacatcggaaaagcaatcctgtcgcaacctgcatgcgtgtccaaacttctgtctttgctcttagaccagagaccatccccaaagcttgtcctgattatcctgcagctctgccgggctgcgctccctctgatgtctgtggaagactgcggaaacgtggaattgcccccttggagctactcagtaccatcactcaattctgagcaagaggacccgtctgatcccgcatccaagatcgcaagcttactgttggccaagctggccgactatgtcgtgcccggatgtcagacggtgctgtccccgactgcaagtgaaccagatactacactcacaaagacatcacccaagaattctctcaaaggagataaggatccgggagaggaaagtgaggcagttgacggtaagctgtccatatttattcataagagagaggaccaatcctcacacgaggtcctacagcccctactctcgagcagcgagggaagaccattccgcctgggcactggagccaacatggagaaggtcgtaaagatggatcgggatatgactaaaggcggatgctgtgaagtaatcaccgaagaagcagcggcagccctccggaaagccacgaagtgggcacagtctgggctgattgtgtcaattggccctcccgttgaatccattaatccagaaacagtcagcggcctgtccactggagacaagaaaaagacagcgcagacttcaatctgcagagagagaaattctgaattggccagaaccgacccagtccgaccattcatatccgggcacgtggcaaactccatggccgcagaggtgatcgcgctcctgcactccctactgatggctccggaatccaacgccgctcaaatctggacaacaacggctgaaaaggtgctctcccgggctctgatgtacatcccacagctcgggaaatatgccgagagcattctcgaaaatgggagctcttctggtcgaaaattagccaaactgcagcgtatcgcaagacaagccgtcgccgcactgtgtgccttagggggtttcaaggagaccatcaaaatcgggtccgaggtacaggtactcgggcgaggaatttctggttccatcggtgtcgtggcgtctatcaacgaacaggaaggaattgccaccgtccgatttccacccatagactgtcgtaagacatcacaggctagtgacactctgacaatcccgctgtcgcgcctgtgcgtgcctcggtcggaagcactgccgctacataaactgtctatcactgaaaaagtggtccaggccgtgcagagcatgttattgccacaggaaggttctttgtccatccataccagcttaccagctaccggagacggctcagcacctgtgatggcggttgtgcgcttgctggccgaaatcaggacacgagcttgcctagtgatggctcagctgctggaggattcattgttctgtgaggaatttattcagcagtgtcctgcagcggtagaagtgctgaacctggttgcgcaggaatgcagcgccggagagagactggccgtggtcgaagtccagtgcgagagattaagaatgctctaccgcgactgtgccagaccccctccccctcccctgcaggcagacaggcgtcagcccaaggaaatcacctggtcccccagccgcgtcttcccacccgtgcgagcatgcatgttttcctcccaccttacctcagtgacattcctggcggacccgagcgccggaggaggcctgcccagaggtacctttatttacgcaacctcacctctgccagtccaggctcctagcttttattgggagattgaaatagtcagctacggtgacacagacgacgatacaggccctattgtctctttcgggttcactacagaagccgaaaagcgcgacggtgcgtggactaacccggtcggtacctgtctgtttcacaacaacggtcgggcagtacactacaacggttcttcactgctgcagtggaagtcggttcgtctggatgtcactctgtctcccggagacgtggcaggtatcgggtgggagcgcaccgaaggcacacctcctccccctggccagccagccaagggtcgagtatatttcacctactgcggacagagacttagcccctatctggaagacgtctccgggggaatgtggcctgtggtacacattcagaaaaagaacacaaagactcgcgctaactttggaagccgaccttttgcttatgcagagggccaggcccatcgcaacgccgctgacctctgtactgatctagccgaggagatcagcgccaacttcgaggcactcccctttgccatggcgtcagactccgacaacgatgctgggacctccatcgcctctgatccaggcacacacggcccaccctgcaggatcgccgctgttgcaactgcccaacagcagtatgattccgacaccagctgtcactataaagtggaactcagctacgagaattttattaccagtggacccgaccctcacccccctcccattgccgacgacgaaagtgacgatgacgatgacgacgacattccacaggaggatcattacgctcttctggttaaagcatgggaaaccaaagtttttccaaccattagaagacgctttcggaatgaggcagaacgtaagtccgggctcgaccagattaaaggggctcttcaactaggtatggtggatattgccaggcagaccgtcgaattcctatacgaggagaatgggggaatcccgagggatctgtatttaccaaccatcgaggacatcaaagatgaagccaacaagtttaccatagacaaggtgcggaaggggcttaccgtggtaaccaggagcccagactcaaacaatgtggcgagctccgctgtgggtaccgcactacccaagtttgcaatcagagggatgctgaagacatttgggctgcacggggtggtcttagacgtggactctgtgaacgagttggttcaggtggaaacctacctcagatcggaaggggtgcttgtccgatattggtaccccattgacatgcttgagaggccaccagccggatacaggagaaccgccacaaacggattggtgactttagacaacaccaacctgcagatccacagggagctgttgcgttgcgaagccgcactcgcgaggctgtattgccgcatggccctactcaatattttcgcgccaaagctcccccacttgttcacgagattgtttcatattcctgcgatccgagatatcaccctcgagcatctccaattgctttcaaatcaactcctagcacctccgctgccagatggcaccataagttcctcctctatcctactggctcagtctcttcagcattgtatacatagtcaaaactgcagcgcaaccgatttattttatcaggggaattcacagacagtgagagagtggcttaacgtggcgatcactaggactctgcaccaaggagaagaatccctcctggaactgactaagcagatttgttccttcctacagacagcacctgaacagtttccctctgaggaattcccgatctcagagtcgaaggtaaacatggacgtgaatttcccaggtgcggcattcgtggtggtgtcttgtaaggaatcgcagagtggttttcggaaggatagctctctttacaaggcaccttgggcacgcgtgctcgtgtatggcctggggcataaagtgaagaggaacggccaactaaaccttattgaggctgcttgctatcctagagacgcctctcccgctaatacgggtctggctccccctccaacagctgatcaatacccctcagttgtcctatcaaccgacagagtccacataaagttgggtgtaagcccgcctccaggcgcagtgctggttctgcattcactccccctggaattcccactggcaatggcttttgccgaacagttactgagctggaagtcagaggatagcgaggggaaaagcgaggacgagccagacactatcccaacctccgtgttactgcaggtggtagagttattagggaatttcctgtggactactgatatggcggcttgcgtgaaagaactggtgttccatctactggcagagctgctccgcaccgtccatactttagagcagcggagacatcctgcaggattgtccagctccattgccctgcaacttaatccatgtctggcaatgcttatggccctccagagcgaactccacaagttgtacgatgaggagacgcaaaattgggtatctggcggagcctgtgggggatctggcggagcagcagccggagaccaggggagattttcaacatacttccacgccttgatggaagggtgtttggccgtagctgaggtgactctcccaacgaacatgtctgtgacagcgagtggtgtgacatcagctaccgcaccaaacctctctgatagttctagctcctccagctcttcacccggacagacgcctcagtctccgtcacttcttagtaagcgcaaaaaggtcaaaatgaagcgggagaaggcctcttccagcggaaagcgccaaagctcccggacggtagacagtgatccaaccgttctgagcatcgggggatcgaaacctgaggacatgctctggttccatcgggcactaactctattgatcatcctcaggcacctgaccaggaaggatccccaagggttaggagtaacgtctgatgctattgctgatgcttgccaggcactggtgggcccaacagcccacagccggctgctcgtgatctcagggatacctactcatttggatgaaggggtcgtgaggggtgctattaggaaggcatgtaacgcccatggcggagtcttcaaagacgagatatatatccccctgcaagaagaggataccaagaagcctaaagacaaggcagagggcggagacggcaaagtcgagcccgaaaaaaccttagcctttcccggaactgatagcatggaggtatccacctcttccagtttaactcctgcaatgtctattagcgcctccgcttccacgagtcaagcctctatatgttccagccagggcatctcccaaactgtgtcggacctgtccgtggacccactgccagctggtttggagctgcccattcctcccggactgctggaaccccacgcagtcagctctcaggagtcattggacatctctctgtgctccactggcagtctgggctccctgggctctctgggcgagcccttggataacgctgagacagcctccgtctcagatatgggctccatgtatactgtcactagtttggacaatcaaccacttgccgcacgcccaataaaggggttcgccgtggttgagattaggtctagagcaaagatagaaaagatccgtgccagccttttcaacaacaatgacttaatagggctaagctctctcgacggggaggacgaactgatggagatgtccacagaagagattcttacagtatccgtggttaatcagtccctttttgatactcaaggatcccccggtcttgaggactatttcaatgataagagcatcaagggtgagaagttggtacccggagctagagaagtcctgaccgaaatcttcaaatcctgcgcccactccgagcaaaccctgtctctgacacccgcaaaaccaatcagagttagcgatatttatttaagcaaagaacagatcaacagtcagactccgggaaaccttttgcatctgttttttacaaatgtgcggccaccgaagaaagtcctggaagatcagctaactcagatcctgcgtaaatacggtgtgcccaagcccaagtttgacaaatccaaatacagcaaagctggaaaggagcaacatccggtgaaagtggtgtcaaccaaacgccctatcactaaacctcctgctaaagacaaggctgtgctaaactctgtgtctcggaccgctctgagcgagaagaagcctactgtgaaacctaaaagcccagagaagtccaaaccagatgagaaggaccccgagaagagtccaacaaagaaacaggaagtgccggaagagaagtatctgacgttagagggttttcacaaattcgtgatcgatcgagctcgccaggatatccgcagtgtctggagagccattctctcgtgcggctatgacctacacttcgaacgttgcgcttgcatcgatgtccggcacgcgcagaaagcctctcgcaaatggacattggagatggacgtggctctggtgcagtatatcaaccaactatgccgacacttagctatcacccccgctcgactgcacccacacgaggtctacctggacccagccgacgccgctgatccccgagtcgcatgcctcctcaacgtgcccatcgagtctctgcgcttgcgcttcgccctgcttcagtccctcaacactaccttggagacattctttttgccactggtcgagctgagacagactcctatgtatacacactccattgccgctctcttgaaggaggctaaggggctcatattctacgatactaaagtgaccgtgatgaacagggttttgaatgccactgtccagaggacggccgaccacgccgctcccgagatcactcttgatccgctggagattgtgggcggtgagatacgggcatccgaaaacagctatttttgccaggcggcacgccaactcgccagtgtgcccagtagtcagctttgtgtaaaattggcttccgggggagaccctacttacgcctttaatattcggtttaccggcgaagaggtgcacggcacctccggcagcttccggcactttctgtggcaggtttgtaaagagctccagtcctcatcattgtcactgttgctcctctgcccgagcagcgccgtgaataagaacaagggcaaatacattctgacaccatccccgatcacgtacggggaagagcagctcctccacttcctcggccagctcttgggtatcgctatacgggcagatgtgccattacctctggatctcttgccttcattttggaaaactctggtgggcgaacccctcgaccctgagcaggacctgcaggaggccgacatcctgacatacaactacgtaaaaaaattcgaatccatcaatgacgagactgaactggaagctctgtgtgccgagatcgcttctcaacatcttgctactgaaagccctgatagtcccaataaaccttgctgtaggtttacctacttgaccatgaccggcgaggaggtcgaactttgtagcagagggcgtcacattctagttgcttgggagaataaagacatatacgctgctgccataagatctctcagactgagggaacttcagaacgtggaatgcgtgaccgcggttagagcaggcttgggatcaatcatcccgctgcagctgctaacaatgttgtcccctctagaaatggaattgaggacttgcgggctgccctatataaatctggaattcctgaaagcacatacaatgtaccaggtggggctgatggagacggatcaacacatcgagtttttctggggagctcttgagatgtttactcaagaggagttgtgtaaattcatcaagttcgcatgcaaccaggaaagaataccattcacgtgcccctgtaaggacggaggacccgatacagcccatgtgcccccatatcccatgaagattgcccctcccgacgggactgcgggaagtccagactcccgctatattagagtggaaacctgtatgtttatgataaaacttccacagtattcctcactcgagattatgttagagaagctcagatgcgcaattcactatagggaagaccccctgtccggctac

SEQ ID NO: 41850 - DNA, 11990 bp, Artificial Sequence
  derived and/or modified sequence
atgcctgccaatcacttgcctataggaagcactatgtctactgtccacctctcgtccgatggaacctatttctattggatatggagccccgctagcctgaatgagaagacgccgaagggccatagcgtgtttatggacattttcgaactggtcgttgaaaatggtgtcttcgttgccaaccccttacaggaaaggactattttaatgaggaaagaaggcgaaagcgccaaaagcatcaacgagatgctgctgtcacgtctgagtcggtatagggcatcacccagtgcaacattggcagccttgaccggcagtaccatcagcaacaccctgaaagaggatcaggcagctaatacttcttgcggcctgccactcaaaatgctacgaaaaacaccgatctacacttgcggcacctacctggtgatgcttgtgccaccaccaggtggatccggaagttctgccacaagatcactatttgggggtacaagcgggctgagctccctcaagagagcttgttatgatactgtcaacaatatgctgtggacttgctctaacgattacattgaccaatggtgcaacccgggaaaccaggctttccactatgtgtgtcaacgcctgggcgttagccatattattacagagccgaaagaggaagccattaccactaacgaagtcatcaatcagctgctgcaccacgttggtgcaatgtgtatccaccagctgaatctgctcgcaactaatccaaacctcccgatcacgagcgttctggggaagcaacaccctatagaggctcaccatctctccagtatatgtgacatcatggaaaaagctatggtgaatggcgatacatgtattattaggtgcatcctggtggtgtttcaagtcgtgtttaagttcttcttcagcccacagaccgaaaggaacagggatatcatccgcagatccgggttactgctgtggcaacttcttatggcaccaaaggaccaaatatgccccgaaatacagaaagaggtgtgtctggccatttctagcggactgaatatcttgtatcctggtgagaccgagatcaacaaccttctcaaattggtgctgacggaaggtgaacggaactctggactctcccagctgcgcgatgtgattctcaccaacttggccgaacaactccagaacaatcgctttgggagcgacgaggatgaccattatcggctgaacgacgaactgttgcactacattttgaaaattgtggtgcgtgagtcctgtatactgataaccaagtgccagactgtgtccaaagacgactttcaaaagctgttgagtacagtgccagctgccagtagctgcctgcgctacttgatggccgtgcagaaccacctgctatctaatacaattctgattaaacccgatgaaaacgacgacagcgattcaagtctgcaaggggagactctgaaagtgcaggagctaaaagtgagcatcctggctctggctacccaaattctcaccgggtgcgacgaggtcctagagatgctgcagcaggttacaactgccttgatcaatagcgacatagcggatcgagaacaaagactcaaaggcttggaacaggtgacaaaggctaccatgttaggtcacctgctaccagtcttgctgaccagcctcatgcaccccaacctccagaccttgattatggcagatgctctcatgccccagctggtgcagctggttctgtatacttcacagactgccctgctgctgaagactcagtgcccggtgtttgccgaggtagggtgtagcccttgtggcgcacctgaccagaagtgcaggctgttcccagatgaaaggatgctggaagaaaaggaggaaccaggatttttaaccggtctgaaaatacccgctccatgggccgcaggtaagacagttgaaacagttcatccggtgcgcgacaactataaattcaaagagacggtgcacattccaggcgctaggtgcctgtacttgaggttcgacagccgatgttccagtcaatatgattatgacaaactggttatttacgcaggcccaaatactaacagtagaaaggtggctgagtatgggggaaacacattaggttacggctcgcgaagcgttctgggaactggctggccaaaagacctagtgaagtgcatttcgcctccaagcctgaattttaaggttgagggcgatactgtcaccttttcattcgagatgcggtcaggcagggaacataacaccccagataaggctatgtggggatttgcatgcacagtcagggctcaggagtcaagcgaagatgtctccgggggattgccatttcttgtggacctggctttggggctgtccgtgcttgcttgctctatgcttaggatcctatataacggcccagaaatcaccaaggaggaagaggcatgccaggaattgttgcgaagcaaacttctccagagatgtcaatggcaagttgaggcgaatggagttatcagccccgctctgaccccctctccaagtcccctgcctctgaccatcgaagaggaccgggagtttacttaccctagcgatgtcctggtcccccctgtgggtaactacttcgacctgccgaggatccggctgcccccagggatcatgataaaactgagagaaatttccgggagggcccgtccacagttcagaccctctatcaaggaagtcatccagccagacgtgatggaggagatggtcgttagctgtgtgatcaagcacctgaacctcgtggatgccttgcagagcctaataaacttccagtaccaggaagaacacgccgaggagtacgacctcctgtgtaaaatcatgggggagacctttaaaaaactgaatgcgatggagagacagttgcaatccgtggctgagttggagcaaaagtggcagagcgaagtcgatgacgccatgcagggaaagcttgaaaacaatatgcctttcttttacgactatcatttcaatgagaacaaaatgaaggaactcgagctgctgtgctccatgaaagaggtatccttcgacgggaacgatctggagaatatggtgctgtcactgagggagaaatttcttcaggaggttaacagtctcatccagaaacccagccatccacttgccaagacaaaaacactcgtgaagtctcttatgaaccgagcggagctccttctgcatgttactattgcggctcagtcagggctgacaagatccatctcaggtactccagctgaaacacctgcctgcaaatctgctagcgagacaaaagtgatttcccacgcggttaggcagcctgtgttcctccgtagtatgtcagcgccttccgacctcgagatgatcggcaacgaagatctagaatttacaagagctaatcagaggagacgccacgtaacatcacatcggtcatcttcattcacactgttacagtccctggcaattgaagattctcgagacaaacccacatattcagttttgcttgggcagctgtttgcctttattggtactaacccagaccaggctgtgtcttcctcatctttcctcctcgcagcccaaaccaggtggaggcgcggtaacacccgaaaacaggccctggtgcatatgcgggagcttctgactgccgctgtgcgcgtgggaggcgttacacaccttgtaggccctgtgaccatggtgctgcagggtggcccacggatcgaagagctaacctgtggcggtatggtagagcaggttcaggaggctttcggtgaaacaatgacaagcgtcgttagtctgtgtgccagataccccatcgcctgcgctaattcaataggcctgctttgtactattccctatacgagatcagaagaaaagtgtctagtgagaagcggtttggtgcagctgatggatcggctgtgttctcttagtaatcagaccgagtcatcctctagtgaaaagcaaacaaaaaagcaaaaagtggcgaccatggcctgggctgccttccaggtgctcgccaataggtgcgtcgaatgggaaaaggaggagggtggaagtacagaagcggttcacagcggactggcacgccaggtctcttccctgttaactaaccatctcgccagggcgacagaatgttgtggcaatcaagcagccggaaatgacgcacttcaagacgtcctctccctcctcaatgatctgtcacgttcacacatcggcaaggcaattctgagtcagcctgcctgtgtgtccaaactcctgagcctgctactcgaccagaggccttcacccaagcttgtgctcatcatcctccagctgtgtcgcgcagcactgcctctgatgtcagtcgaagactgcggaaatgtggagctgcccccatggtcatattcagtgcctagcctcaatagcgaacaggaggatcccagtgaccctgcctccaagattgcatctctgcttctcgccaaactcgctgactacgtggtgcctgggtgccagactgtcctgtcccccacagcgtctgagcccgataccaccctcacgaaaacatctccgaagaattctctgaaaggggacaaggatccgggtgaagagtctgaggccgtggatgggaaactcagcatctttatccacaagcgcgaggaccaaagtagtcacgaagtattgcagccactactctctagcagtgaagggaggccctttcgactggggacaggggctaatatggagaaggtcgtgaaaatggaccgagacatgactaagggaggctgctgcgaagtgatcacagaggaggcagcagccgcactgcgaaaagccactaaatgggcccagtccggcctgatcgtgtctattgggcctcctgtggaatcaataaaccccgaaacagtgagcggcttatcaacaggggacaagaagaagactgcccagacttccatctgtcgggaacgaaattccgaactggctcggaccgatcctgtccgtccttttatttccggacacgtggcaaacagcatggcagccgaggtgattgcactgctgcattcactcctcatggccccagagtccaatgctgcccagatctggacgactaccgcagagaaagtgctgtcgcgcgcattaatgtatatcccacaactgggcaagtacgctgagtccattctggagaacggctccagcagcgggaggaaactggccaaactacagcgcattgctagacaggcagtcgccgcactttgtgctctggggggtttcaaggagaccattaagatcggctcagaggtccaggtcctgggaaggggcatctcagggagcatcggggttgtggcatccattaacgagcaggagggcattgccacagttaggttccctccaattgactgtcgcaaaacatctcaggcctctgacacactcaccatccccctcagcagactttgcgtcccaaggtctgaggcgctccccctgcacaagctttcaatcactgagaaggtcgtccaggcagtgcagtccatgctgctgccccaagaaggctcactgagtatccacacgtcacttccggctaccggagatggaagcgcccctgtgatggcagtggtgaggctcctggccgagatccgaacccgagcctgtctcgtcatggcccagctattggaggacagtcttttctgtgaagaattcattcagcaatgtcctgccgcagtggaggtgctgaatctcgtagcacaggaatgcagcgccggagaacggctcgcggtggtcgaagtccagtgtgagaggctgagaatgttatacagggattgcgctaggccccctccccctccccttcaggccgaccgacgccagcccaaggagatcacttggtcccccagccgcgtattccctcctgtgcgcgcttgtatgttctcgagccatctgacaagcgtaacattcctggccgacccatcggcgggtggaggcctcccccgaggcactttcatttatgctacaagccctctgcccgtgcaggccccttcgttctattgggagattgaaattgtcagttacggagatactgatgacgacaccggccctattgtttcattcggatttaccaccgaggcagaaaaacgcgatggcgcatggaccaaccctgttggcacctgcctgttccacaacaacggccgtgctgtacactataacggatcttccttactccagtggaagtctgtcagactagacgtcacactgagtcctggggacgtagcagggataggctgggagcggacggagggtacaccccctccccctggtcagcccgctaaaggtagagtatacttcacatactgcggacagcgcctctctccttaccttgaggatgtgagcggcggtatgtggccagtcgtgcacatccagaagaagaatactaaaacaagggccaactttggctctaggcctttcgcctacgcggagggtcaagcacaccgcaacgcggcagacctttgcacagacctcgcggaggagattagcgccaatttcgaagcacttccgtttgcaatggcttccgactctgacaatgatgccggaacttcgatcgctagcgacccaggtacccatggccctccatgccggatcgctgccgtggctacagcccaacagcaatatgattcagatacatcgtgtcattacaaggtggaactgtcatatgaaaattttatcaccagcggtccagacccgcatcccccacctatcgcagatgatgaaagcgacgatgacgatgatgatgatatcccccaggaagatcattacgctctgctggtgaaggcatgggaaacaaaagtttttcccaccatccgcagaaggtttcggaacgaggccgaacggaaatcagggctggaccagataaaaggggcattacagcttggcatggtggatattgccaggcagacagtggagttcctgtacgaggagaatgggggaattccccgagacttgtatctgccgacaatagaagatattaaggacgaggccaataagtttaccattgataaggtgaggaagggactgacagtagttacgagaagccccgactccaataacgtggcctccagcgccgttggcaccgcactgccgaagttcgctattcgtggcatgttgaaaacattcgggctccacggcgttgtgctcgacgtggattcagtcaacgagctcgtgcaagtagaaacttacctaagatcagagggggtcctggtacgctactggtaccctattgatatgctggagcgacctccagccggataccggagaactgccactaatgggcttgtaacattggacaacaccaacctacagattcatcgggagctgttgcgatgtgaggccgcattagcacggctctattgtaggatggctcttctgaatattttcgcacctaagcttccacacctgtttacacgcctgttccatatacctgccatccgtgacatcaccttagagcacctccagctcctgagcaaccagttactagccccacccctcccagatggtaccattagcagcagctccatacttctcgcccaaagtctgcagcactgtattcacagccagaactgttccgcaacagacctgttctaccaggggaattctcaaacggtgagggaatggctcaacgtagcaatcacccggacgctgcatcaaggcgaggagagccttctggagttgaccaaacagatttgctcattcctgcagacagcgccagaacaattcccgtccgaggaatttcccatttccgagagtaaggtcaatatggatgtgaacttcccaggtgcagcttttgtagtggtcagctgtaaagaatctcagagcgggtttcgaaaagattcctccttgtacaaagccccatgggcgagggttctggtgtatggccttggacacaaggtaaaacgcaacggacagctcaacctcatagaggctgcatgctacccccgtgacgcgagcccggctaatactgggctcgctccaccgccaactgccgatcaatatccttcagtggtcctctccaccgaccgggtccatatcaaactcggggtttcacccccacccggagcagtgctggtcctgcacagtctcccactagagttccctctcgccatggctttcgcggaacagttgctgagttggaagagcgaagactcggagggaaaatctgaggacgaacccgacactatacccacaagcgtgcttcttcaggttgtcgagttactggggaatttcctctggactactgacatggccgcttgtgtcaaggaactggtgttccatttgcttgctgaactgctgaggaccgttcacaccctggagcaaagaaggcatcccgcaggactctccagttccattgccctgcagctgaacccctgcctcgccatgctaatggccctccagtcagagttgcacaaactatacgatgaggagacacagaattgggtttcagggggagcctgcggcggatcagggggagcggctgccggagatcagggcagattctcgacatattttcacgccctgatggaagggtgtctcgcggttgctgaggtgactctccctactaatatgtccgtcacagccagcggagtcacttccgctactgctcctaacctgtccgattctagttcaagctccagcagtagcccaggtcagaccccccaatcgccttccttgctatcaaagcggaagaaggtaaaaatgaagcgggagaaggccagttcctccgggaaaagacagtcctcacgtacggtggactctgatccaaccgtactgtccattggcggatctaaacccgaagatatgctctggttccaccgggctttgaccctcttgatcatcctccggcatcttacacgaaaagatccccaaggcctcggcgtgacttctgacgccatcgccgacgcatgtcaagccctggttggccctactgcccattctcggcttttggtcataagcggcatcccaacacacctcgacgagggtgtggtgcgcggtgccattcgcaaggcctgtaatgcccatgggggagtgttcaaggatgagatttatatccccttgcaggaagaagacacaaaaaaacctaaggacaaggccgaaggaggagatggcaaggttgagccggagaagactttagcttttccagggactgactccatggaagtctctacatcaagctcacttactcccgcaatgagcatcagcgcaagcgccagtacatcccaggcgagtatatgctccagccaaggaatttcccagacggtgtccgacctctccgtggatccactgccagcgggactcgagctgccaattccaccaggtctgctcgaaccacacgcggtcagcagtcaggaatccttagacattagcctctgctccacagggagtctggggtcgcttggttcgctgggcgagccactagataatgccgagactgcctcggttagcgacatgggtagcatgtacacagtcacctctttggacaatcagccactcgccgctagacccatcaaagggttcgccgtggtggagataaggagcagagcaaagattgaaaagatcagggcctccctctttaataataatgacctcattggacttagcagcctcgatggagaagacgaactgatggaaatgtccaccgaggaaatcctcactgtatctgtagtgaatcaaagccttttcgatacccagggcagccccggattggaggactatttcaatgacaagtctatcaagggggaaaagttagtgcctggagctcgcgaagtgctgaccgagatatttaaaagctgcgctcactctgagcagaccctaagtctcacccccgcaaagccaatacgggtgtcagatatttatctcagcaaggaacaaattaacagccagacacccggaaatctactgcacctgtttttcactaacgtgcgaccccctaaaaaggtgctcgaagaccagttaacacaaattctccggaaatatggcgtccctaaacccaaattcgacaagagtaagtactcaaaagccggaaaggaacaacaccctgtgaaggtagtgagcactaagcgacctatcactaagccgccagccaaggataaagccgtgctgaatagcgttagtcgtacggcactgagcgaaaaaaagcctactgtcaaaccaaagtctccagaaaaatccaagcccgatgagaaggatcctgagaagtctcctacaaagaagcaagaggttcccgaagagaaatacctgactctcgagggattccataagtttgtgattgaccgagccaggcaggacatccgtagcgtctggcgagccattttgtcatgtggttacgacttgcactttgaaaggtgtgcctgcatcgacgttcgccatgctcaaaaggcgtcgagaaagtggacactggaaatggacgtagcgcttgtccagtacatcaatcagctgtgccgacacttggccatcaccccagctagacttcatccccacgaggtctacctggacccagccgacgcagccgacccaagggtggcttgtcttttgaacgttcctatcgagtctttgcgtctccggtttgccttgctccagtcgcttaataccaccttagaaaccttcttcctgcctctggtagagctgaggcaaacacccatgtatactcactccatagccgcattactcaaagaagccaaagggctgatcttctatgacacgaaggtgacggtaatgaatcgcgttctgaatgcgaccgttcagaggacagcagatcacgccgcacccgagataacactggatcctctggaaattgtcggcggtgagatcagagcatcagagaactcctatttctgtcaggccgctcgccagctggcctcggtgccgtcctcccagctttgcgtcaagctggccagcgggggagatcccacatatgccttcaatatacgcttcacaggtgaggaagtccatggcacatcaggttcttttagacacttcctttggcaggtgtgcaaagagctgcagtcatcttcacttagcctgctgttgctgtgtccatctagcgcagtcaacaaaaataaaggtaagtacatcttgactcccagccctatcacatacggggaagaacagcttctgcatttcctgggccagctcctcgggatcgctatacgagcggacgtcccactgcccctggaccttctgccttcgttttggaaaacgttagtgggcgaacctttagatccggagcaggacctacaggaagcggacatcctcacttacaactacgtcaagaagtttgaatcgattaatgacgagaccgagcttgaggccctctgcgcggaaattgcttcacagcacttggcgacggagtctcccgattcaccaaataaaccgtgttgtcgttttacatatcttacaatgaccggcgaggaggtggagctctgttcccgtggccgacatattctagtggcctgggagaataaagacatatatgcggctgcaattcgtagcctccggctccgagagctgcagaacgtggaatgcgtgacagctgtgagagctgggctaggtagcattatacccctgcagcttctcacaatgctatcaccactggagatggagcttagaacctgtggcctgccctatatcaatctggaattcctcaaggcacacaccatgtatcaagtggggttaatggaaaccgatcagcatattgagttcttctggggcgcactggaaatgtttacgcaggaggaactctgcaagttcataaaattcgcatgcaatcaggaacggattccatttacctgcccatgtaaggacggcggacctgacacagcgcacgttcccccataccctatgaagatcgcccctccagatggtacagctgggagccctgactctcgctatatccgggtcgagacctgtatgtttatgatcaaactgccccagtactcgtccctggaaatcatgttggaaaagctgaggtgtgccattcattacagagaagatccattgagtggtta

SEQ ID NO: 41851 - protein, 2215 aa, Artificial Sequence
  derived and/or modified sequence
MEAEFYMVILTCLIFRNSEGFQIVHVQKQQCLFKNEKVVVGSCNRTIQNQQWMWTEDEKLLHVKSALCLAISNSSRGPSRSAILDRCSQAPRWTCYDQEGFLEVENASLFLQKQGSRVVVKKARKYLHSWMKIDVNKEGKLVNESLCLQKAGLGAEVSVRSTRNTAPPQILTTFNAVPDGLVFLIRNTTEAFIRNAAENYSQNSSERQHPNLHMTGITDTSWVLSTTQPFSSTTEETGLAEPERCNFTLAESKASSHSVSIQWRILGSPCNFSLIYSSDTLGAALCPTFRIDNTTYGCNLQDLQAGTIYNFRIISLDEERTVVLQTDPLPPARFGVSKEKTTSTSLHVWWTPSSGKVTSYEVQLFDENNQKIQGVQIQESTSWNEYTFFNLTAGSKYNIAITAVSGGKRSFSVYTNGSTVPSPVKDIGISTKANSLLISWSHGSGNVERYRLMLMDKGILVHGGVVDKHATSYAFHGLTPGYLYNLTVMTEAAGLQNYRWKLVRTAPMEVSNLKVTNDGSLTSLKVKWQRPPGNVDSYNITLSHKGTIKESRVLAPWITETHFKELVPGRLYQVTVSCVSGELSAQKMAVGRTFPDKVANLEANNNGRMRSLVVSWSPPAGDWEQYRILLFNDSVVLLNITVGKEETQYVMDDTGLVPGRQYEVEVIVESGNLKNSERCQGRTVPLAVLQLRVKHANETSLSIMWQTPVAEWEKYIISLADRDLLLIHKSLSKDAKEFTFTDLVPGRKYMATVTSISGDLKNSSSVKGRTVPAQVTDLHVANQGMTSSLFTNWTQAQGDVEFYQVLLIHENVVIKNESISSETSRYSFHSLKSGSLYSVVVTTVSGGISSRQVVVEGRTVPSSVSGVTVNNSGRNDYLSVSWLLAPGDVDNYEVTLSHDGKVVQSLVIAKSVRECSFSSLTPGRLYTVTITTRSGKYENHSFSQERTVPDKVQGVSVSNSARSDYLRVSWVHATGDFDHYEVTIKNKNNFIQTKSIPKSENECVFVQLVPGRLYSVTVTTKSGQYEANEQGNGRTIPEPVKDLTLRNRSTEDLHVTWSGANGDVDQYEIQLLFNDMKVFPPFHLVNTATEYRFTSLTPGRQYKILVLTISGDVQQSAFIEGFTVPSAVKNIHISPNGATDSLTVNWTPGGGDVDSYTVSAFRHSQKVDSQTIPKHVFEHTFHRLEAGEQYQIMIASVSGSLKNQINVVGRTVPASVQGVIADNAYSSYSLIVSWQKAAGVAERYDILLLTENGILLRNTSEPATTKQHKFEDLTPGKKYKIQILTVSGGLFSKEAQTEGRTVPAAVTDLRITENSTRHLSFRWTASEGELSWYNIFLYNPDGNLQERAQVDPLVQSFSFQNLLQGRMYKMVIVTHSGELSNESFIFGRTVPASVSHLRGSNRNTTDSLWFNWSPASGDFDFYELILYNPNGTKKENWKDKDLTEWRFQGLVPGRKYVLWVVTHSGDLSNKVTAESRTAPSPPSLMSFADIANTSLAITWKGPPDWTDYNDFELQWLPRDALTVFNPYNNRKSEGRIVYGLRPGRSYQFNVKTVSGDSWKTYSKPIFGSVRTKPDKIQNLHCRPQNSTAIACSWIPPDSDFDGYSIECRKMDTQEVEFSRKLEKEKSLLNIMMLVPHKRYLVSIKVQSAGMTSEVVEDSTITMIDRPPPPPPHIRVNEKDVLISKSSINFTVNCSWFSDTNGAVKYFTVVVREADGSDELKPEQQHPLPSYLEYRHNASIRVYQTNYFASKCAENPNSNSKSFNIKLGAEMESLGGKCDPTQQKFCDGPLKPHTAYRISIRAFTQLFDEDLKEFTKPLYSDTFFSLPITTESEPLFGAIEGVSAGLFLIGMLVAVVALLICRQKVSHGRERPSARLSIRRDRPLSVHLNLGQKGNRKTSCPIKINQFEGHFMKLQADSNYLLSKEYEELKDVGRNQSCDIALLPENRGKNRYNNILPYDATRVKLSNVDDDPCSDYINASYIPGNNFRREYIVTQGPLPGTKDDFWKMVWEQNVHNIVMVTQCVEKGRVKCDHYWPADQDSLYYGDLILQMLSESVLPEWTIREFKICGEEQLDAHRLIRHFHYTVWPDHGVPETTQSLIQFVRTVRDYINRSPGAGPTVVHCSAGVGRTGTFIALDRILQQLDSKDSVDIYGAVHDLRLHRVHMVQTECQYVYLHQCVRDVLRARKLRSEQENPLFPIYENVNPEYHRDPVYSRH

SEQ ID NO: 41852 - DNA, 6648 bp, Artificial Sequence
  derived and/or modified sequence
atggaggcggaattctacatggtgatcctgacgtgtctgattttccgaaactcagaaggcttccaaatcgtacacgtccaaaaacaacagtgcttgtttaaaaatgagaaggtggtcgtcggaagttgcaaccggacgatccaaaatcagcaatggatgtggacagaggatgaaaagcttctgcatgtcaaatccgcactgtgtctcgccatctctaatagctctcgcggtccctcgaggtctgcaattttagacagatgtagccaggcaccgcgctggacttgttacgaccaggagggattcctggaagtcgagaatgcctcactcttcttgcagaagcaagggagcagggtcgttgtgaaaaaggctcgcaagtacctgcactcctggatgaagattgatgtgaataaggaggggaagttagtgaatgaatctctgtgccttcagaaggccggcctcggggctgaagtgtccgtgcgatcaacacggaacaccgctcccccacagattctaaccactttcaacgctgtcccagacggattggtcttcttaatccgtaatacaacagaggcttttattcggaacgcagctgaaaactacagccaaaactcctcggagcgccaacacccaaacctgcatatgaccggcatcactgacactagctgggttttgtctaccactcaaccattcagtagtaccacagaggaaactggtcttgcagagcctgagcggtgtaatttcacactagccgagagcaaagcctcctctcattcagtgagtatccagtggaggattctagggtcaccttgcaatttctctctcatctactcctctgacacgttgggagcggcactgtgcccaacattccgcattgacaacaccacctacggatgcaatctgcaggacttgcaggcaggcaccatctataacttcagaataataagcctggacgaggagcgcacggtcgtccttcaaactgatccgctcccacctgcccgcttcggcgtttcaaaggagaaaaccacaagcactagcctgcatgtctggtggactccttctagcggaaaggtgactagctatgaggtccaactgttcgacgagaataatcagaagatccaaggcgtccagatccaagagagcacaagctggaacgaatacacgttctttaatctgaccgccggatctaaatacaacatcgctatcacagcagtgtccgggggtaaacgcagtttctccgtgtacaccaatgggtcgaccgtcccctctcccgtgaaggacatcggaataagcacaaaggcgaattccctgttaatttcatggagccacggcagcgggaacgtggaacgataccgtctcatgttgatggacaagggcattctcgtccatggaggtgtggtagataagcacgccactagctacgcatttcatggactcactcccggctatctatacaatctgactgttatgacagaagctgccggactgcagaattacaggtggaaactggtgagaacagcgccaatggaagtctctaacctcaaggtgactaacgacggctctcttacctctctcaaagtgaaatggcagcgcccgcctggaaacgtcgattcatataatataactttgagccacaaggggactattaaagaaagtagggtcttagcgccctggatcaccgagacccacttcaaagaactggtgcccggaaggctgtatcaagtgacagtgagttgcgtgtccggagagctatctgcacagaagatggctgttggtcgaacattccctgacaaggtagctaacctggaagccaataataatgggcgcatgcgctcattggttgtttcctggagccccccagctggggactgggagcagtaccgaatccttttgtttaacgacagcgtggtgctactgaacatcactgtgggtaaggaagagacacaatatgttatggacgataccggcctggtgccaggtcgacagtacgaggtcgaggtcatcgttgagtcgggtaatcttaagaattcagagcgctgtcaaggcaggaccgtgcccctggctgtactacagctacgggttaaacacgcaaatgagacaagcctgagcattatgtggcagacacccgtcgctgagtgggagaaatacatcatcagcctggccgaccgggacctccttttaatacataagagtctgtctaaagatgcaaaggaattcaccttcaccgatctggtgccaggaaggaagtacatggcaaccgtgacctctatttccggtgaccttaaaaattcctcctccgtgaaaggaagaaccgtccccgctcaggtaacagatttgcacgtggccaaccagggtatgacctccagcttgttcacaaactggacccaggcccaaggggacgtcgaattttaccaggtgctacttattcacgagaatgtggtgattaaaaacgagagcatttcatcagaaaccagtagatacagcttccactcactgaaatccgggtcactgtactcggtcgtagtcaccaccgtcagtggaggcatctcctccaggcaggttgtcgtcgaggggcggaccgtgccgagcagcgtgtctggggtgacagtcaataattctggaagaaacgactatctgagcgtgagttggctgctggcacctggcgatgtcgacaactatgaggttaccttgtcacacgacggcaaggtggtgcagagtctggtgattgccaagagcgttagagaatgctctttcagcagtttaaccccaggccgactctacacagttacaatcaccacccgctcaggcaagtacgagaaccatagtttttctcaggagcggactgtgccagataaagttcagggtgtgagcgtctcgaacagcgcccgcagtgattatctcagggtgtcatgggtccacgccacgggagacttcgatcactacgaggtcacaatcaaaaataaaaacaattttatccagacaaagtctatccccaagtcagaaaatgagtgcgtatttgtccagctggtgccgggccgcctgtattccgtgacagtaaccacaaaatcaggccagtacgaggctaatgagcagggcaatggtaggacaatcccggaacctgtaaaggacctcactctgaggaatagaagtaccgaggatctgcacgtcacctggagtggcgccaatggcgacgtcgatcagtatgagatccagcttctgttcaacgacatgaaagtgttcccacctttccatctagtgaacaccgcaactgagtaccgctttaccagccttacacctggccgccagtataaaatcctggtgctgacaatttcgggagatgttcaacaatcagcctttatcgaagggttcacagtgccatccgctgtcaaaaacatccacatctcaccaaatggggctacagacagtctcacggtcaactggacccctggtggaggcgatgtggacagttataccgtgtccgcattccggcactcacaaaaggtcgacagccagacgattcccaagcatgtctttgagcatacatttcatcgactggaggccggggagcagtaccaaatcatgattgctagtgtctctggatccctgaagaatcagatcaacgtcgttggccggactgtgccagcctcggtgcagggagtaatcgctgataacgcctactccagttatagcctcatcgttagttggcagaaggctgccggggtcgctgaacggtatgatatactattgctgactgaaaacggtatcttattaaggaacacatctgaacctgctacgacaaagcaacacaaattcgaggacctgacccctggaaagaaatacaaaatccagatcctgacagtcagcggggggctgttttccaaggaagcacaaacagaaggaagaacggtgcctgccgcagtgactgatctccgaattaccgagaactcgacaaggcacttgtctttcagatggaccgcgagcgaaggcgagctgagttggtataacatctttttatataaccctgacggcaacctgcaagagagagcccaggttgatcctctggtgcagagtttctcttttcagaacttgctgcaaggacggatgtataagatggtgatagtgacacactccggcgaactctcaaacgagtccttcatctttggtcggaccgtgccagccagcgtctcacacctgcggggcagtaaccgaaatacgactgattccctgtggttcaactggtcccctgcttcaggcgatttcgacttctacgagctgatactgtataacccaaacgggaccaagaaggagaattggaaggacaaagatctgaccgagtggcgattccaagggctggtccctggaagaaagtacgtgctatgggtggtcacacactccggtgatctcagtaataaggtgactgctgagtccaggacggctcctagtccaccatctttgatgagtttcgccgatatcgccaacacgagcctggctattacctggaaaggcccacctgactggactgattacaacgatttcgagctccagtggctgccgcgggatgccctgaccgtgtttaacccgtataataacagaaaaagtgaaggccgaatcgtttacggactgagacccggaaggtcctaccagttcaacgtcaaaactgtgagcggagattcctggaagacctattccaaaccgattttcggaagcgtcaggacaaagcctgataagatccagaacctccattgtcgcccacaaaactccacagccatcgcctgtagttggattccacccgacagcgactttgacggatattcaatagaatgtaggaagatggacactcaggaggtagagttcagtcggaaactggagaaagaaaaaagtcttcttaatataatgatgttagtgccacataagcgttaccttgtgtccattaaggtgcaatccgccgggatgacatccgaagttgtcgaagacagcaccattacaatgattgaccgcccaccacctccccctccccacatccgagtgaatgagaaggatgtattaatctcaaaatcctccatcaacttcacagtcaactgttcctggttcagtgacacaaacggggcagtcaagtactttactgtggttgtccgcgaggctgacgggtccgacgaattgaaacccgagcagcagcaccccttgccctcttatcttgagtacagacataatgcctctattcgggtctaccaaacaaactatttcgcaagcaagtgtgctgaaaacccaaacagcaatagtaaaagctttaacatcaagttgggcgctgagatggaatcactgggtggcaagtgcgaccccactcagcagaaattttgcgacggccctctgaagccccacaccgcctacagaatctctattcgtgccttcacacagctgtttgatgaagacctaaaggagttcactaaacccctgtactctgatacattttttagcctgcctatcaccacggaaagcgagcctctcttcggtgctatcgaaggcgtgtccgcaggcctgtttctgatcgggatgctagtggcagtggtcgccctgctaatatgcagacagaaagtatcccacggacgagaaagaccctctgcaaggctcagcatccggcgcgatcggccattaagcgttcatcttaaccttggacagaaggggaacaggaagactagctgccccattaaaatcaaccagttcgagggccactttatgaagcttcaggctgactccaactatctcttgagcaaagaatacgaagagctcaaggatgtggggagaaatcaatcctgtgacatcgctctcttgcctgagaatcgtggaaagaacagatataacaacatactgccctacgacgcgactcgagtcaagctgtccaacgtcgacgatgacccttgcagcgactatattaacgcaagttatatacctgggaataactttcgcagagaatacattgtgacccaggggccactgccaggcacaaaagacgatttctggaagatggtttgggagcagaatgttcacaatattgtcatggtaacacaatgcgtggagaagggaagggtcaagtgcgaccattactggcccgcagatcaggacagcctgtattatggggacttgatcctgcagatgttgtcagagagcgtgttacccgagtggaccatcagggagtttaaaatttgtggcgaagagcaactagatgcacatcggttaataagacactttcactacacagtttggccagaccatggcgtgcccgaaaccactcagtccttgattcagtttgtaaggacagtgagggattacatcaatagaagtccaggcgccggccctactgtggtgcactgttctgctggcgttggcagaaccgggacatttattgcacttgatagaatcctccaacagttggattccaaagactccgttgacatatatggagctgtccatgatttgaggctgcacagggtgcatatggtgcagaccgagtgtcagtacgtgtacctccaccagtgtgtccgggacgtgctgcgagcgaggaagcttcggtccgagcaggagaaccctctatttcctatatacgaaaatgttaatccagagtaccatcgcgatccggtgtactcccggcattag

SEQ ID NO: 41853 - DNA, 6648 bp, Artificial Sequence
  derived and/or modified sequence
atggaggccgagttctacatggtgatcctgacctgcctgatcttcaggaacagcgagggcttccagatcgtgcacgtgcagaagcagcagtgcctcttcaagaatgagaaggtggtggtgggcagctgcaacagaaccatccagaaccagcagtggatgtggacagaagatgagaagctgctgcacgtgaagagcgccctgtgcctggccatcagcaacagcagccggggccccagccgcagcgccatcctggaccgctgcagccaggccccccgctggacctgctatgaccaggagggcttcctggaggtggagaatgccagcctcttcctgcagaagcagggcagccgggtggtggtgaagaaggccaggaagtacctgcacagctggatgaagattgatgtgaacaaggagggcaagctggtgaatgaaagcctgtgcctgcagaaggccggcctgggcgctgaggtgtctgtgcgcagcaccaggaacacagccccaccccagatcctgaccaccttcaatgctgtgcctgatggcctggtgttcctgatccggaacaccacagaggccttcatcagaaatgctgctgagaactacagccagaacagcagcgagcggcagcaccccaacctgcacatgacaggcatcacagacacctcctgggtgctgagcaccacccagcccttcagcagcaccacagaggagaccggcctggccgagcctgagcgctgcaacttcaccctggccgagagcaaggccagcagccacagcgtgtccatccagtggaggatcctgggcagcccctgcaacttcagcctcatctacagcagtgacaccctgggcgccgccctgtgccccaccttcagaattgacaacaccacctacggctgcaacctgcaggacctgcaggccggcaccatctacaacttccgcatcatcagcctggatgaggagaggacagtggtgctgcagacagaccccctgcccccagcccgcttcggcgtgtccaaggagaagaccaccagcaccagcctgcacgtgtggtggacccccagcagcggcaaggtgaccagctatgaggtgcagctgtttgatgagaacaaccagaagatccagggcgtgcagatccaggagagcacctcctggaatgagtacaccttcttcaacctgacagctggcagcaagtacaacatcgccatcacagctgtgtctgggggcaagaggagcttctctgtgtacaccaacggcagcacagtgcccagccctgtgaaggacatcggcatcagcaccaaggccaacagcctgctgatctcctggagccacggcagcggaaatgtggagcgctaccgcctgatgctgatggacaagggcatcctggtgcacggcggcgtggtggacaagcacgccaccagctatgccttccacggcctgaccccaggctacctgtacaacctgactgtgatgacagaggccgccggcctgcagaactaccgctggaagctggtgaggacagcccccatggaggtgagcaacctgaaggtgaccaatgatggcagcctgaccagcctgaaggtgaagtggcagaggcctcctggaaatgtggacagctacaacatcaccctgagccacaagggcaccatcaaggagagccgggtgctggccccctggatcacagagacccacttcaaggagctggtgcccggccgcctgtaccaggtgacagtgtcctgtgtgtctggagagctgagcgcccagaagatggctgtgggccgcaccttcccagacaaggtggccaacctggaggccaacaacaacggccgcatgaggagcctggtggtgtcctggagccccccagctggggactgggagcagtaccgcatcctgctcttcaatgacagcgtggtgctgctgaacatcaccgtgggcaaggaggagacccagtatgtgatggatgacaccggcctggtgcccggccggcagtatgaggtggaggtgattgtggagagcggcaacctgaagaacagcgagcgctgccagggccgcacagtgcccctggccgtgctgcagctgcgggtgaagcacgccaatgagaccagcctgagcatcatgtggcagacccctgtggccgagtgggagaagtacatcatcagcctggccgaccgggacctgctgctgatccacaagagcctgagcaaggatgccaaggagttcaccttcacagacctggtgcccggcaggaagtacatggccaccgtgaccagcatcagcggggacctgaagaacagcagctctgtgaagggccgcacagtgcctgcccaggtgacagacctgcacgtggccaaccagggcatgaccagcagcctcttcaccaactggacccaggcccagggagatgtggagttctaccaggtgctgctgattcatgaaaatgtggtgatcaagaatgaaagcatcagcagcgagaccagccgctacagcttccacagcctgaagagcggcagcctgtacagcgtggtggtgaccaccgtgtctgggggcatcagcagccggcaggtggtggtggagggccgcacagtgcccagctctgtgtctggagtgacagtgaacaacagcggcagaaatgactacctgtctgtgtcctggctgctggcccctggagatgtggacaactatgaggtgaccctgagccatgatggcaaggtggtgcagagcctggtgattgccaagtctgtgcgggagtgcagcttcagcagcctgaccccaggccgcctgtacacagtgaccatcaccaccaggtctgggaagtatgagaaccacagcttcagccaggagaggacagtgcctgacaaggtgcagggcgtgtctgtgagcaacagcgcccggagtgactacctgcgggtgtcctgggtgcacgccaccggggactttgaccactatgaggtgaccatcaagaacaagaacaacttcatccagaccaagagcatccccaagtcagaaaatgaatgtgtgtttgtgcagctggtgcccggccgcctgtacagcgtgacagtgaccaccaagagcggccagtatgaggccaatgagcagggcaatggccgcaccatccctgagcctgtgaaggacctgaccctgaggaacagaagcacagaggacctgcacgtgacctggagcggggccaatggagatgtggaccagtatgagatccagctgctcttcaatgacatgaaggtgttcccccccttccacctggtgaacacagccacagagtaccgcttcaccagcctgaccccaggccggcagtacaagatcctggtgctgaccatctctggagatgtgcagcagagcgccttcatcgagggcttcaccgtgcccagcgctgtgaagaacatccacatcagccccaacggggccacagacagcctgactgtgaactggaccccaggaggaggagatgtggacagctacacagtgtctgccttccgccacagccagaaggtggacagccagaccatccccaagcacgtgtttgagcacaccttccaccggctggaggccggggagcagtaccagatcatgattgcctctgtgtctggcagcctgaagaaccagatcaacgtggtgggccgcacagtgcctgcctctgtgcagggcgtgattgctgacaatgcctacagcagctacagcctgattgtgtcctggcagaaggccgccggcgtggccgagagatatgacatcctgctgctgacagaaaatggcatcctgctgaggaacaccagcgagcccgccaccaccaagcagcacaagtttgaggacctgaccccaggcaagaagtacaagatccagatcctgactgtgtctgggggcctcttcagcaaggaggcccagacagagggccgcacagtgcctgctgctgtgacagacctgcgcatcacagagaacagcaccaggcacctgtccttccgctggacagccagcgagggggagctgtcctggtacaacatcttcctgtacaacccagatggcaacctgcaggagcgggcccaggtggaccccctggtgcagagcttctccttccagaacctgctgcagggccgcatgtacaagatggtgattgtgacccacagcggggagctgagcaatgaaagcttcatcttcggccgcacagtgcctgcctctgtgagccacctgcggggcagcaacagaaacaccacagacagcctgtggttcaactggagccctgccagcggggactttgacttctatgagctgatcctgtacaaccccaacggcaccaagaaggagaactggaaggacaaggacctgacagagtggaggttccagggcctggtgcccggcaggaaatatgtgctgtgggtggtgacccacagcggggacctgagcaacaaggtgacagctgagagcaggacagcccccagcccccccagcctgatgagctttgctgacatcgccaacaccagcctggccatcacctggaagggccccccagactggacagactacaatgactttgagctgcagtggctgcccagagatgccctgaccgtcttcaacccctacaacaacaggaagtctgagggccgcatcgtgtatggcctgcggcccggccgcagctaccagttcaacgtgaagacagtgtctggggacagctggaagacctacagcaagcccatcttcggctctgtgaggaccaagccagacaagatccagaacctgcactgccggccccagaacagcacagccatcgcctgctcctggatccccccagacagcgactttgatggctacagcattgagtgcaggaagatggacacccaggaggtggagttcagcaggaagctggagaaggagaagagcctgctgaacatcatgatgctggtgccccacaagcgctacctggtgtccatcaaggtgcagagcgctggcatgaccagcgaggtggtggaggacagcaccatcaccatgattgaccggcccccacctcctccaccccacatccgggtgaatgagaaggatgtgctgatcagcaagagcagcatcaacttcaccgtgaactgctcctggttcagtgacaccaacggggctgtgaagtacttcaccgtggtggtgcgggaggctgatggcagtgatgagctgaagccagagcagcagcaccccctgcccagctacctggagtaccgccacaatgccagcatccgggtgtaccagaccaactactttgccagcaaatgtgccgagaaccccaacagcaacagcaagagcttcaacatcaagctgggcgctgagatggagagcctgggcggcaaatgtgaccccacccagcagaagttctgtgatggccccctgaagccccacacagcctaccgcatcagcatccgggccttcacccagctgtttgatgaggacctgaaggagttcaccaagcccctgtacagcgacaccttcttcagcctgcccatcaccacagaaagtgagcccctgtttggagccatcgagggcgtgtctgctggcctcttcctgattggcatgctggtggccgtggtggccctgctgatctgccggcagaaggtgagccacggccgggagcggcccagcgcccggctgagcatccggcgggaccggcccctgtctgtgcacctgaacctgggccagaagggcaacaggaagaccagctgccccatcaagatcaaccagtttgagggccacttcatgaagctgcaggccgacagcaactacctgctgagcaaggagtatgaggagctgaaggatgtgggcaggaaccagagctgtgacatcgccctgctgcctgagaacagaggcaagaaccgctacaacaacatcctgccctatgatgccaccagggtgaagctgagcaatgtggatgatgacccctgcagcgactacatcaatgccagctacatccctggcaacaacttcagaagagagtacatcgtgacccagggccccctgcccggcaccaaggatgacttctggaagatggtgtgggagcagaatgtgcacaacatcgtgatggtgacccagtgtgtggagaagggccgggtgaagtgtgaccactactggccagctgaccaggacagcctgtactatggagacctgatcctgcagatgctgtctgagagcgtgctgcctgagtggaccatccgggagttcaagatctgtggggaggagcagctggatgcccacaggctcatccgccacttccactacacagtgtggccagaccatggagtgcctgagaccacccagagcctcatccagtttgtgaggacagtgcgggactacatcaacagaagccctggagctggccccaccgtggtgcactgcagcgctggggtgggccgcacaggcaccttcatcgccctggaccgcatcctgcagcagctggacagcaaggacagcgtggacatctatggagctgtgcatgacctgcggctgcaccgggtgcacatggtgcagacagagtgccagtatgtgtacctgcaccagtgtgtgagagatgtgctgcgggccaggaagctgcggtctgagcaggagaaccccctcttccccatctatgaaaatgtgaaccctgagtaccaccgggaccctgtgtacagccgccactag

SEQ ID NO: 41854 - DNA, 6648 bp, Artificial Sequence
  derived and/or modified sequence
atggaggccgagttctacatggtgatcctgacctgcctgatcttccgcaacagtgagggcttccagatcgtgcacgttcagaagcagcagtgcttgtttaagaatgaaaaggtggtggtgggctcttgcaataggacaattcaaaatcagcagtggatgtggacagaggatgaaaagctgttacacgttaagtcagccctttgtctcgccatctctaactcatcgcgaggcccgtctcgctcagcgatccttgacagatgcagtcaggctccgaggtggacttgctatgatcaggaggggttcctggaagtcgaaaatgcctcactgttcctgcagaagcagggatcgcgtgtcgttgtaaaaaaagcacgaaaatatttacactcctggatgaaaatagacgtaaataaggaaggaaagttagtgaacgaatccctgtgcctgcaaaaggcaggtttgggagctgaagtttcagtgcggagcacacggaatacagctcctccgcagatccttacaacttttaatgcggtgccggacggcctggtcttcctgatccggaataccacagaagcttttatccggaatgccgccgagaattactcacagaactcctctgagcgacagcaccccaacttacatatgactggaattaccgatacctcttgggtccttagtaccactcagccattttctagcacgacagaggaaacaggtcttgctgaacccgagcggtgtaatttcactctcgccgagtccaaagcaagtagtcacagcgtatctatccaatggaggatattgggctctccatgcaattttagtttgatctactccagcgatacattgggtgccgctctttgccctactttcagaattgacaacacaacttatggctgcaatctccaagatctgcaagctggaacaatatacaattttcggataatttccctggatgaagaacgtacagtcgtactgcaaactgatcctctgccgcccgccagatttggagtgtcaaaagagaaaacaactagcaccagcctacacgtgtggtggacgccctcgtcagggaaggttacttcatacgaggttcagctgttcgatgagaataaccaaaaaatccagggagtgcaaattcaggaaagtaccagctggaacgaatacacgttcttcaacttgacagcaggcagtaagtacaatatcgcaattacagctgtgagtggtgggaaacgctcattcagcgtctacactaatgggtctaccgtaccctcacctgtcaaagatattgggatttccacaaaggccaatagcttgctgattagctggtcgcacggcagcgggaacgttgagagatatcgcctaatgttgatggataaagggatcctggttcacggcggagtcgtggacaagcatgcaacttcatatgccttccacggccttactccgggctacctctacaacctgactgtcatgacagaggctgctggtctgcagaactaccgttggaagctcgtccggactgcccctatggaggtgtcgaacctgaaggtcactaatgatgggtccttgacaagtctcaaggtgaaatggcaacggccccctggcaatgtcgacagctacaacattaccctttctcataaggggaccatcaaagaatctcgtgtgctggcaccatggattacagagactcactttaaggaactggtcccaggacgcctctatcaggtgacagtgtcatgtgtctctggagaattatcggctcagaagatggcagtggggagaaccttccctgacaaggtcgcaaacttggaggcaaacaataatgggcgtatgcggtcactcgtggtcagctggtcccctcccgctggggactgggaacagtatagaatcctgttgtttaacgatagcgtagttttgctgaatattactgtcggaaaggaggagactcagtatgtgatggacgatacggggctggttcctggacggcagtatgaagtagaggtgattgtcgaatccgggaatttaaagaattctgagcgttgccagggccgcaccgttcccctggccgtgctccagcttcgggtgaagcacgccaacgaaacctccctctctattatgtggcagactcctgtggctgaatgggaaaaatacattattagtttggctgaccgcgacctgctgttgattcacaagtcactttccaaggacgccaaagaattcactttcacggacctggtgcccggtagaaaatatatggcaactgtgacaagcatctctggcgatctgaaaaatagtagttccgtcaagggtcggaccgtaccagcacaagtaacagacctgcacgtagccaaccagggcatgacgtccagcctgtttactaactggacgcaggcccaaggtgacgtcgagttctaccaggttcttcttattcatgaaaacgtggtaattaaaaatgaatcaattagttcggaaacgtcgagatacagtttccattccctgaagagcggctcactttactccgtcgtggtcactaccgtctcagggggtatcagttcacgacaggtggttgtagaagggaggactgtgccttctagtgtatctggggtcacagtgaataactccggccgaaacgattacttgtctgtgagctggcttctggcccccggcgatgtggataattacgaagtcacactttcgcatgatggcaaagtggtgcaatcactggtgattgctaagtctgtgagagagtgcagtttttccagcctgacgccaggccgattgtacacagtcacgattaccactcggtctggaaagtacgaaaaccactccttctctcaggaaaggaccgtgcccgacaaggtgcagggtgttagcgttagtaattccgcaaggtccgattatctgagggtttcctgggttcacgctaccggggactttgaccactatgaagtgacaattaaaaacaagaacaattttatccaaaccaaatctatccctaagagcgagaacgaatgcgttttcgtgcagctggtgcctggtaggctgtactcagtaaccgtcacgacgaagtcagggcagtacgaggccaatgaacaggggaatgggaggacaatcccagagccagtgaaagacctgaccctgagaaaccgctcgactgaagacctgcatgtgacgtggtcaggggctaacggggacgtagatcagtacgagatccagcttcttttcaatgacatgaaggtcttccctccgtttcacctcgttaataccgccactgagtaccggttcacatccttgaccccaggcaggcaatataagatactggtcctcactatctcaggcgatgtgcagcaatctgccttcatcgagggctttaccgtaccctccgccgtgaaaaacatccacatttcaccgaatggagcaaccgattccttgaccgtgaattggacccctggcggtggggacgttgattcttacaccgtaagcgcttttagacactcacaaaaagtagacagtcagactatccctaagcatgtcttcgagcacaccttccataggctagaagccggcgaacagtatcagattatgattgcatccgtcagtggctccctcaagaatcaaattaatgtggtcgggcggacagtccccgcctcagtccagggagtcatcgccgataatgcctattcgagttactccctgatagtaagctggcaaaaggctgctggggttgctgaacgttatgacatactcctgctcaccgagaacggaatactactacggaataccagtgaaccagcgaccactaagcagcacaagttcgaggatctgacacctggtaaaaagtacaagattcaaatcctgacggtgagcgggggcctattctctaaagaggcacaaacagagggcaggactgttcccgctgccgtgacggacctccggattactgaaaattccactagacatcttagtttcagatggaccgctagcgaaggagagctctcctggtacaatatcttcttgtataaccctgacgggaatcttcaggagagggcacaggtggatcccttagttcaatcgttttcctttcagaatctgctccagggaagaatgtacaagatggtgatcgttacacattctggtgagctctccaatgagagctttattttcggcaggaccgtacccgcctctgtgtcccatctccggggctcgaacagaaacactacggactccctctggtttaactggtctccggcgagcggcgactttgacttctacgagctcatcttgtataaccctaatggcaccaagaaggagaactggaaagacaaagatcttaccgaatggaggtttcaaggtctggtgcctggaaggaaatacgtgctatgggtagttactcatagcggggatctctccaacaaggtgaccgccgagagcagaacggccccatctccaccaagcctgatgtccttcgcagatatcgctaatacgagcctcgcaatcacgtggaaaggcccaccagactggacagactataacgatttcgagctgcagtggctgccacgtgatgctctgacggtgtttaatccatacaacaatcgaaagtcggaaggccggattgtgtatggactgcggccaggtcgatcttaccaattcaacgttaaaactgtctctggcgacagctggaaaacatattcaaaaccgatttttgggagtgtcagaactaagcccgataaaattcagaacttacactgccggccgcagaacagcacggcaatagcctgctcatggattccccccgactcagactttgacgggtatagcatagaatgtcgcaaaatggacactcaggaggtagagttctcgcgtaaacttgaaaaggaaaagagcttattgaacatcatgatgctggtgccccacaagagatatctcgttagtataaaggtgcagagcgcaggaatgacttccgaagtggtggaggactcgactatcacgatgatcgaccggcccccaccaccccccccgcacattagagtgaacgaaaaagacgtgttgataagtaaatcttcaataaattttacagtcaactgtagctggttctctgatacaaacggagccgtgaagtactttaccgtggtagtaagggaggctgatggttccgatgaactgaagcctgaacagcagcacccgctccctagctacctggagtacagacataacgcctccatccgtgtgtatcagactaattattttgctagtaaatgcgccgagaacccaaactccaactctaagtcttttaatatcaaactaggagccgagatggagagtctaggcggcaaatgtgatcccacccaacagaaattctgtgacgggcccctgaaacctcacactgcataccgtattagtatccgcgcattcactcagctgttcgatgaagatctgaaggaatttacgaaaccgctctattcggatacttttttcagcctcccgataacgacagagtcagaacctctttttggagctattgaaggagttagtgcaggtctgtttcttatcggcatgctggtggccgtcgtagcccttctcatatgccgccagaaggtttcgcacggccgagagaggccatccgcccgactgtctattcggcgcgaccgtcccttaagcgttcatctgaatttgggtcagaaggggaatcggaagacctcttgccccatcaagatcaaccaattcgagggacacttcatgaaactgcaggccgattcaaattaccttttatcgaaggagtatgaggagctcaaggacgtgggacgtaatcagtcctgcgatatcgcacttctgccagagaatcgtggaaaaaatcgctataacaacatcctgccttacgatgctactagggtgaagctgagcaacgtggacgatgacccctgcagtgattatattaatgcgtcttacattccaggtaataacttccggagggaatacattgtcactcaaggcccacttccaggtacaaaggatgacttctggaagatggtttgggaacagaacgtgcataatatcgtaatggtgactcaatgcgtggagaagggacgcgttaagtgtgatcactattggcccgccgatcaggacagtttgtactatggggatctgatactgcagatgttgtccgaaagcgtcttaccagagtggaccatccgggagtttaaaatctgtggtgaagaacagcttgacgctcacagactgattcggcacttccattacaccgtctggcctgatcatggggttcccgaaacaacacaaagccttattcaatttgtcagaacagtacgcgactacattaaccgctcccccggtgcagggccaaccgtggtccactgcagcgccggtgttggtaggactggtacattcatcgcccttgatcgcatcctccagcagctggacagcaaagactcggtggatatttacggcgccgtgcacgaccttcgactccacagggttcacatggtgcagacggaatgtcagtacgtgtacttgcatcagtgtgttcgagacgtgctgcgggccaggaaacttcggtcagagcaagagaaccccctatttccaatttacgaaaatgttaacccggaataccaccgggacccagtatatagtcggcactag

SEQ ID NO: 41855 - DNA, 6647 bp, Artificial Sequence
  derived and/or modified sequence
atggaagctgagttttacatggtaatactgacctgcctgattttcaggaactcagagggatttcagattgtccatgtgcaaaaacagcagtgcctcttcaaaaacgagaaggttgttgtgggatcctgcaatagaaccatccaaaatcagcaatggatgtggaccgaggatgagaagcttcttcacgtaaaatcagccctgtgtctcgccatcagtaattcttctaggggacctagtcgcagcgctatcctcgatcgatgcagtcaggcgcctcgatggacctgctacgaccaggagggctttcttgaggtggagaatgcttctttatttctgcaaaagcaggggagtcgggtcgtggtgaagaaggcacgcaaatacttgcactcttggatgaaaatagatgttaacaaggaaggcaaattagtgaatgagtccctgtgtctccagaaagcaggactcggagcggaagtttctgtcaggagtacccgtaacacggccccaccccagatactgaccacattcaacgccgtgcccgacggtttggtgttccttattcggaatacaaccgaggccttcattcgcaatgccgctgagaattactcgcaaaactcatcagagaggcagcatccaaatttgcacatgaccggtatcaccgatacatcctgggtgctcagtacgacacaacccttttcaagcaccaccgaagaaaccggacttgctgagcccgaacgatgtaactttaccctggccgaaagcaaggctagtagtcatagcgtatctattcagtggaggattctagggagcccttgtaatttctcactcatatatagcagcgacactctaggcgctgccctgtgccctacatttagaattgataacacaacctatgggtgtaacttgcaggatttgcaggccggtactatttacaactttagaataatctcacttgacgaagagcggactgtggtgctgcagaccgaccccctgcctcctgcccgttttggcgttagcaaggagaaaacaaccagtacttccctgcacgtgtggtggaccccctcgtccggcaaggtcacgtcatatgaggtgcaattatttgacgagaataaccagaaaattcagggagtgcagatccaagaaagcacatcttggaacgagtatacattcttcaacctgacagctggcagtaagtataatattgccatcaccgcagtctctggtgggaaacggtcattctctgtgtacactaatggcagcacagtgccttctccagtgaaagacattggaatcagcaccaaagcgaactctctcctgataagttggtcccatggcagcggcaacgtggaaagatacaggctcatgttaatggataagggcattcttgtccatgggggagtagtggacaagcatgcaacctcatacgcctttcatggcctcacccctggttacctgtacaacctcacagttatgaccgaggccgctggtctgcaaaactatcgctggaaactggtgaggacagcgcctatggaggttagtaacctcaaggttacaaacgatggcagccttaccagtttgaaggtcaagtggcagaggcctcccggaaatgtggacagctacaatattaccctgtcccacaaaggtacaatcaaagagtcacgcgtgctcgcaccgtggattacggaaacccactttaaggagctggtgccgggtcgcctgtaccaagtgacagtaagctgcgtgtccggcgagctgagtgctcagaagatggccgttgggaggacgttccctgataaagttgctaatctagaagccaacaataatggtagaatgagatccttagtagtgtcatggtcccctccagcgggagactgggaacaatatcgaattctgctgtttaacgactcagttgtccttttaaacatcactgtgggcaaagaggagacacagtacgtaatggacgacaccggtttggtgccaggaagacagtatgaagtagaggtgatagtcgagtccggcaacctgaagaatagcgaaaggtgccagggccgaacagtacctcttgcagttctccaactgcgagtgaaacatgctaacgaaacaagcttgagcattatgtggcagaccccagtggccgaatgggaaaagtatattatcagcctcgccgaccgagatcttctgttaatacacaagagtctgtcgaaggatgccaaggagttcaccttcacagacctggtcccgggacggaagtatatggccaccgtgacgtcaattagcggggacttgaaaaattcaagcagtgtgaagggcaggacagtccctgcgcaggtgaccgacctgcatgttgcgaaccagggaatgactagttccctgttcaccaattggactcaagcccagggcgatgtcgagttctatcaggtactgctgattcatgagaatgtggttataaagaatgagtcgatttctagcgagacatcccggtatagctttcattctctcaagtcaggatcactgtatagtgtcgtggtgaccacagtgtctggtggaatctctagccggcaagtagtggtcgaggggagaacagtgccctctagtgtgtctggagtcaccgttaacaactccgggaggaacgattacctctccgtctcctggctgctggcacccggagatgtcgataattatgaggtcacactgtcccacgatgggaaagtggtgcaaagcctcgtgattgcaaagtcggttcgagagtgctccttctctagtctgacacctggtagactgtatactgtcaccataacaacacgaagcggtaaatacgaaaaccactctttctcccaggaacgtaccgtccctgacaaagtgcagggagtcagcgtaagcaattccgccagaagtgactacctccgggtctcctgggtgcatgcaacaggagatttcgatcactatgaggttaccattaaaaacaagaataactttatccagacaaagagcattccaaagagcgagaatgagtgtgtctttgtgcagctggtcccagggcgtctctatagtgtcacagtgaccaccaagagtggtcaatatgaagccaatgaacaggggaatggcaggacaatccctgaaccagtaaaggatctcacactccgcaaccggtctaccgaggatctgcacgtgacgtggagtggcgcaaacggagatgttgaccagtatgagatacaactgctgtttaacgacatgaaggtattccctccctttcatctggttaacacagccactgaatatcgttttacatctctcacccccggaaggcagtacaaaatcctggtgctgacaatcagcggcgatgtacagcagagcgcatttattgaggggttcaccgtaccatcagctgtgaagaatattcatatatctcccaacggcgctaccgactcgctgacggtgaattggaccccagggggaggtgacgtagattcctacaccgtgtccgcattccgccactcccagaaagtggattcgcagacgattcccaagcacgtcttcgagcatacctttcaccgcctagaggctggcgaacagtaccagatcatgattgcaagcgtgagtggatctctgaagaaccagattaatgttgtcgggcgtacagtgcctgcatccgttcagggagtgatagccgacaatgcctactcttcatactcattaatcgtgagttggcagaaagctgccggtgtagccgagcgctatgacattctgctcctgaccgagaacggtatcctgctgcgcaacacctccgagcccgctaccacgaagcagcataagtttgaagacttaactccgggtaagaaatacaagatccaaattctcactgtgtccggtggactgttttctaaagaagctcagaccgaaggtaggactgtgcctgccgcagttactgacctgcggataaccgaaaattccacgcggcacctgtcgttccgatggacagcatctgagggagaactgtcctggtacaatatcttcctatacaacccagatggcaatcttcaagagagagcacaggtcgaccctctggtccagagcttcagctttcagaacctacttcagggcagaatgtacaagatggtgattgtcacacacagcggagagctgagcaacgagtcctttatatttgggaggactgtgcctgcatcggttagccatttgcgcggttccaacagaaataccaccgactctttgtggtttaattggagcccagctagcggcgattttgatttctacgagctgattctctataaccccaatggcaccaaaaaagagaattggaaagacaaggacctcaccgagtggagattccagggcttggtaccaggccgaaagtacgttttgtgggttgtcactcattctggggatttgagtaataaagtaaccgcagaatcaaggaccgcaccaagccctccaagtctaatgtcgtttgccgatattgccaacacatcactcgccattacatggaagggccctcctgactggacagactataacgattttgaacttcagtggttaccgagagatgcactcacagtctttaacccttacaataacagaaaaagcgaggggaggattgtgtacggattgcggcctggcagatcgtatcagttcaacgtgaagacagtcagcggagacagttggaaaacttatagcaagccaatttttgggtctgtgcggactaagcctgacaagattcagaaccttcactgcaggccccagaattcaactgctattgcttgttcctggattcctccggatagcgactttgacggctacagtattgaatgccgcaaaatggacactcaggaggtggagttttctagaaagctggaaaaagaaaagagcctactgaacatcatgatgcttgttccacataagaggtacctggtctccattaaggtccaaagcgcaggcatgacaagcgaagtcgtggaggactctaccataaccatgatcgatcgcccaccacctcctcctccccacatcagggtcaatgagaaggacgtcttgatttcgaaatcctctataaactttaccgtgaattgcagctggttctcagacacgaatggggcagtaaagtacttcaccgttgtcgtccgcgaggccgacggaagtgatgaattgaaacccgaacagcagcaccccttaccgtcctatctggaatatcggcacaatgctagcataagagtttatcaaacaaactacttcgcctctaaatgtgccgagaatcccaattcaaactctaaaagctttaatattaaacttggcgcagaaatggaaagcttgggcggtaaatgtgatcctacacagcagaaattctgtgatggcccactcaaaccacatactgcataccgcatcagcataagagcatttacccagttgtttgacgaagaccttaaggaatttaccaaaccactgtattccgacacgttcttttccctgcccataaccactgaatcagagcccctgttcggcgcaattgagggggtgagcgcaggcttgttcctgattggaatgctcgtggccgtcgttgcactcctgatctgcagacagaaggtctctcacgggagggaacgaccttctgccagactgtctattcgccgagataggcccctgagcgtacacctgaaccttggacagaaagggaaccggaagacaagctgtccgattaagatcaaccaatttgagggccattttatgaaactccaggccgacagtaattatctgctgtctaaggaatacgaagagttaaaagacgtgggcaggaatcagtcatgtgatatcgcgctcctaccagaaaatcggggaaagaacaggtataacaatattttaccctacgatgctaccagagtgaagctcagcaatgtggacgacgatccatgctccgattacattaatgcctcttacatcccgggtaacaacttcagacgcgaatatattgtcactcagggacctctgcccggaaccaaagatgacttttggaaaatggtgtgggaacagaacgtccataatatcgtgatggtgactcagtgcgtagagaaaggccgtgtaaagtgcgatcattactggcccgctgaccaagattctctgtactatggggatttgattctgcagatgctatccgagagcgttctgcctgaatggaccataagagagttcaaaatttgcggagaggagcagctggacgcgcacaggttgattcgccatttccattacactgtttggcccgatcatggggtcccagagacaacacagagcttgattcagtttgttaggactgtgcgcgactacattaatcggtcccccggtgctggaccaaccgtagtgcattgcagtgcgggagtgggtagaacagggacatttattgccctggaccgaatcctccagcagttagacagtaaagatagtgtcgacatatacggcgcagtacatgacctgcgcttgcatcgggtacacatggtgcagactgagtgtcagtacgtgtacctgcaccagtgtgtgagggacgttttaagagcgaggaaactgcggtctgagcaggaaaaccccctgttccctatttatgagaacgtgaatcccgagtaccaccgggatcccgtttattctagacatta

SEQ ID NO: 41856 - DNA, 11332 bp, Artificial Sequence
  derived and/or modified sequence
ttttttttttccccaagcgaagcatgaacagttgctaagtggaaaatggaggctgaattttacatggtgattcttacctgcttgatcttcaggaactcagaagggtttcagattgtccatgtccagaaacaacagtgtcttttcaaaaatgagaaagtggtcgtgggctcatgcaacaggaccatccagaaccagcagtggatgtggactgaggatgaaaagctccttcatgttaaatctgcactgtgcttggccatctccaactcttcccgcggcccctcccgctcagccatcttggaccgctgttcccaggcaccccgatggacctgctatgatcaggaaggcttccttgaggtggaaaatgcctctctctttctccagaaacaaggctccagagtagtggtcaagaaggccaggaaatacctccatagctggatgaaaatagatgtcaacaaggagggaaaactggtcaatgaaagcctctgtttacaaaaagctggcctgggagcagaagtttcggtgaggagcactagaaacacggctccaccccagattctcactacctttaatgcagttccagatggcctggtattccttattaggaataccacagaggccttcatcagaaatgctgcagaaaactacagccaaaacagcagcgagaggcagcatcccaatctgcacatgactggaattacagacacatcatgggttttgtcgactactcagcccttctccagcaccactgaagagactggactggcggagccagagagatgtaacttcaccctggcggagtccaaggcctccagccattctgtgtctatccagtggagaattttgggctcaccctgtaactttagcctcatctatagcagtgacaccctgggggccgcgttgtgccctacctttcggatagacaacaccacatacggatgtaaccttcaagatttacaagcaggaaccatctataacttcaggattatttctctggatgaagagagaacagtggtcttgcaaacagatcctttacctcctgctaggtttggagtcagtaaagagaagacgacttcaaccagcttgcatgtttggtggactccttcttccggaaaagtcacctcatatgaggtgcaattatttgatgaaaataaccaaaagatacagggggttcaaattcaagaaagtacttcatggaatgaatacacttttttcaatctcactgctggtagtaaatacaatattgccatcacagctgtttctggaggaaaacgttctttttcagtttataccaatggatcaacagtgccatctccagtgaaagatattggtatttccacaaaagccaattctctcctgatttcctggtcccatggttctgggaatgtggaacgataccggctgatgctaatggataaagggatcctagttcatggcggtgttgtggacaaacatgctacttcctatgcttttcacgggctgacccctggctacctctacaacctcactgttatgactgaggctgcagggctgcaaaactacaggtggaaactagtcaggacagcccccatggaagtctcaaatctgaaggtgacaaatgatggcagtttgacctctctaaaagtcaaatggcaaagacctcctggaaatgtggattcttacaatatcaccctgtctcacaaagggaccatcaaggaatccagagtattagcaccttggattactgaaactcactttaaagagttagtccccggtcgactttatcaagttactgtcagctgtgtctctggtgaactgtctgctcagaagatggcagtgggcagaacatttccagacaaagttgcaaacctggaggcaaacaataatggcaggatgaggtctcttgtagtgagctggtcgccccctgctggagactgggagcagtatcggatcctactcttcaatgattctgtggtgctgctcaacatcactgtgggaaaggaagaaacacagtatgtcatggatgacacggggctcgtaccgggaagacagtatgaggtggaagtcattgttgagagtggaaatttgaagaattctgagcgttgccaaggcaggacagtccccctggctgtcctccagcttcgtgtcaaacatgccaatgaaacctcactgagtatcatgtggcagacccctgtagcagaatgggagaaatacatcatttccctagctgacagagacctcttactgatccacaagtcactctccaaagatgccaaagaattcacttttactgacctggtgcctggacgaaaatacatggctacagtcaccagtattagtggagacttaaaaaattcctcttcagtaaaaggaagaacagtgcctgcccaagtgactgacttgcatgtggccaaccaaggaatgaccagtagtctgtttactaactggacccaggcacaaggagacgtagaattttaccaagtcttactgatccatgaaaatgtggtcattaaaaatgaaagcatctccagtgagaccagcagatacagcttccactctctcaagtccggcagcctgtactccgtggtggtaacaacagtgagtggagggatctcttcccgacaagtggttgtggagggaagaacagtcccttccagtgtgagtggagtaacggtgaacaattccggtcgtaatgactacctcagcgtttcctggctgctggcgcccggagatgtggataactatgaggtaacattgtctcatgacggcaaggtggttcagtcccttgtcattgccaagtctgtcagagaatgttccttcagctccctcaccccaggccgcctctacaccgtgaccataactacaaggagtggcaagtatgaaaatcactccttcagccaagagcggacagtgcctgacaaagtccagggagtcagtgttagcaactcagccaggagtgactatttaagggtatcctgggtgcatgccactggagactttgatcactatgaagtcaccattaaaaacaaaaacaacttcattcaaactaaaagcattcccaagtcagaaaacgaatgtgtatttgttcagctagtccctggacggttgtacagtgtcactgttactacaaaaagtggacaatatgaagccaatgaacaagggaatgggagaacaattccagagcctgttaaggatctaacattgcgcaacaggagcactgaggacttgcatgtgacttggtcaggagctaatggggatgtcgaccaatatgagatccagctgctcttcaatgacatgaaagtatttcctccttttcaccttgtaaataccgcaaccgagtatcgatttacttccctaacaccaggccgccaatacaaaattcttgtcttgacgattagcggggatgtacagcagtcagccttcattgagggcttcacagttcctagtgctgtcaaaaatattcacatttctcccaatggagcaacagatagcctgacggtgaactggactcctggtgggggagacgttgattcctacacggtgtcggcattcaggcacagtcaaaaggttgactctcagactattcccaagcacgtctttgagcacacgttccacagactggaggccggggagcagtaccagatcatgattgcctcagtcagcgggtccctgaagaatcagataaatgtggttgggcggacagttccagcatctgtccaaggagtaattgcagacaatgcatacagcagttattccttaatagtaagttggcaaaaagctgctggtgtggcagaaagatatgatatcctgcttctaactgaaaatggaatccttctgcgcaacacatcagagccagccaccactaagcaacacaaatttgaagatctaacaccaggcaagaaatacaagatacagatcctaactgtcagtggaggcctctttagcaaggaagcccagactgaaggccgaacagtcccagcagctgtcaccgacctgaggatcacagagaactccaccaggcacctgtccttccgctggaccgcctcagagggggagctcagctggtacaacatctttttgtacaacccagatgggaatctccaggagagagctcaagttgacccactagtccagagcttctctttccagaacttgctacaaggcagaatgtacaagatggtgattgtaactcacagtggggagctgtctaatgagtctttcatatttggtagaacagtcccagcctctgtgagtcatctcagggggtccaatcggaacacgacagacagcctttggttcaactggagtccagcctctggggactttgacttttatgagctgattctctataatcccaatggcacaaagaaggaaaactggaaagacaaggacctgacggagtggcggtttcaaggccttgttcctggaaggaagtacgtgctgtgggtggtaactcacagtggagatctcagcaataaagtcacagcggagagcagaacagctccaagtcctcccagtcttatgtcatttgctgacattgcaaacacatccttggccatcacgtggaaagggcccccagactggacagactacaacgactttgagctgcagtggttgcccagagatgcacttactgtcttcaacccctacaacaacagaaaatcagaaggacgcattgtgtatggtcttcgtccagggagatcctatcaattcaacgtcaagactgtcagtggtgattcctggaaaacttacagcaaaccaatttttggatctgtgaggacaaagcctgacaagatacaaaacctgcattgccggcctcagaactccacggccattgcctgttcttggatccctcctgattctgactttgatggttatagtattgaatgccggaaaatggacacccaagaagttgagttttccagaaagctggagaaagaaaaatctctgctcaacatcatgatgctagtgccccataagaggtacctggtgtccatcaaagtgcagtcggccggcatgaccagcgaggtggttgaagacagcactatcacaatgatagaccgcccccctcctccacccccacacattcgtgtgaatgaaaaggatgtgctaattagcaagtcttccatcaactttactgtcaactgcagctggttcagcgacaccaatggagctgtgaaatacttcacagtggtggtgagagaggctgatggcagtgatgagctgaagccagaacagcagcaccctctcccttcctacctggagtacaggcacaatgcctccattcgggtgtatcagactaattattttgccagcaaatgtgccgaaaatcctaacagcaactccaagagttttaacattaagcttggagcagagatggagagcctaggtggaaaatgcgatcccactcagcaaaaattctgtgatggaccactgaagccacacactgcctacagaatcagcattcgagcttttacacagctctttgatgaggacctgaaggaattcacaaagccactctattcagacacatttttttctttacccatcactactgaatcagagcccttgtttggagctattgaaggtgtgagtgctggtctgtttttaattggcatgctagtggctgttgttgccttattgatctgcagacagaaagtgagccatggtcgagaaagaccctctgcccgtctgagcattcgtagggatcgaccattatctgtccacttaaacctgggccagaaaggtaaccggaaaacttcttgtccaataaaaataaatcagtttgaagggcatttcatgaagctacaggctgactccaactaccttctatccaaggaatacgaggagttaaaagacgtgggccgaaaccagtcatgtgacattgcactcttgccggagaatagagggaaaaatcgatacaacaatatattgccctatgatgccacgcgagtgaagctctccaatgtagatgatgatccttgctctgactacatcaatgccagctacatccctggcaacaacttcagaagagaatacattgtcactcagggaccgcttcctggcaccaaggatgacttctggaaaatggtgtgggaacaaaacgttcacaacatcgtcatggtgacccagtgtgttgagaagggccgagtaaagtgtgatcattactggccagcggaccaggattccctctactatggggacctcatcctgcagatgctctcagagtccgtcctgcctgagtggaccatccgggagtttaagatatgcggtgaggaacagcttgatgcacacagactcatccgccactttcactatacggtgtggccagaccatggagtcccagaaaccacccagtctctgatccagtttgtgagaactgtcagggactacatcaacagaagcccgggtgctgggcccactgtggtgcactgcagtgctggtgtgggtaggactggaacctttattgcattggaccgaatcctccagcagttagactccaaagactctgtggacatttatggagcagtgcacgacctaagacttcacagggttcacatggtccagactgagtgtcagtatgtctacctacatcagtgtgtaagagatgtcctcagagcaagaaagctacggagtgaacaagaaaaccccttgtttccaatctatgaaaatgtgaatccagagtatcacagagatccagtctattcaaggcattgagaatgtacctgaagagctcctggataaaaattattcactgtgtgatttgtttttaaaaacttgcttcatgccctacagaggtgccagctatttctgttgatactatgtataatttattaatctggagaatgtttaaaattttatataatttaaaggtaacagatattattgtacatagttgtattttgtagtttcttctgtaaatatgtatttttcataatgtttaatattaagctttatataatactatttttccacactaaagtgttcatgacttgttctacataaaactaattcaacctgtatgacaggactactggtaaaatgcatatggaggtggtggcagagacaatccttcaggccatgttttctacctgttttgatattcactggacaggaaaaagggcagggctagagagagcaaatactatggctagatttgctgcattgctgtcccatgaatctcgagagccaacagacatgtcctaacttgctattaggacaaatgtgacagtcaaaaaaaggattagagggagggagaaaaaagaattaagcagtaccaaagctgaactagatgcttgtgtctgaactagttgctctctctctcctttctccttccagggattcaagccaaagtggtcagctcagggatcatgtaacttgcagtgcaagcccaggatggtaggatgcagggttgagggttctgatagagaatgattccaaacagaagtgatgaattccttttgttaataagatgccagctatacccagactggaaacataacatgcaaagcactatctacagtgattagagatcctttcattgcattcatggtgtggagtgtgaacatccacacccatactgtaatgtatttatacacactagtttctgtctcattttcagtggtctccattcctagaaaagtcacaattatccattcctacttgatttcccattaaaagaatattatggtagcagattgtgcccctcattaaaaggcttaatgccaacattttcatagaaatgactacaaacatcatatatagtaaatttaaaaacaatagcaaaaacaaaaacagtggtcttcagtaaaattttcaaaacttcttttagtaaatcaatgaagtcaaaatgtcaagtaatcacccaaagttgcatttaataacaaaaggcactacatactgtaccaagtttatcttcaatatttgtgccttacttactttgactataacaaattccaatgagtcagaaagtatttccttcatcaaggtccagttccgacagcattcctgggaaaaatttgaaaggagtttgtacggaatcttcatagatacctgagaagatgagctggagatgtttgcctttttcacactacaaatttttctgtaataaacttgggaattagaggtcaagtttgttgatggcatagcttcctttgcataaagagtatatttcttttcaaagtatatatttttgtaacctaccataaagtccgtaagtgaatacaacgaatgtaattgacataataattgaaaatcattgactatacctaaaatagttctttataattaaataactctacacccaatctggaaatttttccaaggttatttgaagtttacaaaaatgtgaagcataatcataagcttcaaagattcacagtttcattgtgctcaatgctcttgtgaaatgacagtcttaagctctgattctgtatcaaggaactaagtgaatcttctggaaatgaaaaggaacaacatatgtgtaagtgcagtagatgtaccaccagcgagaaaatagaggtcagagatctacaacgtgtggcatccattagaaatcacctttcctacattgaaaagaaaaaagagaaaaagcagaattttacactaatgttgcttgatgcaaagcacattaatgcttggaaggatacattcattttcgacttttcattcactcagaaaacttctagtaagtatctgcaacctgctaggcactgttccagaatctacacatttctactcacataaagagaatcctcataaagttaggattgttgttactaccttcaattgagcttaaaagacagcctcatcaagggaatgggataactgagccagtctaggacagtggtcaccttccacaggccacacactggaaagtgctaatgctactttaatagcaaacctctggatctaggagagagagcaattaattgcacaaaccaggagttaaaaccataaaaaaaacctatgcatctgtaatagtaaataacactcacgtactctggcaacatctagggtagtatcagaattatgtaaatggacatgacagggaaaaatcgtaggtttttttagtctaatccaacccaggaaatgtttattcctaccctacacctaattttaaaccttcttagcaacaaatatttcactattcgctcctactcctgggaagactaaatatataattgacttatttattaaatttaggagaaaaaaaaagttttccttgacattcagctctattggatttatttccatttaattgcatcatgtgttatgtcttggtaaacactccatttcctgtcttggtgggcatcctgtctgtgtacctgtgcagtacactttaatcatcaagacttcaaagtgcttttgagctatcaaatcttgggagagtcccatctagcatcttaataattatttttccaagttcgttataattaactcctttaacctcatctcattaaatcaattttgtattgtcattctgttgttctctggaaagcagccaattgttcagctcttgaatcagaattttcaaagactcacctctcttacctgggcttgcacatatttgtcctaagtaattctctatcccttaaacctctgagtccctctgttttattacttgccccactcctcctacttgaatatgtttgttttcccagttgaatgtgatttttatctactgttcatattatcttttatacccatgagtataatttcatagtcctttcaggttccacatcatcaaagagatgaccataatttcacttttttttgaaatgaagtcttgctctgttgcccaggctggagtgcagtggcacaatctcagctcactacaacctccgcctcccaggttcaagcgattctgccttagcctcccaagtagctggaattacaggtgcctgccaccatgtctggctaatttttgtgtttttagtagagatggggtttcaccatgttggccaggctggtcttgaactcgtgaccttaggtgatccacccacctcaacctcccaaagtgctaggattacaagagtgagccaccgcacctggccaattcacttttaaatactaaaaggcacacagcacacagacattttcggggcagttttctttgggagggtctttgataaattttgtaatcacctctcggaagaaagcccaaaatgacatgtgaaaataatattaaaccatttaccagatgtccagcaatataaaaatagacctcacatgctacccttcacatgctgattctcttgccttgctgtttaaggatccagtttcttatgttaaacattttccttaccttttgcaataatattattggccatatactaaattctcattcacttagctttctaagaattctttgaggttggaatcctgaaatcataaagctaccagatctgcacaacagcagtggtagtatctgagcccaaactctgagacgctctagagttttagtttacaaacatgagccagaccaaacctgacctggtgaaaatcaataggtaataaactgcttgtatatgatagcagttcaagggctttctgggttccatttcactgaggaaatgaaaatataactgattagccaagacagagtggcaataaggaataactgatcctcctccaagttgcagtgagcaagccctcaagcctacctcattcctgaagagttgaaggagaaaatgccgtgctaattttctgccctgctatttttaacctgaaatttagaattacatcaggtattcaaagaatgttccctatcaaaggaaaatctgtaaacgatgactgcaaaaagcaagtgaaatgatgcaaagagaaaatatttgcaaaacagaatctaaccagacatcatcatgaagataaaatggcatctcttctgtgtggcctgggtgtgcttggacaatcctgtcacacgtttctattaggacatgttgcccttttgaggattcactctatgttggccagatggtttaactgattaaacaattgaatcaatttattttgctttttgaattgaccagatatttaactaaatgtactgggtttggcattttagacacactgccttagattcttgtagtgcatgatgactttgaaaatgtttggccattttagttaaaatgcagggtaacatttgatgcagccatgataacaggaaaaatctgttctgttctaaaaatgtttctagcaatagaagtatttctggctaagagaatactcttgacttgtagggaggctccctcggaataaatgtatgcaacacaaataaggcattttattttttaaaagattgtctatataagatacacttattaaataaagaaattgttggtgaatgctctgaaaa

SEQ ID NO: 41857 - DNA, 6648 bp, Artificial Sequence
  derived and/or modified sequence
atggaggccgagttctacatggtgatcctgacctgcctgatcttcagaaacagcgagggcttccagatcgtgcacgtgcagaagcagcagtgcctgttcaagaacgagaaggtggtggtgggcagctgcaacagaaccatccagaaccagcagtggatgtggaccgaggacgagaagctgctgcacgtgaagagcgccctgtgcctggccatcagcaacagcagcagaggccccagcagaagcgccatcctggacagatgcagccaggcccccagatggacctgctacgaccaggagggcttcctggaggtggagaacgccagcctgttcctgcagaagcagggcagcagagtggtggtgaagaaggccagaaagtacctgcacagctggatgaagatcgacgtgaacaaggagggcaagctggtgaacgagagcctgtgcctgcagaaggccggcctgggcgccgaggtgagcgtgagaagcaccagaaacaccgcccccccccagatcctgaccaccttcaacgccgtgcccgacggcctggtgttcctgatcagaaacaccaccgaggccttcatcagaaacgccgccgagaactacagccagaacagcagcgagagacagcaccccaacctgcacatgaccggcatcaccgacaccagctgggtgctgagcaccacccagcccttcagcagcaccaccgaggagaccggcctggccgagcccgagagatgcaacttcaccctggccgagagcaaggccagcagccacagcgtgagcatccagtggagaatcctgggcagcccctgcaacttcagcctgatctacagcagcgacaccctgggcgccgccctgtgccccaccttcagaatcgacaacaccacctacggctgcaacctgcaggacctgcaggccggcaccatctacaacttcagaatcatcagcctggacgaggagagaaccgtggtgctgcagaccgaccccctgccccccgccagattcggcgtgagcaaggagaagaccaccagcaccagcctgcacgtgtggtggacccccagcagcggcaaggtgaccagctacgaggtgcagctgttcgacgagaacaaccagaagatccagggcgtgcagatccaggagagcaccagctggaacgagtacaccttcttcaacctgaccgccggcagcaagtacaacatcgccatcaccgccgtgagcggcggcaagagaagcttcagcgtgtacaccaacggcagcaccgtgcccagccccgtgaaggacatcggcatcagcaccaaggccaacagcctgctgatcagctggagccacggcagcggcaacgtggagagatacagactgatgctgatggacaagggcatcctggtgcacggcggcgtggtggacaagcacgccaccagctacgccttccacggcctgacccccggctacctgtacaacctgaccgtgatgaccgaggccgccggcctgcagaactacagatggaagctggtgagaaccgcccccatggaggtgagcaacctgaaggtgaccaacgacggcagcctgaccagcctgaaggtgaagtggcagagaccccccggcaacgtggacagctacaacatcaccctgagccacaagggcaccatcaaggagagcagagtgctggccccctggatcaccgagacccacttcaaggagctggtgcccggcagactgtaccaggtgaccgtgagctgcgtgagcggcgagctgagcgcccagaagatggccgtgggcagaaccttccccgacaaggtggccaacctggaggccaacaacaacggcagaatgagaagcctggtggtgagctggagcccccccgccggcgactgggagcagtacagaatcctgctgttcaacgacagcgtggtgctgctgaacatcaccgtgggcaaggaggagacccagtacgtgatggacgacaccggcctggtgcccggcagacagtacgaggtggaggtgatcgtggagagcggcaacctgaagaacagcgagagatgccagggcagaaccgtgcccctggccgtgctgcagctgagagtgaagcacgccaacgagaccagcctgagcatcatgtggcagacccccgtggccgagtgggagaagtacatcatcagcctggccgacagagacctgctgctgatccacaagagcctgagcaaggacgccaaggagttcaccttcaccgacctggtgcccggcagaaagtacatggccaccgtgaccagcatcagcggcgacctgaagaacagcagcagcgtgaagggcagaaccgtgcccgcccaggtgaccgacctgcacgtggccaaccagggcatgaccagcagcctgttcaccaactggacccaggcccagggcgacgtggagttctaccaggtgctgctgatccacgagaacgtggtgatcaagaacgagagcatcagcagcgagaccagcagatacagcttccacagcctgaagagcggcagcctgtacagcgtggtggtgaccaccgtgagcggcggcatcagcagcagacaggtggtggtggagggcagaaccgtgcccagcagcgtgagcggcgtgaccgtgaacaacagcggcagaaacgactacctgagcgtgagctggctgctggcccccggcgacgtggacaactacgaggtgaccctgagccacgacggcaaggtggtgcagagcctggtgatcgccaagagcgtgagagagtgcagcttcagcagcctgacccccggcagactgtacaccgtgaccatcaccaccagaagcggcaagtacgagaaccacagcttcagccaggagagaaccgtgcccgacaaggtgcagggcgtgagcgtgagcaacagcgccagaagcgactacctgagagtgagctgggtgcacgccaccggcgacttcgaccactacgaggtgaccatcaagaacaagaacaacttcatccagaccaagagcatccccaagagcgagaacgagtgcgtgttcgtgcagctggtgcccggcagactgtacagcgtgaccgtgaccaccaagagcggccagtacgaggccaacgagcagggcaacggcagaaccatccccgagcccgtgaaggacctgaccctgagaaacagaagcaccgaggacctgcacgtgacctggagcggcgccaacggcgacgtggaccagtacgagatccagctgctgttcaacgacatgaaggtgttcccccccttccacctggtgaacaccgccaccgagtacagattcaccagcctgacccccggcagacagtacaagatcctggtgctgaccatcagcggcgacgtgcagcagagcgccttcatcgagggcttcaccgtgcccagcgccgtgaagaacatccacatcagccccaacggcgccaccgacagcctgaccgtgaactggacccccggcggcggcgacgtggacagctacaccgtgagcgccttcagacacagccagaaggtggacagccagaccatccccaagcacgtgttcgagcacaccttccacagactggaggccggcgagcagtaccagatcatgatcgccagcgtgagcggcagcctgaagaaccagatcaacgtggtgggcagaaccgtgcccgccagcgtgcagggcgtgatcgccgacaacgcctacagcagctacagcctgatcgtgagctggcagaaggccgccggcgtggccgagagatacgacatcctgctgctgaccgagaacggcatcctgctgagaaacaccagcgagcccgccaccaccaagcagcacaagttcgaggacctgacccccggcaagaagtacaagatccagatcctgaccgtgagcggcggcctgttcagcaaggaggcccagaccgagggcagaaccgtgcccgccgccgtgaccgacctgagaatcaccgagaacagcaccagacacctgagcttcagatggaccgccagcgagggcgagctgagctggtacaacatcttcctgtacaaccccgacggcaacctgcaggagagagcccaggtggaccccctggtgcagagcttcagcttccagaacctgctgcagggcagaatgtacaagatggtgatcgtgacccacagcggcgagctgagcaacgagagcttcatcttcggcagaaccgtgcccgccagcgtgagccacctgagaggcagcaacagaaacaccaccgacagcctgtggttcaactggagccccgccagcggcgacttcgacttctacgagctgatcctgtacaaccccaacggcaccaagaaggagaactggaaggacaaggacctgaccgagtggagattccagggcctggtgcccggcagaaagtacgtgctgtgggtggtgacccacagcggcgacctgagcaacaaggtgaccgccgagagcagaaccgcccccagcccccccagcctgatgagcttcgccgacatcgccaacaccagcctggccatcacctggaagggcccccccgactggaccgactacaacgacttcgagctgcagtggctgcccagagacgccctgaccgtgttcaacccctacaacaacagaaagagcgagggcagaatcgtgtacggcctgagacccggcagaagctaccagttcaacgtgaagaccgtgagcggcgacagctggaagacctacagcaagcccatcttcggcagcgtgagaaccaagcccgacaagatccagaacctgcactgcagaccccagaacagcaccgccatcgcctgcagctggatcccccccgacagcgacttcgacggctacagcatcgagtgcagaaagatggacacccaggaggtggagttcagcagaaagctggagaaggagaagagcctgctgaacatcatgatgctggtgccccacaagagatacctggtgagcatcaaggtgcagagcgccggcatgaccagcgaggtggtggaggacagcaccatcaccatgatcgacagacccccccccccccccccccacatcagagtgaacgagaaggacgtgctgatcagcaagagcagcatcaacttcaccgtgaactgcagctggttcagcgacaccaacggcgccgtgaagtacttcaccgtggtggtgagagaggccgacggcagcgacgagctgaagcccgagcagcagcaccccctgcccagctacctggagtacagacacaacgccagcatcagagtgtaccagaccaactacttcgccagcaagtgcgccgagaaccccaacagcaacagcaagagcttcaacatcaagctgggcgccgagatggagagcctgggcggcaagtgcgaccccacccagcagaagttctgcgacggccccctgaagccccacaccgcctacagaatcagcatcagagccttcacccagctgttcgacgaggacctgaaggagttcaccaagcccctgtacagcgacaccttcttcagcctgcccatcaccaccgagagcgagcccctgttcggcgccatcgagggcgtgagcgccggcctgttcctgatcggcatgctggtggccgtggtggccctgctgatctgcagacagaaggtgagccacggcagagagagacccagcgccagactgagcatcagaagagacagacccctgagcgtgcacctgaacctgggccagaagggcaacagaaagaccagctgccccatcaagatcaaccagttcgagggccacttcatgaagctgcaggccgacagcaactacctgctgagcaaggagtacgaggagctgaaggacgtgggcagaaaccagagctgcgacatcgccctgctgcccgagaacagaggcaagaacagatacaacaacatcctgccctacgacgccaccagagtgaagctgagcaacgtggacgacgacccctgcagcgactacatcaacgccagctacatccccggcaacaacttcagaagagagtacatcgtgacccagggccccctgcccggcaccaaggacgacttctggaagatggtgtgggagcagaacgtgcacaacatcgtgatggtgacccagtgcgtggagaagggcagagtgaagtgcgaccactactggcccgccgaccaggacagcctgtactacggcgacctgatcctgcagatgctgagcgagagcgtgctgcccgagtggaccatcagagagttcaagatctgcggcgaggagcagctggacgcccacagactgatcagacacttccactacaccgtgtggcccgaccacggcgtgcccgagaccacccagagcctgatccagttcgtgagaaccgtgagagactacatcaacagaagccccggcgccggccccaccgtggtgcactgcagcgccggcgtgggcagaaccggcaccttcatcgccctggacagaatcctgcagcagctggacagcaaggacagcgtggacatctacggcgccgtgcacgacctgagactgcacagagtgcacatggtgcagaccgagtgccagtacgtgtacctgcaccagtgcgtgagagacgtgctgagagccagaaagctgagaagcgagcaggagaaccccctgttccccatctacgagaacgtgaaccccgagtaccacagagaccccgtgtacagcagacactag

SEQ ID NO: 41858 - protein, 176 aa, Artificial Sequence
  derived and/or modified sequence
MCLELFHSSNVIDGLKLNAFAAVFTVLSGLLGMVAHMMYTQVFQVTVSLGPEDWRPHSWDYGWSFCLAWGSFTCCMAASVTTLNSYTKTVIEFRHKRKVFEQGYREEPTFIDPEAIKYFRERMEKRDGSEEDFHLDCRHERYPARHQPHMADSWPRSSAQEAPELNRQCWVLGHWV

SEQ ID NO: 41859 - protein, 280 aa, Artificial Sequence
  derived and/or modified sequence
MKTSRRGRALLAVALNLLALLFATTAFLTTHWCQGTQRVPKPGCGQGGRANCPNSGANATANGTAAPAAAAAAATASGNGPPGGALYSWETGDDRFLFRNFHTGIWYSCEEELSGLGEKCRSFIDLAPASEKGLLGMVAHMMYTQVFQVTVSLGPEDWRPHSWDYGWSFCLAWGSFTCCMAASVTTLNSYTKTVIEFRHKRKVFEQGYREEPTFIDPEAIKYFRERMEKRDGSEEDFHLDCRHERYPARHQPHMADSWPRSSAQEAPELNRQCWVLGHWV

SEQ ID NO: 41860 - protein, 331 aa, Artificial Sequence
  derived and/or modified sequence
MKTSRRGRALLAVALNLLALLFATTAFLTTHWCQGTQRVPKPGCGQGGRANCPNSGANATANGTAAPAAAAAAATASGNGPPGGALYSWETGDDRFLFRNFHTGIWYSCEEELSGLGEKCRSFIDLAPASEKGVLWLSVVSEVLYILLLVVGFSLMCLELFHSSNVIDGLKLNAFAAVFTVLSGLLGMVAHMMYTQVFQVTVSLGPEDWRPHSWDYGWSFCLAWGSFTCCMAASVTTLNSYTKTVIEFRHKRKVFEQGYREEPTFIDPEAIKYFRERMEKRDGSEEDFHLDCRHERYPARHQPHMADSWPRSSAQEAPELNRQCWVLGHWV

SEQ ID NO: 41861 - DNA, 843 bp, Artificial Sequence
  derived and/or modified sequence
atgaagaccagcagaagaggcagagccctgctggccgtggccctgaacctgctggccctgctgttcgccaccaccgccttcctgaccacccactggtgccagggcacccagagagtgcccaagcccggctgcggccagggcggcagagccaactgccccaacagcggcgccaacgccaccgccaacggcaccgccgcccccgccgccgccgccgccgccgccaccgccagcggcaacggcccccccggcggcgccctgtacagctgggagaccggcgacgacagattcctgttcagaaacttccacaccggcatctggtacagctgcgaggaggagctgagcggcctgggcgagaagtgcagaagcttcatcgacctggcccccgccagcgagaagggcctgctgggcatggtggcccacatgatgtacacccaggtgttccaggtgaccgtgagcctgggccccgaggactggagaccccacagctgggactacggctggagcttctgcctggcctggggcagcttcacctgctgcatggccgccagcgtgaccaccctgaacagctacaccaagaccgtgatcgagttcagacacaagagaaaggtgttcgagcagggctacagagaggagcccaccttcatcgaccccgaggccatcaagtacttcagagagagaatggagaagagagacggcagcgaggaggacttccacctggactgcagacacgagagataccccgccagacaccagccccacatggccgacagctggcccagaagcagcgcccaggaggcccccgagctgaacagacagtgctgggtgctgggccactgggtgtag

SEQ ID NO: 41862 - DNA, 996 bp, Artificial Sequence
  derived and/or modified sequence
atgaagaccagcagaagaggcagagccctgctggccgtggccctgaacctgctggccctgctgttcgccaccaccgccttcctgaccacccactggtgccagggcacccagagagtgcccaagcccggctgcggccagggcggcagagccaactgccccaacagcggcgccaacgccaccgccaacggcaccgccgcccccgccgccgccgccgccgccgccaccgccagcggcaacggcccccccggcggcgccctgtacagctgggagaccggcgacgacagattcctgttcagaaacttccacaccggcatctggtacagctgcgaggaggagctgagcggcctgggcgagaagtgcagaagcttcatcgacctggcccccgccagcgagaagggcgtgctgtggctgagcgtggtgagcgaggtgctgtacatcctgctgctggtggtgggcttcagcctgatgtgcctggagctgttccacagcagcaacgtgatcgacggcctgaagctgaacgccttcgccgccgtgttcaccgtgctgagcggcctgctgggcatggtggcccacatgatgtacacccaggtgttccaggtgaccgtgagcctgggccccgaggactggagaccccacagctgggactacggctggagcttctgcctggcctggggcagcttcacctgctgcatggccgccagcgtgaccaccctgaacagctacaccaagaccgtgatcgagttcagacacaagagaaaggtgttcgagcagggctacagagaggagcccaccttcatcgaccccgaggccatcaagtacttcagagagagaatggagaagagagacggcagcgaggaggacttccacctggactgcagacacgagagataccccgccagacaccagccccacatggccgacagctggcccagaagcagcgcccaggaggcccccgagctgaacagacagtgctgggtgctgggccactgggtgtag

SEQ ID NO: 41863 - DNA, 843 bp, Artificial Sequence
  derived and/or modified sequence
atgaagacctccagacgcggcagggcactgttagctgtcgcgcttaatctcctcgcccttctgtttgctaccacagcctttctgactactcactggtgtcagggaacccagagggtgcccaagcccggctgtggtcaggggggaagagcgaactgccctaattccggcgccaatgccaccgcgaacggaaccgcagctcccgccgctgccgcagctgctgccacagcctccggcaacgggccccctggtggagccctgtactcctgggagacaggtgatgacagattcttgttcaggaacttccacaccggcatctggtacagctgcgaggaggagttatcagggctaggggaaaaatgcaggtctttcatcgatctcgcccctgcatcggaaaagggattgctgggcatggtcgcacatatgatgtatactcaggtgttccaggtgacggtatctctgggacctgaggactggcgacctcactcttgggattatggctggtcattttgccttgcttggggcagttttacatgctgtatggccgcaagcgtcaccaccctgaattcttatacaaaaactgttattgagttccgccataagaggaaagtgtttgagcaggggtaccgtgaagagcccacattcatcgaccccgaggccattaagtactttcgggaacgcatggagaaacgcgatgggtcggaggaggatttccacctcgactgccgacatgagagatatcccgctcggcatcagccgcacatggcggactcttggcctaggtcttccgctcaagaggctccggaactaaacaggcagtgttgggtgttggggcattgggtctag

SEQ ID NO: 41864 - DNA, 996 bp, Artificial Sequence
  derived and/or modified sequence
atgaaaacctctcggaggggacgagcccttctagcagtcgccctgaatttgttggcacttctattcgcgaccactgcctttttgacgacccactggtgccaaggtacacagagagtgccaaagccaggttgtggacagggaggcagagcgaattgcccaaatagcggcgctaacgccacagcaaacggaactgctgcgcctgccgccgcagcagccgctgcaacagcaagcggaaacggcccaccaggcggggccctctactcctgggagaccggggacgatcggttcctgttcaggaactttcacacaggaatatggtattcctgtgaggaggaactctctgggttaggcgaaaagtgtagatctttcattgatcttgccccagccagcgagaagggggttctctggctgagcgtggtaagcgaagttctgtacatcctgctgctcgtggtggggttcagcctgatgtgtcttgagcttttccacagctctaacgtaatcgacgggctcaaactgaacgcgtttgcggcggttttcacagtattatcaggattgctggggatggtggctcatatgatgtatacccaagtatttcaagtcacagtttcactggggccggaggactggagaccccacagctgggactatggctggtccttttgcctggcatggggctcatttacctgctgcatggccgcttctgtgactacattgaatagctatacaaaaacggtgatagagtttagacataaaagaaaggttttcgagcaaggttacagggaggaaccgactttcattgaccctgaagctatcaagtacttccgcgaaaggatggagaagcgggacggatcagaggaagattttcacctggattgccgccacgagcggtatcccgccaggcaccagccccacatggccgattcatggccacggtcaagcgctcaagaagccccggagctgaacaggcagtgttgggtactggggcactgggtgtag

SEQ ID NO: 41865 - DNA, 1173 bp, Artificial Sequence
  derived and/or modified sequence
ggcagctgagtcagtgagcagcgccatgatgaggggcagtccctgccagcaccaacaggggctggaaacccagcgataggagcatcagcatctccgaggggtcctgtggctgtctgtggtctccgaggtgctgtacattctgctgctggtggttggcttcagcctcatgtgtctcgagctcttccactccagcaatgtcatcgacgggctcaagctcaatgccttcgcggctgtcttcacggtgctctcaggcctcctgggaatggtcgcccacatgatgtacacgcaggtgttccaggtcaccgtgagcctcggtcctgaggactggagaccccattcctgggactacgggtggtccttctgcctggcgtggggctcctttacctgctgcatggcagcctctgtcaccacgctcaactcctacaccaagacggtcattgagttccggcacaagcgcaaggtctttgagcagggctaccgggaagagccgaccttcatagaccctgaggccatcaagtacttccgggagaggatggagaagagggacgggagcgaggaggactttcacttagactgccgccacgagagataccctgcccgacaccagccacacatggcggattcctggccccggagctccgcacaggaagcaccagagctgaaccgacagtgctgggtcttggggcactgggtgtgaccaagacctcaacctggcccgcggacctcaggccatcgctggcaccagcccctgctgcaagaccaccagagtggtgcccccagaaccctggcctgtgtgccgtgaactcagtcagcctgcgtgggagatgccaggcctgtcctgcccatcgctgcctgggtcccatggccttggaaatggggccagggcaggcccaagggaatgcacagggctgcacagagtgactttgggacagcagccccggactcttgccatcatcacatgagccctgctgggcacagctgcgatgccaggagacacatggccactggccactgaatggctggcacccacaagccagtcaggtgcccagaggggcagagccctttggggggcagagagtggcttcctgaaggagggggcagtggcgcaggcactgcaggggtgtcacacagcaggcacacagcaggggctcaataaatgcttgttgaacttgt

SEQ ID NO: 41866 - DNA, 4769 bp, Artificial Sequence
  derived and/or modified sequence
gcggccgctgacgcggggcgccagctgccaacttcgcgcgcggagctccccggcggtgcagtcccgtcccggcggcgcgggcggcatgaagactagccgccgcggccgagcgctcctggccgtggccctgaacctgctggcgctgctgttcgccaccaccgctttcctcaccacgcactggtgccagggcacgcagcgggtccccaagccgggctgcggccagggcgggcgcgccaactgccccaactcgggcgccaacgccacggccaacggcaccgccgcccccgccgccgccgccgccgccgccaccgcctcggggaacggcccccctggcggcgcgctctacagctgggagaccggcgacgaccgcttcctcttcaggaatttccacaccggcatctggtactcgtgcgaggaggagctcagcgggcttggtgaaaaatgtcgcagcttcattgacctggccccggcatcggagaaaggcctcctgggaatggtcgcccacatgatgtacacgcaggtgttccaggtcaccgtgagcctcggtcctgaggactggagaccccattcctgggactacgggtggtccttctgcctggcgtggggctcctttacctgctgcatggcagcctctgtcaccacgctcaactcctacaccaagacggtcattgagttccggcacaagcgcaaggtctttgagcagggctaccgggaagagccgaccttcatagaccctgaggccatcaagtacttccgggagaggatggagaagagggacgggagcgaggaggactttcacttagactgccgccacgagagataccctgcccgacaccagccacacatggcggattcctggccccggagctccgcacaggaagcaccagagctgaaccgacagtgctgggtcttggggcactgggtgtgaccaagacctcaacctggcccgcggacctcaggccatcgctggcaccagcccctgctgcaagaccaccagagtggtgcccccagaaccctggcctgtgtgccgtgaactcagtcagcctgcgtgggagatgccaggcctgtcctgcccatcgctgcctgggtcccatggccttggaaatggggccagggcaggcccaagggaatgcacagggctgcacagagtgactttgggacagcagccccggactcttgccatcatcacatgagccctgctgggcacagctgcgatgccaggagacacatggccactggccactgaatggctggcacccacaagccagtcaggtgcccagaggggcagagccctttggggggcagagagtggcttcctgaaggagggggcagtggcgcaggcactgcaggggtgtcacacagcaggcacacagcaggggctcaataaatgcttgttgaacttgttttcttgcggtgtatggaggccagttgctctgtgggctgtggctgccctgtcattgccccaccccattactcctcaaggaggctgaaggtgacagcagagactgtgcagaggccagggccagacactgcagggtggcagggagggagcacagagcccaggctggacacaggctggcagggctgccttgtattccagagagtgggcaaggcaggggccaggcaagcaagagatgtggggcgagcaagaagtgggcccccaaacccaagccctaagcagggagggtgaagaagccacatttctcttcagagctcagcaacatcacaccaccctgaccctgaggaggctttaccctgtgcctagcaccacctttacagaaaatcccagggcttagatgcctggagaaacagattcttattataaagaggaggaaaattagggtcacagagatgaatgaagtaacttgcctgtgattacagagctagcaaatggcagagatggggtttgaatcaggactcctgactccaagttcagtcatttcccaagaggccttattccttcccagaagaatttctagagcttttccccacgtagaatatattcttctcctttatccttccatccttccatccatcatccatcactcatccagccattatccattatccatccatccattcatcattcgtccatctattatccacccattcatcatctattatccatccatcattcatcatccatccatcattcataattcatctttccactcatccatccatcattcattcattcatccatccttccatccatccatcatctatccattcatccatccatttgccatccatccactcattcatcagctatccatcatctatccatccatccatccatccagcatctatcactcatccagctattgtccattgtccattcatccatttttcattcatccctccatcatcattaatccattatccacccactcatcatctattatccatctatagtccatcaaccatccatccttcatcatccatccatccatccttcatccatccatccacccatccatccatccatcatctgtccatccattatctatccattcatccatccattcatcatccacccacctattcatcagctatctatccatcatccatccatccatcatccatccatccatccatccatccatcatctatccattcattgtctatgctttcatccatccattcatcatccatccacccattcgttagctatttatccattatccattcctccatctatccatcatccattcatcccttatccattcaaccattatgcatttcttcatttatccattatttatccttccatccatcatccatcatctttccatccactatctatccattcatccatctatccatcatccatccatcctttatccatcattcatcagccatcatccctccatctatccattatccatcatccactcatccattcatccctccatctgcccattatccatcaaccatccatccatccattatccgtcatccacacatccattcatccctccatctgcccattatccatcaaccatccatccatccattatccatttctgcattatccatttattctttatccatttcttcatctattcatcatctatccatccattatccttacacctatctatcatccatccattccttcatctatccatcatccatcaattatccatccattcatccatccatctatccatcttctattgattgcttgtcatccttccttgtatcagacttccatccatcctccttccatgtgtcacacatcctcattactcaaccatccagctgtgcatccatctattcactgatatagttcactgtgcccctactatgtgccaagcactgtggtaggcacttgaggtgggatgctggagcatccagagagggcatctattgtcgtgagcctgggttcagattccaccttctccacttgtgaccttgggcgagttacttgacctttctgtgcctgtttcctcatccattaaatccggataatcattatacctacctcttcaagctgttgtgcaaattaaatgagctaacatatttgaagtgtctagaacagagcctggcacaagtaaacactttgtgggtgtttactaacaggacaacaaggggaaatcggggctgtgggagctgtagtctagggaggctcctttgagaaaatgatgtctaagccaagacatgaagattgtctgggcatcagccaggcaagagtatagcagggaaagaaagtacattagaggactttaaaatagtcccaatggcaggtgtggagagcagggaggtcaggaggcagttgtgggaaattaggcatcagagggcagtggagccaggccaggaggaactggaaaccttcttagggagcttagagtttaccctggggcaatggggagtgggcagtgagatgcttttagcagactgggatgcgcctgggtgtacatttgaggaagatcaccgcaactatgggcacagaatagttgtgggagatgcttctcccttcctcatccctcttacactcaagaaagagaagaaagtgggctggcttaggaaagttgccctggggaggggaccatgcgggcagattcaggaaccaattaggagggaatagactgagtgggagaagaggaaagttggtgacgactctcaggttacagggtcagcttgggggatagggaagacggagacttcgtggttcagatgtcttgagtctcaggggctcaggggacagccagctggaggtttgtgctcattcattcacgcattgattcatcaagcgaacaatttgttaattcactttccattcattcagtaaatattaatgacctactaggtggggcttaaggcggggctggaaatgggcctgggagagcaattatggtccagctctactgaggccttgaatgtcagaacaaggaatttgggctttggcctcatgcaagagagggcggctgccatatatgggcctgggcagggacagatctgacagggatctagccctggccaccaggcatctaggagctcttgttctcacccagggtccttctgaagttggcgagtggaccgcaggaggtccaggagatgattgtagttgacacatggggaaaattttaatctattttaatagttgtgtttatgtaaatgtgtattagaaaaaaatgtacagtgggcacatcagtgctatgacttcacagacgttactgcttaggatgaaaccaaaataggcatttaagtaaaagaaaaaaagagttggcttaaagaaaaatattaaataaataatcgtgcaagtg

SEQ ID NO: 41867 - DNA, 4922 bp, Artificial Sequence
  derived and/or modified sequence
gcggccgctgacgcggggcgccagctgccaacttcgcgcgcggagctccccggcggtgcagtcccgtcccggcggcgcgggcggcatgaagactagccgccgcggccgagcgctcctggccgtggccctgaacctgctggcgctgctgttcgccaccaccgctttcctcaccacgcactggtgccagggcacgcagcgggtccccaagccgggctgcggccagggcgggcgcgccaactgccccaactcgggcgccaacgccacggccaacggcaccgccgcccccgccgccgccgccgccgccgccaccgcctcggggaacggcccccctggcggcgcgctctacagctgggagaccggcgacgaccgcttcctcttcaggaatttccacaccggcatctggtactcgtgcgaggaggagctcagcgggcttggtgaaaaatgtcgcagcttcattgacctggccccggcatcggagaaaggggtcctgtggctgtctgtggtctccgaggtgctgtacattctgctgctggtggttggcttcagcctcatgtgtctcgagctcttccactccagcaatgtcatcgacgggctcaagctcaatgccttcgcggctgtcttcacggtgctctcaggcctcctgggaatggtcgcccacatgatgtacacgcaggtgttccaggtcaccgtgagcctcggtcctgaggactggagaccccattcctgggactacgggtggtccttctgcctggcgtggggctcctttacctgctgcatggcagcctctgtcaccacgctcaactcctacaccaagacggtcattgagttccggcacaagcgcaaggtctttgagcagggctaccgggaagagccgaccttcatagaccctgaggccatcaagtacttccgggagaggatggagaagagggacgggagcgaggaggactttcacttagactgccgccacgagagataccctgcccgacaccagccacacatggcggattcctggccccggagctccgcacaggaagcaccagagctgaaccgacagtgctgggtcttggggcactgggtgtgaccaagacctcaacctggcccgcggacctcaggccatcgctggcaccagcccctgctgcaagaccaccagagtggtgcccccagaaccctggcctgtgtgccgtgaactcagtcagcctgcgtgggagatgccaggcctgtcctgcccatcgctgcctgggtcccatggccttggaaatggggccagggcaggcccaagggaatgcacagggctgcacagagtgactttgggacagcagccccggactcttgccatcatcacatgagccctgctgggcacagctgcgatgccaggagacacatggccactggccactgaatggctggcacccacaagccagtcaggtgcccagaggggcagagccctttggggggcagagagtggcttcctgaaggagggggcagtggcgcaggcactgcaggggtgtcacacagcaggcacacagcaggggctcaataaatgcttgttgaacttgttttcttgcggtgtatggaggccagttgctctgtgggctgtggctgccctgtcattgccccaccccattactcctcaaggaggctgaaggtgacagcagagactgtgcagaggccagggccagacactgcagggtggcagggagggagcacagagcccaggctggacacaggctggcagggctgccttgtattccagagagtgggcaaggcaggggccaggcaagcaagagatgtggggcgagcaagaagtgggcccccaaacccaagccctaagcagggagggtgaagaagccacatttctcttcagagctcagcaacatcacaccaccctgaccctgaggaggctttaccctgtgcctagcaccacctttacagaaaatcccagggcttagatgcctggagaaacagattcttattataaagaggaggaaaattagggtcacagagatgaatgaagtaacttgcctgtgattacagagctagcaaatggcagagatggggtttgaatcaggactcctgactccaagttcagtcatttcccaagaggccttattccttcccagaagaatttctagagcttttccccacgtagaatatattcttctcctttatccttccatccttccatccatcatccatcactcatccagccattatccattatccatccatccattcatcattcgtccatctattatccacccattcatcatctattatccatccatcattcatcatccatccatcattcataattcatctttccactcatccatccatcattcattcattcatccatccttccatccatccatcatctatccattcatccatccatttgccatccatccactcattcatcagctatccatcatctatccatccatccatccatccagcatctatcactcatccagctattgtccattgtccattcatccatttttcattcatccctccatcatcattaatccattatccacccactcatcatctattatccatctatagtccatcaaccatccatccttcatcatccatccatccatccttcatccatccatccacccatccatccatccatcatctgtccatccattatctatccattcatccatccattcatcatccacccacctattcatcagctatctatccatcatccatccatccatcatccatccatccatccatccatccatcatctatccattcattgtctatgctttcatccatccattcatcatccatccacccattcgttagctatttatccattatccattcctccatctatccatcatccattcatcccttatccattcaaccattatgcatttcttcatttatccattatttatccttccatccatcatccatcatctttccatccactatctatccattcatccatctatccatcatccatccatcctttatccatcattcatcagccatcatccctccatctatccattatccatcatccactcatccattcatccctccatctgcccattatccatcaaccatccatccatccattatccgtcatccacacatccattcatccctccatctgcccattatccatcaaccatccatccatccattatccatttctgcattatccatttattctttatccatttcttcatctattcatcatctatccatccattatccttacacctatctatcatccatccattccttcatctatccatcatccatcaattatccatccattcatccatccatctatccatcttctattgattgcttgtcatccttccttgtatcagacttccatccatcctccttccatgtgtcacacatcctcattactcaaccatccagctgtgcatccatctattcactgatatagttcactgtgcccctactatgtgccaagcactgtggtaggcacttgaggtgggatgctggagcatccagagagggcatctattgtcgtgagcctgggttcagattccaccttctccacttgtgaccttgggcgagttacttgacctttctgtgcctgtttcctcatccattaaatccggataatcattatacctacctcttcaagctgttgtgcaaattaaatgagctaacatatttgaagtgtctagaacagagcctggcacaagtaaacactttgtgggtgtttactaacaggacaacaaggggaaatcggggctgtgggagctgtagtctagggaggctcctttgagaaaatgatgtctaagccaagacatgaagattgtctgggcatcagccaggcaagagtatagcagggaaagaaagtacattagaggactttaaaatagtcccaatggcaggtgtggagagcagggaggtcaggaggcagttgtgggaaattaggcatcagagggcagtggagccaggccaggaggaactggaaaccttcttagggagcttagagtttaccctggggcaatggggagtgggcagtgagatgcttttagcagactgggatgcgcctgggtgtacatttgaggaagatcaccgcaactatgggcacagaatagttgtgggagatgcttctcccttcctcatccctcttacactcaagaaagagaagaaagtgggctggcttaggaaagttgccctggggaggggaccatgcgggcagattcaggaaccaattaggagggaatagactgagtgggagaagaggaaagttggtgacgactctcaggttacagggtcagcttgggggatagggaagacggagacttcgtggttcagatgtcttgagtctcaggggctcaggggacagccagctggaggtttgtgctcattcattcacgcattgattcatcaagcgaacaatttgttaattcactttccattcattcagtaaatattaatgacctactaggtggggcttaaggcggggctggaaatgggcctgggagagcaattatggtccagctctactgaggccttgaatgtcagaacaaggaatttgggctttggcctcatgcaagagagggcggctgccatatatgggcctgggcagggacagatctgacagggatctagccctggccaccaggcatctaggagctcttgttctcacccagggtccttctgaagttggcgagtggaccgcaggaggtccaggagatgattgtagttgacacatggggaaaattttaatctattttaatagttgtgtttatgtaaatgtgtattagaaaaaaatgtacagtgggcacatcagtgctatgacttcacagacgttactgcttaggatgaaaccaaaataggcatttaagtaaaagaaaaaaagagttggcttaaagaaaaatattaaataaataatcgtgcaagtg

SEQ ID NO: 41868 - DNA, 843 bp, Artificial Sequence
  derived and/or modified sequence
atgaagaccagcagaagaggccgggccctgctggccgtggccctgaacctgctggccctgctgtttgccaccacagccttcctgaccacccactggtgccagggcacccagagggtgcccaagccaggctgcggccagggcggccgggccaactgccccaacagcggggccaatgccacagccaacggcacagctgccccagctgctgctgctgctgctgccacagccagcggaaatggacctcctgggggcgccctgtacagctgggagactggagatgaccgcttcctgttcaggaacttccacacaggcatctggtacagctgtgaggaggagctgagcggcctgggggagaagtgccgctccttcatcgacctggccccagccagcgagaagggcctgctgggcatggtggcccacatgatgtacacccaggtgttccaggtgacagtgtccctgggccctgaggactggaggccccacagctgggactatggctggagcttctgcctggcctggggcagcttcacctgctgcatggccgcctctgtgaccaccctgaacagctacaccaagacagtgattgagttccgccacaagaggaaggtgtttgagcagggctaccgggaggagcccaccttcattgatcctgaggccatcaagtacttccgggagaggatggagaagagagatggcagcgaggaggacttccacctggactgcagacatgagcgctacccagcccggcaccagccccacatggctgacagctggcccaggagcagcgcccaggaggcccctgagctgaaccggcagtgctgggtgctgggccactgggtgtag

SEQ ID NO: 41869 - DNA, 996 bp, Artificial Sequence
  derived and/or modified sequence
atgaagaccagcagaagaggccgggccctgctggccgtggccctgaacctgctggccctgctgtttgccaccacagccttcctgaccacccactggtgccagggcacccagagggtgcccaagccaggctgcggccagggcggccgggccaactgccccaacagcggggccaatgccacagccaacggcacagctgccccagctgctgctgctgctgctgccacagccagcggaaatggacctcctgggggcgccctgtacagctgggagactggagatgaccgcttcctgttcaggaacttccacacaggcatctggtacagctgtgaggaggagctgagcggcctgggggagaagtgccgctccttcatcgacctggccccagccagcgagaagggcgtgctgtggctgtctgtggtgtctgaggtgctgtacatcctgctgctggtggtgggcttcagcctgatgtgcctggagctgttccacagcagcaatgtgattgatggcctgaagctgaatgcctttgctgctgtgttcaccgtgctgagcggcctgctgggcatggtggcccacatgatgtacacccaggtgttccaggtgacagtgtccctgggccctgaggactggaggccccacagctgggactatggctggagcttctgcctggcctggggcagcttcacctgctgcatggccgcctctgtgaccaccctgaacagctacaccaagacagtcatcgagttccgccacaagaggaaggtgtttgagcagggctaccgggaggagcccaccttcatcgaccctgaggccatcaagtacttccgggagaggatggagaagagagatggcagcgaggaggacttccacctggactgcagacatgagcgctacccagcccggcaccagccccacatggctgacagctggcccaggagcagcgcccaggaggcccctgagctgaaccggcagtgctgggtgctgggccactgggtgtag

SEQ ID NO: 41870 - DNA, 843 bp, Artificial Sequence
  derived and/or modified sequence
atgaagaccagccggcggggccgggccctgctggccgtggccctgaatctgctcgctctgctgttcgcgactaccgcctttctaactacccattggtgccaaggcacccaaagagtgccaaaacctggctgcgggcaagggggacgtgccaattgtcctaatagcggcgctaatgctacggctaatgggaccgcggcacccgctgcagccgccgccgctgccaccgccagcggtaatggaccacccggcggcgcgctctactcttgggagactggtgacgaccgttttttattccgaaattttcataccggtatctggtacagttgtgaggaagagctgtctggcctcggtgaaaagtgtcgcagtttcatcgacctcgcacctgcttccgagaaaggcctcctggggatggttgcacatatgatgtatacgcaggtctttcaagtgactgtgagtttgggtcccgaggactggcgcccacacagttgggattacgggtggagcttctgtctggcttggggatctttcacttgttgtatggccgcctcagtcactactcttaactcctacactaaaactgtgattgagtttcgacataagcgcaaagtgtttgaacagggatatcgtgaggagcccaccttcatagaccctgaggctatcaagtatttccgagagaggatggagaaaagggacggctctgaggaggatttccatcttgactgccgccatgagcggtatcccgccaggcaccaaccgcatatggctgacagttggccccggtcctctgcgcaagaggcgccggagcttaatcggcagtgttgggtgctgggccattgggtctag

SEQ ID NO: 41871 - DNA, 996 bp, Artificial Sequence
  derived and/or modified sequence
atgaagaccagccggcggggccgggccctgctggccgtggccctgaatctgcttgccctacttttcgctaccacagctttcctgactacacattggtgccagggaacccagcgcgttccaaaaccgggttgcgggcagggcggccgcgctaactgccctaattcgggtgccaatgccaccgcaaatggtacagccgccccggccgctgccgctgcggccgctacagcctctgggaacggaccgcctggaggagccctctattcttgggaaactggtgatgatcgcttcctgtttcggaacttccacaccggcatttggtatagttgtgaggaagaactaagcggcctgggggaaaagtgtagaagcttcatcgatctggctccagcctctgagaaaggagtgctttggttgtctgtggtgagcgaggtactgtacatcctcctgctggtcgtcggcttcagtctgatgtgcctggagttgttccacagctccaacgtgatcgacggcttgaaactgaatgcttttgccgcggttttcactgtcctgtcaggactgctgggcatggtcgcacatatgatgtacacacaagtgttccaggttacagtgtccctggggccagaagactggcggccccattcgtgggattacggatggagcttctgcttagcatggggttcattcacgtgctgtatggctgcaagtgttaccacgctgaatagctacactaagaccgttatagagttccggcacaagcgaaaggtgtttgagcagggatatcgggaggagcccaccttcatcgatcctgaggcaattaagtactttagagagcggatggaaaagcgggatggctccgaagaggacttccatcttgattgcagacacgagcggtatcctgcccgccatcaaccgcacatggctgatagttggccaagaagttccgctcaggaggcacccgagctgaatcggcagtgctgggtcctaggtcactgggtgtag

SEQ ID NO: 41872 - DNA, 843 bp, Artificial Sequence
  derived and/or modified sequence
atgaaaaccagtaggaggggcagagcacttctggcagtggccctcaacctgctggccttattgtttgccaccaccgcttttctcacaacccactggtgccaggggacgcaaagggtgcccaaaccagggtgtgggcaaggaggaagggctaactgcccaaactccggggctaacgctaccgccaatggcacagcagcccctgcagcggcagccgctgcagctacagcttccgggaatgggccacctgggggtgcactgtatagctgggagacaggcgacgacaggttcttattcagaaactttcacacaggtatatggtactcctgcgaggaggagctgagtggccttggagaaaagtgtaggagctttatcgatcttgctccagcaagcgaaaaaggcctgctgggaatggtagcacatatgatgtacacacaggttttccaggtgaccgtcagtctaggtccagaggactggagacctcatagttgggactacgggtggagtttttgtctcgcctggggaagcttcacgtgctgcatggctgcgtcggtgaccactcttaactcctacactaagaccgttatagaattcaggcacaagagaaaagtttttgagcagggctacagggaggagccaaccttcatcgatcccgaggccatcaagtatttccgggagcgaatggaaaaaagagacggtagtgaggaggacttccatctggattgtcggcacgagcggtatcctgcccgtcaccagcctcatatggctgattcttggcccaggtcctccgcgcaagaggctcccgaactcaacagacaatgctgggtgctcggccactgggtgtag

SEQ ID NO: 41873 - DNA, 996 bp, Artificial Sequence
  derived and/or modified sequence
atgaagacaagtcgcaggggaagggcgttactggctgtggctctcaatctcctcgccctgctgtttgctaccaccgcatttctcacgacacattggtgccaggggacgcaaagggtgccaaagccgggatgcggtcaggggggtcgcgctaactgtcctaacagcggagctaatgccaccgcaaacggaactgccgctccagctgccgcagcagcagcagctactgcctccgggaatgggccaccaggcggtgccctgtatagttgggaaacaggcgacgaccggttcctctttaggaacttccatactgggatttggtattcatgtgaggaggagctgtcaggtctgggggaaaagtgcaggtccttcattgacctcgcccctgcctccgaaaagggtgtgctctggctctccgtggtgtccgaagttttatacattctgcttttagttgtcggcttcagccttatgtgtctggaactgttccacagctctaacgtaatcgatggcctaaagctgaatgcgttcgccgctgtgtttactgtgctgtcagggttgctgggaatggtagctcacatgatgtacacccaagtcttccaggttacagtttccctgggccctgaggattggcggccacactcatgggattatggctggagtttttgtctggcctggggttctttcacctgctgcatggccgcatctgtgacgactctgaacagctacaccaagaccgtgatcgagttccggcacaaacgtaaggtctttgagcaaggttacagagaagaacccaccttcatcgatccggaggctatcaaatatttcagagagcggatggaaaaaagggacggatctgaggaggattttcatctggattgtaggcatgagagatatccggcacgacatcagccacacatggctgactcgtggcctaggagcagtgcacaggaagctccagaactcaatcggcaatgctgggtcctcgggcattgggtgtag

SEQ ID NO: 41874 - protein, 520 aa, Artificial Sequence
  derived and/or modified sequence
MALSSRARAFSVEALVGRPSKRKLQDPIQAEQPELREKKGGEEEEERRSSAAGKSEPLEKQPKTEPSTSASSGCGSDSGYGNSSESLEEKDIQMELQGSELWKRFHDIGTEMIITKAGRRMFPSVRVKVKGLDPGKQYHVAIDVVPVDSKRYRYVYHSSQWMVAGNTDHLCIIPRFYVHPDSPCSGETWMRQIISFDRMKLTNNEMDDKGHIILQSMHKYKPRVHVIEQGSSVDLSQIQSLPTEGVKTFSFKETEFTTVTAYQNQQITKLKIERNPFAKGFRDTGRNRGVLDGLLETYPWRPSFTLDFKTFGADTQSGSSGSSPVTSSGGAPSPLNSLLSPLCFSPMFHLPTSSLGMPCPEAYLPNVNLPLCYKICPTNFWQQQPLVLPAPERLASSNSSQSLAPLMMEVPMLSSLGVTNSKSGSSEDSSDQYLQAPNSTNQMLYGLQSPGNIFLPNSITPEALSCSFHPSYDFYRYNFSMPSRLISGSNHLKVNDDSQVSFGEGKCNHVHWYPAINHYL

SEQ ID NO: 41875 - DNA, 2248 bp, Artificial Sequence
  derived and/or modified sequence
caaagaatcccttcaccccctccagggatggctctgagctctcgggcgcgtgccttctccgtggaagccttggtggggagacccagcaaaagaaaactccaagacccaatacaggcggagcagcctgagctgcgggagaaaaagggcggagaggaagaggaggagagaaggagcagcgctgcagggaagagcgagccgcttgaaaaacaacctaagacagagccctcaacatctgcttcctctggctgcggcagcgacagcggctacggcaacagctctgaaagtctggaagagaaagatattcaaatggagcttcaaggatctgaactgtggaaaagattccatgacatcgggactgagatgatcattactaaagcgggcaggcggatgttcccctctgttcgggtcaaggtgaaagggttggatccagggaagcagtaccatgtggccatcgatgtggtgccggtggattccaaacgctataggtacgtctatcacagctcacagtggatggtagctgggaatacagaccatttgtgcatcattcctagattctatgttcacccggactcaccctgctcgggagagacctggatgcggcagatcatcagctttgatcgcatgaaactcaccaacaatgagatggatgacaaaggccacatcattctgcaatccatgcataagtacaaaccccgagtgcacgtgatagagcaaggcagcagtgttgacctgtcccagattcagtccttgcccactgaaggtgttaaaacattctcctttaaagaaactgagttcaccacagtaacggcttaccaaaaccaacagattacgaaactaaaaatagaaagaaatccttttgctaaaggatttagagatactggaagaaacaggggtgtattggatgggcttttagagacctacccatggaggccttctttcactctcgattttaaaacctttggcgcagacacacaaagtggaagcagtggctcatctccagtgacctctagtggaggggccccctctcctttgaactccttactttctccactttgcttttcacctatgtttcatttacctacaagctcccttggaatgccctgtccagaggcatacctgcccaatgtcaacctgcctctatgctacaagatttgtccaactaatttttggcaacagcaacctcttgttttaccggctcctgaaagactagcaagcagcaacagttctcagtctttagccccactcatgatggaagtgcctatgttatcttccctgggggtcaccaattcaaaaagcggttcatctgaagactccagtgatcagtatctacaagcacctaattctaccaatcaaatgttatatggattacagtcacctggaaatatttttctgccaaactccatcaccccagaagcacttagttgctcctttcatccttcctatgacttttatagatacaatttctctatgccatctagactgataagtggttccaaccatcttaaagtgaatgacgacagtcaagtttcttttggagaaggcaaatgtaatcatgttcattggtatccagcaattaaccattacctttagtaagacaatagcatttctagaacaattacatgtaaacaaatattttctttatttgtagccaaagaaatttcaacagttattgggcttaaaaagcatcattacaatacagtatttctttgttatacatttaaagatttaaagtgccttatcaaataatattcatgaagagttgtttataatgtcaaatgaaacctacaggaatctctgattacagtggccttgagcttcaaaatgagatatgcaataaatattatttgatgatactccaccagtgaaaattgatgctaagtgatgggattttcaattatactgaagctagttcaccacgttaactgcattttacacattgacaatgacaaaaagaagatggatgtaattctcatgaaagcagtgaagcaatttcagttttaaaaatgaagatcggctttcatgtaattatctagtagttgtagaagaaaatttaattatttgtttgcctcatgcctttatactttgctgttgaagaaactactaatctcaatttaagatacaaataaggacacaaactttcaagtattatattttatttatctttgtagcctaaagaccatttaatcttgaaggaacacaaagatcaaatgaaaagtaaaacactctaaataaatttgcttttattttc

SEQ ID NO: 41876 - DNA, 1563 bp, Artificial Sequence
  derived and/or modified sequence
atggccctgagcagcagagccagagccttcagcgtggaggccctggtgggcagacccagcaagagaaagctgcaggaccccatccaggccgagcagcccgagctgagagagaagaagggcggcgaggaggaggaggagagaagaagcagcgccgccggcaagagcgagcccctggagaagcagcccaagaccgagcccagcaccagcgccagcagcggctgcggcagcgacagcggctacggcaacagcagcgagagcctggaggagaaggacatccagatggagctgcagggcagcgagctgtggaagagattccacgacatcggcaccgagatgatcatcaccaaggccggcagaagaatgttccccagcgtgagagtgaaggtgaagggcctggaccccggcaagcagtaccacgtggccatcgacgtggtgcccgtggacagcaagagatacagatacgtgtaccacagcagccagtggatggtggccggcaacaccgaccacctgtgcatcatccccagattctacgtgcaccccgacagcccctgcagcggcgagacctggatgagacagatcatcagcttcgacagaatgaagctgaccaacaacgagatggacgacaagggccacatcatcctgcagagcatgcacaagtacaagcccagagtgcacgtgatcgagcagggcagcagcgtggacctgagccagatccagagcctgcccaccgagggcgtgaagaccttcagcttcaaggagaccgagttcaccaccgtgaccgcctaccagaaccagcagatcaccaagctgaagatcgagagaaaccccttcgccaagggcttcagagacaccggcagaaacagaggcgtgctggacggcctgctggagacctacccctggagacccagcttcaccctggacttcaagaccttcggcgccgacacccagagcggcagcagcggcagcagccccgtgaccagcagcggcggcgcccccagccccctgaacagcctgctgagccccctgtgcttcagccccatgttccacctgcccaccagcagcctgggcatgccctgccccgaggcctacctgcccaacgtgaacctgcccctgtgctacaagatctgccccaccaacttctggcagcagcagcccctggtgctgcccgcccccgagagactggccagcagcaacagcagccagagcctggcccccctgatgatggaggtgcccatgctgagcagcctgggcgtgaccaacagcaagagcggcagcagcgaggacagcagcgaccagtacctgcaggcccccaacagcaccaaccagatgctgtacggcctgcagagccccggcaacatcttcctgcccaacagcatcacccccgaggccctgagctgcagcttccaccccagctacgacttctacagatacaacttcagcatgcccagcagactgatcagcggcagcaaccacctgaaggtgaacgacgacagccaggtgagcttcggcgagggcaagtgcaaccacgtgcactggtaccccgccatcaaccactacctgtag

SEQ ID NO: 41877 - DNA, 1563 bp, Artificial Sequence
  derived and/or modified sequence
atggccctctccagccgggcccgggcgtttagcgtcgaggctctcgtaggccgtccaagcaaacgcaaactgcaggatccgattcaggcagagcagccagagctcagggaaaagaaggggggcgaagaagaggaggagcggcgctcaagtgcagccggcaaaagcgagccactcgaaaagcaaccgaaaacagagccaagtaccagtgctagtagtggatgcggcagcgatagcggttacggcaactcttccgaaagtttggaagagaaggatattcaaatggagctgcagggatctgagctgtggaagcggttccacgacatcggcacagaaatgatcatcactaaagctggaagaagaatgtttccttccgtacgggtcaaggtgaaaggcctagatcctggcaaacagtaccacgtagctattgatgtggtcccggtcgacagcaaaaggtatagatatgtgtaccacagtagccaatggatggtggctggcaatactgatcacctgtgtattattccacgcttttatgtccaccccgactctccgtgctctggagaaacatggatgcggcaaataatctcttttgacaggatgaagttgacaaacaatgaaatggatgacaagggccacattatacttcagtctatgcacaaatacaagcccagagttcacgtgattgaacaaggcagtagcgtggacctgtcacagattcagagtttgcccactgagggagtgaaaaccttcagcttcaaagaaacagaattcaccacggtgactgcctatcagaatcaacagatcacgaagctgaagatcgagcggaacccgttcgccaaaggcttccgagataccggtagaaatcgcggggttctagatggcctgctcgagacctacccttggcgcccctctttcacattggattttaagacttttggcgccgatacgcagagcgggagcagtgggagtagccctgtgacctcttcgggcggggctccttcacctttgaacagcttgctttcaccactttgtttcagtcccatgttccacctcccgactagcagccttgggatgccatgtccagaagcatatctcccaaacgtcaatctgcccctgtgctacaaaatctgccctacgaatttctggcagcagcaacctttggtgctgccagcccctgagaggctcgcttcttcaaacagctctcagtccctggcgcccctcatgatggaggtacccatgctgtctagtctgggagtcaccaacagcaagagcggctctagcgaagattcatctgaccagtatctgcaggcccctaattcaacaaatcagatgctgtatgggcttcagagtccagggaacatctttttaccaaacagtatcacccccgaagcactgagctgctcattccacccctcatatgacttctaccggtataacttctccatgccttcccgactgatttcaggatctaatcatctcaaagtcaatgacgacagtcaagtctccttcggagaaggcaaatgtaatcatgtccactggtatcctgccatcaaccattatctctag

SEQ ID NO: 41878 - DNA, 1563 bp, Artificial Sequence
  derived and/or modified sequence
atggctctttcctcacgtgcaagagcattttctgtggaggccctagtcgggagaccgtctaaacggaagttgcaggatcccattcaggcagagcagccagagcttagagaaaaaaaagggggggaggaagaagaagagaggcgctcaagcgccgccggcaagtccgagcccctggaaaagcagcctaagactgaaccgtcaacatcggcctcttcgggatgtggctcagatagcggatacggtaacagctcggagtccctcgaggagaaggatattcaaatggaactccaggggagtgaactgtggaaacgatttcatgacataggtacagagatgattattaccaaagctgggcggcgaatgtttccttccgtcagagtaaaggtaaaagggcttgacccaggaaagcaatatcatgtggccatcgacgttgtcccggtcgactcaaagcgctaccgctacgtgtatcacagctcccagtggatggtcgccggtaacacagatcacctgtgcataattccacgcttctacgtacacccagattctccatgcagcggggagacatggatgcgtcagatcatctccttcgaccgtatgaaactaaccaacaacgaaatggatgacaagggtcacattatcctgcagagcatgcataagtacaagcctcgggtgcatgtcatcgagcaaggctcctctgtggacctgtcgcagattcagtccctccccactgagggagtcaaaacctttagcttcaaagagaccgagtttactactgtcacagcctatcagaaccaacagattacaaaactgaagattgagcggaatccatttgcaaagggttttcgagatacggggcgaaacagaggggtacttgatggtctactcgagacatacccatggcgtccctcgtttactcttgattttaagacttttggtgccgacacacagtccggctcctcggggtctagcccggttacgagtagtggaggagccccgtcccccctgaattctcttctctcaccgctgtgcttcagccccatgttccacttacctacctcctctttaggtatgccttgcccagaggcttaccttcctaacgtcaacctccccctctgctataagatttgccctacaaatttttggcagcagcagcctctggtgctgcctgcaccggaacgactcgctagcagcaattcatctcaatcactcgccccgctcatgatggaggtcccaatgttaagctcgttaggcgtgactaattctaagtctggtagctccgaagactcctccgaccagtacctgcaggcgcctaatagtactaaccagatgctgtatgggctacagtcaccgggcaacatctttttgcctaactcaataacaccggaggctctttcgtgttcgtttcacccctcctatgacttttatagatacaatttttcaatgccaagccgcctaataagcggatccaaccacctgaaggttaatgatgactcccaggtgagtttcggagagggcaagtgcaatcatgtgcattggtatccggcgatcaaccactacctgtag

SEQ ID NO: 41879 - DNA, 1563 bp, Artificial Sequence
  derived and/or modified sequence
atggccctgagcagccgggcccgggccttctctgtggaggccctggtgggccggcccagcaagaggaagctgcaggaccccatccaggccgagcagcctgagctgcgggagaagaagggcggggaggaggaggaggagaggaggagcagcgctgctgggaagtctgagcccctggagaagcagcccaagacagagcccagcaccagcgccagcagcggctgcggcagtgacagcggctacggcaacagcagcgagagcctggaggagaaggacatccagatggagctgcagggcagcgagctgtggaagcgcttccatgacatcggcacagagatgatcatcaccaaggccggccgcaggatgttccccagcgtgcgggtgaaggtgaagggcctggaccccgggaagcagtaccacgtggccattgatgtggtgcctgtggacagcaagcgctaccgctacgtgtaccacagcagccagtggatggtggccggcaacacagaccacctgtgcatcatcccccgcttctacgtgcacccagacagcccctgcagcggggagacctggatgaggcagatcatcagctttgacaggatgaagctgaccaacaatgagatggatgacaagggccacatcatcctgcagagcatgcacaagtacaagccccgggtgcacgtgattgagcagggcagctctgtggacctgagccagatccagagcctgcccacagaaggagtgaagaccttctccttcaaggagacagagttcaccaccgtgacagcctaccagaaccagcagatcaccaagctgaagattgaaagaaacccctttgccaagggcttccgggacaccggcaggaacagaggagtgctggatggcctgctggagacctacccctggaggcccagcttcaccctggacttcaagacctttggagctgacacccagagcggcagcagcggcagcagccctgtgaccagcagcggcggggcccccagccccctgaacagcctgctgagccccctgtgcttcagccccatgttccacctgcccaccagcagcctgggcatgccctgcccagaggcctacctgcccaacgtgaacctgcccctgtgctacaagatctgccccaccaacttctggcagcagcagcccctggtgctgcctgcccctgagcggctggccagcagcaacagcagccagagcctggcccccctgatgatggaggtgcccatgctgagcagcctgggcgtgaccaacagcaagagcggcagcagcgaggacagcagtgaccagtacctgcaggcccccaacagcaccaaccagatgctgtatggcctgcagagccctggcaacatcttcctgcccaacagcatcaccccagaggccctgagctgcagcttccaccccagctatgacttctaccgctacaacttctccatgcccagccgcctcatcagcggcagcaaccacctgaaggtgaatgatgacagccaggtgtcctttggagagggcaagtgcaaccacgtgcactggtacccagccatcaaccactacctgtag

SEQ ID NO: 41880 - DNA, 1563 bp, Artificial Sequence
  derived and/or modified sequence
atggccctgagcagccgggcccgggccttcagcgtggaggccctggtcggacgacccagcaagcgtaagcttcaagaccctatacaggcggagcaaccagagctgagggaaaagaaaggaggggaagaagaagaggagcgtcgctctagcgctgcaggaaagagcgagcctttagaaaagcagcccaagacagagcctagcacctctgcatccagtggttgtggcagtgactcgggctacggcaactcttctgaatctctggaagagaaagatattcagatggagcttcaggggtccgagctgtggaagaggtttcacgatataggcactgaaatgattatcaccaaagccggacgacgcatgtttcctagcgtgcgagtaaaagttaagggcttagatccaggcaaacagtaccacgttgccattgacgtggtgccagtggatagcaaacggtaccgttacgtgtatcacagctctcaatggatggtcgctggcaacaccgaccatctgtgtataatcccacgtttttacgttcatccagatagcccgtgttcaggcgagacttggatgcgccagataatttctttcgacagaatgaagttgactaacaatgaaatggacgataaggggcacattattctgcagagcatgcacaagtacaagccgcgtgtgcacgtgatagaacagggcagcagcgtggatttatcacagatccaatctctccctacggaaggggttaaaacattctcttttaaggaaaccgaattcacaactgtgactgcttatcagaaccagcagataacaaagctgaagatcgaaagaaaccccttcgcaaaggggtttagagacaccggacgaaataggggagtgcttgatggcctgctggaaacctacccatggcggccttcttttaccttagatttcaaaacgttcggcgctgatacccagagcggcagctccggatcttctcccgtgacgtcttccggcggggccccatcccctctcaacagcttactcagcccattgtgcttcagcccaatgtttcacttgcctacgtccagtctcggtatgccctgtcccgaggcctacttgcccaatgtcaaccttcctctgtgttataaaatttgtcctactaacttttggcaacagcagcccctcgtgctacctgcacctgagagactggcatcatccaattccagtcaaagcctggctccgctgatgatggaagttcctatgcttagcagcctaggcgtcactaatagcaaatccgggtcgtcagaggattctagcgaccagtacttgcaggctcctaactcaacaaatcagatgttatacggactgcagtcgcctgggaatatctttctgcctaactccattacgccagaggcactctcttgctccttccacccctcttacgatttttatcgctacaatttcagtatgccatctagacttatcagcggcagtaaccatctgaaggtcaatgatgattcccaagtttctttcggtgaagggaaatgcaatcacgttcactggtaccctgctatcaaccactacttgtag

SEQ ID NO: 41881 - DNA, 1563 bp, Artificial Sequence
  derived and/or modified sequence
atggccctgagcagccgggcccgggccttcagcgtggaggccctggtgggacgtccctctaagaggaaactgcaggaccccatccaggctgaacagcccgaactgcgagagaagaaaggcggggaggaggaagaggagcggcgcagtagcgctgcaggaaagtcagaacccctggaaaagcagcccaaaacagagccaagcacaagcgcgagctctgggtgtgggtccgatagcggttatggaaattctagcgagtccttggaggaaaaagatatccagatggagttacaaggttccgaactgtggaaaagattccacgatatcggaactgaaatgatcataactaaggcaggccgaaggatgttcccttcagtgcgcgtgaaagttaaaggcctcgacccgggaaagcagtatcacgtggcaatcgacgtggtcccagtggatagcaagagatatcgctatgtctatcactcaagccagtggatggtggctggaaacacagatcatctttgcatcattccacgattctatgttcaccctgacagtccatgctccggagagacgtggatgcgccagataatctctttcgaccgtatgaagttgactaacaacgagatggatgacaaaggtcacattatcctccagagcatgcataaatacaaacccagagtgcacgtcatcgagcagggctcgtctgtggatcttagtcagatccaatcactccccaccgagggggttaagactttcagtttcaaagaaacagaatttactacagtgactgcctaccagaaccagcagattacaaaattgaagatcgagcgaaaccccttcgctaaagggttcagggatacaggtagaaatcgcggtgtgctagacgggctgcttgaaacctacccctggcggccttcatttaccttggacttcaagacgtttggggcggacacccagtccgggagctctggttcttcccctgtgacaagcagtggtggtgcgccctcacctcttaattctctgctgagcccgttgtgcttttcacctatgtttcatctgcccaccagtagcctcgggatgccatgtccagaggcctaccttcctaacgtaaacctgccgttatgttataaaatttgccctaccaatttctggcagcaacagcccctggtcctacctgcacctgagagacttgccagttcaaacagctcacagtccctggcaccattgatgatggaggtgcctatgctgtcctccctgggcgtcacaaattcgaagagtggcagctccgaagacagcagtgaccagtatctgcaggcacccaactccaccaaccagatgctctacggactccaatcccccggtaatatttttctgcccaacagcatcacccctgaagccttgtcttgcagcttccatccatcatacgacttctataggtacaactttagcatgccaagtaggctgattagcggcagcaaccatttaaaggtcaacgacgacagccaggtgtccttcggcgaagggaaatgtaaccacgtccactggtaccccgccattaaccactatctctag

SEQ ID NO: 41882 - DNA, 1563 bp, Artificial Sequence
  derived and/or modified sequence
atggccctatcatcacgcgctcgagcattcagcgtggaagccctagtaggaagaccaagtaaacgaaagctccaggatcccatacaagcagagcagcccgagctgcgagagaagaagggaggagaagaggaggaagagcgtcgcagctcagccgcaggaaaaagtgagcctctagaaaaacagccaaaaacagagccttccactagtgcctccagcggatgtggaagtgactcaggctacggaaacagctccgaatccctggaggaaaaagacatacagatggagcttcagggcagcgaactttggaaacgctttcatgatattggaaccgagatgatcatcacaaaggcgggtaggaggatgttcccttccgtacgtgtgaaagtcaaggggttggacccgggtaagcagtatcacgtggctatcgacgtggttccagtagattccaaacgttacaggtatgtgtatcactctagccagtggatggtggccggaaataccgatcacctctgtatcatcccccgattttacgtgcaccctgattctccttgttctggcgagacctggatgcggcaaatcataagcttcgataggatgaaactgactaacaatgaaatggatgacaagggccatattatcctccagtcgatgcataagtataaaccacgcgtccacgtcatcgagcaaggcagttccgtggaccttagtcagatccagtccctgcctacagagggagtgaagaccttctccttcaaagaaaccgaattcacaacagtgaccgcataccagaatcaacagattacaaagcttaagatcgagaggaacccattcgcaaagggcttcagagacactgggcgtaatcgaggtgtgcttgacggcttattggaaacttacccatggcgacccagtttcacactggactttaaaacattcggagctgacacacagtcgggatcctcaggctcctctccagtaacgtcttcggggggtgcccctagtcccctgaactcattgctctctcccctctgcttttcccccatgttccatttacccactagctcgctgggcatgccttgtccggaggcataccttcccaacgtcaacctgccactatgctataaaatatgcccaacaaatttttggcagcagcagccgctagtactgccagctccagagcggctggcttcatctaacagctcacagtccctcgcaccactaatgatggaggtccctatgctttcaagcctgggggtcaccaacagcaaaagtggctccagcgaggacagttccgaccagtatctgcaggcgcctaactccaccaatcagatgctttacggactgcaaagccccggaaacatcttcctgcctaattcaattactcccgaggccctaagctgcagcttccacccttcttacgatttctaccgctacaacttctccatgccgtccaggctcatctctggctctaaccatctgaaggtcaacgacgacagccaggtttccttcggggagggaaaatgcaaccacgtgcactggtatccagctataaaccattacctgtag

SEQ ID NO: 41883 - DNA, 1563 bp, Artificial Sequence
  derived and/or modified sequence
atggctctgtcatctcgggcacgcgctttcagtgttgaggcactagtgggacggccatccaagagaaagctccaggatcccattcaagccgagcagccagagctacgcgagaagaaaggtggcgaagaggaggaagagcggaggtcatccgccgctggcaaaagcgagcccttagagaagcagcctaagactgaacctagtacttcagcttcgtccgggtgcggaagcgactctggatacggtaattcgagtgagagcctggaagagaaggatatccagatggagctgcagggctctgaattgtggaaaaggtttcatgacatcgggacggagatgatcattactaaagccggacgcaggatgttccctagtgtaagagttaaagtcaagggcctcgatcccggtaagcagtatcacgtggcaatcgacgtggtccctgtggactccaaacggtaccggtatgtctaccactccagtcagtggatggtggcaggaaacacagatcacctgtgtataatccccagattctatgtgcacccagatagtccttgtagtggagaaacttggatgagacaaattatttccttcgacagaatgaagcttactaataacgagatggacgataaaggacatattatcttgcagtctatgcacaagtacaagccccgtgttcacgtcatagagcagggcagttcggtggatttgtctcagattcagtcactgccaactgaaggtgtgaagactttcagctttaaagagacagaatttactaccgtgaccgcataccagaaccagcaaatcaccaagttgaagatcgaaaggaatccatttgcaaaggggtttcgtgacactgggagaaatcgcggagtccttgatggccttctggaaacctacccttggcgtccgagcttcactctagacttcaaaaccttcggtgccgacacacagtccggttcatccggctcctcacctgtgacaagcagtggcggagctccgagtcccttgaacagcctcctgagtcctctttgtttcagcccaatgtttcacctgcctaccagcagcctgggtatgccctgcccagaggcgtacctccctaatgttaaccttccattgtgctataagatctgcccaacaaatttttggcagcagcagccccttgttctgcccgctcctgagcggcttgcaagttccaacagcagccagtccctggccccactgatgatggaagttcctatgctgagctcgctgggtgtgaccaattcaaagtctggcagcagtgaggactccagcgaccaatatctccaagcccctaattccacaaatcagatgctctatggattgcagtcccctgggaacatctttttgcccaattccattacccctgaggcactgtcttgttcttttcatccctcgtatgatttctatagatacaacttctcaatgccatccaggctcatctccgggtccaatcatctgaaggtcaatgatgattcccaagtaagcttcggagaaggcaaatgcaaccacgtccactggtaccccgcaataaatcattacctgtag

SEQ ID NO: 41884 - DNA, 2100 bp, Artificial Sequence
  derived and/or modified sequence
ctaagacagagccctcaacatctgcttcctctggctgcggcagcgacagcggctacggcaacagctctgaaagtctggaagagaaagatattcaaatggagcttcaaggatctgaactgtggaaaagattccatgacatcgggactgagatgatcattactaaagcgggcaggttcggttctgcccaagctgttcacaagggtcacacacattaggcacttaatttaccgctctggcggatgttcccctctgttcgggtcaaggtgaaagggttggatccagggaagcagtaccatgtggccatcgatgtggtgccggtggattccaaacgctataggtacgtctatcacagctcacagtggatggtagctgggaatacagaccatttgtgcatcattcctagattctatgttcacccggactcaccctgctcgggagagacctggatgcggcagatcatcagctttgatcgcatgaaactcaccaacaatgagatggatgacaaaggccacatcattctgcaatccatgcataagtacaaaccccgagtgcacgtgatagagcaaggcagcagtgttgacctgtcccagattcagtccttgcccactgaaggtgttaaaacattctcctttaaagaaactgagttcaccacagtaacggcttaccaaaaccaacagattacgaaactaaaaatagaaagaaatccttttgctaaaggatttagagatactggaagaaacaggggtgtattggatgggcttttagagacctacccatggaggccttctttcactctcgattttaaaacctttggcgcagacacacaaagtggaagcagtggctcatctccagtgacctctagtggaggggccccctctcctttgaactccttactttctccactttgcttttcacctatgtttcatttacctacaagctcccttggaatgccctgtccagaggcatacctgcccaatgtcaacctgcctctatgctacaagatttgtccaactaatttttggcaacagcaacctcttgttttaccggctcctgaaagactagcaagcagcaacagttctcagtctttagccccactcatgatggaagtgcctatgttatcttccctgggggtcaccaattcaaaaagcggttcatctgaagactccagtgatcagtatctacaagcacctaattctaccaatcaaatgttatatggattacagtcacctggaaatatttttctgccaaactccatcaccccagaagcacttagttgctcctttcatccttcctatgacttttatagatacaatttctctatgccatctagactgataagtggttccaaccatcttaaagtgaatgacgacagtcaagtttcttttggagaaggcaaatgtaatcatgttcattggtatccagcaattaaccattacctttagtaagacaatagcatttctagaacaattacatgtaaacaaatattttctttatttgtagccaaagaaatttcaacagttattgggcttaaaaagcatcattacaatacagtatttctttgttatacatttaaagatttaaagtgccttatcaaataatattcatgaagagttgtttataatgtcaaatgaaacctacaggaatctctgattacagtggccttgagcttcaaaatgagatatgcaataaatattatttgatgatactccaccagtgaaaattgatgctaagtgatgggattttcaattatactgaagctagttcaccacgttaactgcattttacacattgacaatgacaaaaagaagatggatgtaattctcatgaaagcagtgaagcaatttcagttttaaaaatgaagatcggctttcatgtaattatctagtagttgtagaagaaaatttaattatttgtttgcctcatgcctttatactttgctgttgaagaaactactaatctcaatttaagatacaaataaggacacaaactttcaagtattatattttatttatctttgtagcctaaagaccatttaatcttgaaggaacacaaagatcaaatgaaaagtaaaacactctaaataaatttgcttttattttc

SEQ ID NO: 41885 - DNA, 2249 bp, Artificial Sequence
  derived and/or modified sequence
gcaaagaatcccttcaccccctccagggatggctctgagctctcgggcgcgtgccttctccgtggaagccttggtggggagacccagcaaaagaaaactccaagacccaatacaggcggagcagcctgagctgcgggagaaaaagggcggagaggaagaggaggagagaaggagcagcgctgcagggaagagcgagccgcttgaaaaacaacctaagacagagccctcaacatctgcttcctctggctgcggcagcgacagcggctacggcaacagctctgaaagtctggaagagaaagatattcaaatggagcttcaaggatctgaactgtggaaaagattccatgacatcgggactgagatgatcattactaaagcgggcaggcggatgttcccctctgttcgggtcaaggtgaaagggttggatccagggaagcagtaccatgtggccatcgatgtggtgccggtggattccaaacgctataggtacgtctatcacagctcacagtggatggtagctgggaatacagaccatttgtgcatcattcctagattctatgttcacccggactcaccctgctcgggagagacctggatgcggcagatcatcagctttgatcgcatgaaactcaccaacaatgagatggatgacaaaggccacatcattctgcaatccatgcataagtacaaaccccgagtgcacgtgatagagcaaggcagcagtgttgacctgtcccagattcagtccttgcccactgaaggtgttaaaacattctcctttaaagaaactgagttcaccacagtaacggcttaccaaaaccaacagattacgaaactaaaaatagaaagaaatccttttgctaaaggatttagagatactggaagaaacaggggtgtattggatgggcttttagagacctacccatggaggccttctttcactctcgattttaaaacctttggcgcagacacacaaagtggaagcagtggctcatctccagtgacctctagtggaggggccccctctcctttgaactccttactttctccactttgcttttcacctatgtttcatttacctacaagctcccttggaatgccctgtccagaggcatacctgcccaatgtcaacctgcctctatgctacaagatttgtccaactaatttttggcaacagcaacctcttgttttaccggctcctgaaagactagcaagcagcaacagttctcagtctttagccccactcatgatggaagtgcctatgttatcttccctgggggtcaccaattcaaaaagcggttcatctgaagactccagtgatcagtatctacaagcacctaattctaccaatcaaatgttatatggattacagtcacctggaaatatttttctgccaaactccatcaccccagaagcacttagttgctcctttcatccttcctatgacttttatagatacaatttctctatgccatctagactgataagtggttccaaccatcttaaagtgaatgacgacagtcaagtttcttttggagaaggcaaatgtaatcatgttcattggtatccagcaattaaccattacctttagtaagacaatagcatttctagaacaattacatgtaaacaaatattttctttatttgtagccaaagaaatttcaacagttattgggcttaaaaagcatcattacaatacagtatttctttgttatacatttaaagatttaaagtgccttatcaaataatattcatgaagagttgtttataatgtcaaatgaaacctacaggaatctctgattacagtggccttgagcttcaaaatgagatatgcaataaatattatttgatgatactccaccagtgaaaattgatgctaagtgatgggattttcaattatactgaagctagttcaccacgttaactgcattttacacattgacaatgacaaaaagaagatggatgtaattctcatgaaagcagtgaagcaatttcagttttaaaaatgaagatcggctttcatgtaattatctagtagttgtagaagaaaatttaattatttgtttgcctcatgcctttatactttgctgttgaagaaactactaatctcaatttaagatacaaataaggacacaaactttcaagtattatattttatttatctttgtagcctaaagaccatttaatcttgaaggaacacaaagatcaaatgaaaagtaaaacactctaaataaatttgcttttattttc

SEQ ID NO: 41886 - DNA, 1959 bp, Artificial Sequence
  derived and/or modified sequence
cttctctgggctcttgagaagagctgctgcaggcatttgcagagtgaatgagctctgactgagacttgacttcagaaccactgggctggcctggcctcttgacacagcaacacactgcttcttgccttccagggatggctctgagctctcgggcgcgtgccttctccgtggaagccttggtggggagacccagcaaaagaaaactccaagacccaatacaggcggagcagcctgagctgcgggagaaaaagggcggagaggaagaggaggagagaaggagcagcgctgcagggaagagcgagccgcttgaaaaacaacctaagacagagccctcaacatctgcttcctctggctgcggcagcgacagcggctacggcaacagctctgaaagtctggaagagaaagatattcaaatggagcttcaaggatctgaactgtggaaaagattccatgacatcgggactgagatgatcattactaaagcgggcaggcggatgttcccctctgttcgggtcaaggtgaaagggttggatccagggaagcagtaccatgtggccatcgatgtggtgccggtggattccaaacgctataggtacgtctatcacagctcacagtggatggtagctgggaatacagaccatttgtgcatcattcctagattctatgttcacccggactcaccctgctcgggagagacctggatgcggcagatcatcagctttgatcgcatgaaactcaccaacaatgagatggatgacaaaggccacatcattctgcaatccatgcataagtacaaaccccgagtgcacgtgatagagcaaggcagcagtgttgacctgtcccagattcagtccttgcccactgaaggtgttaaaacattctcctttaaagaaactgagttcaccacagtaacggcttaccaaaaccaacagattacgaaactaaaaatagaaagaaatccttttgctaaaggatttagagatactggaagaaacaggggtgtattggatgggcttttagagacctacccatggaggccttctttcactctcgattttaaaacctttggcgcagacacacaaagtggaagcagtggctcatctccagtgacctctagtggaggggccccctctcctttgaactccttactttctccactttgcttttcacctatgtttcatttacctacaagctcccttggaatgccctgtccagaggcatacctgcccaatgtcaacctgcctctatgctacaagatttgtccaactaatttttggcaacagcaacctcttgttttaccggctcctgaaagactagcaagcagcaacagttctcagtctttagccccactcatgatggaagtgcctatgttatcttccctgggggtcaccaattcaaaaagcggttcatctgaagactccagtgatcagtatctacaagcacctaattctaccaatcaaatgttatatggattacagtcacctggaaatatttttctgccaaactccatcaccccagaagcacttagttgctcctttcatccttcctatgacttttatagatacaatttctctatgccatctagactgataagtggttccaaccatcttaaagtgaatgacgacagtcaagtttcttttggagaaggcaaatgtaatcatgttcattggtatccagcaattaaccattacctttagtaagacaatagcatttctagaacaattacatgtaaacaaatattttctttatttgtagccaaagaaatttcaacagttattgggcttaaaaagcatcattacaatacagtatttctttgttatacatttaaagatttaaagtgccttatcaaataatattcatgaagagttgtttataatgtcaaatgaaacctacaggaatctctgattacagtggccttgagcttcaaaatgagatatgcaataaatattatttgatgat

SEQ ID NO: 41887 - DNA, 1203 bp, Artificial Sequence
  derived and/or modified sequence
atgttccccagcgtgagagtgaaggtgaagggcctggaccccggcaagcagtaccacgtggccatcgacgtggtgcccgtggacagcaagagatacagatacgtgtaccacagcagccagtggatggtggccggcaacaccgaccacctgtgcatcatccccagattctacgtgcaccccgacagcccctgcagcggcgagacctggatgagacagatcatcagcttcgacagaatgaagctgaccaacaacgagatggacgacaagggccacatcatcctgcagagcatgcacaagtacaagcccagagtgcacgtgatcgagcagggcagcagcgtggacctgagccagatccagagcctgcccaccgagggcgtgaagaccttcagcttcaaggagaccgagttcaccaccgtgaccgcctaccagaaccagcagatcaccaagctgaagatcgagagaaaccccttcgccaagggcttcagagacaccggcagaaacagaggcgtgctggacggcctgctggagacctacccctggagacccagcttcaccctggacttcaagaccttcggcgccgacacccagagcggcagcagcggcagcagccccgtgaccagcagcggcggcgcccccagccccctgaacagcctgctgagccccctgtgcttcagccccatgttccacctgcccaccagcagcctgggcatgccctgccccgaggcctacctgcccaacgtgaacctgcccctgtgctacaagatctgccccaccaacttctggcagcagcagcccctggtgctgcccgcccccgagagactggccagcagcaacagcagccagagcctggcccccctgatgatggaggtgcccatgctgagcagcctgggcgtgaccaacagcaagagcggcagcagcgaggacagcagcgaccagtacctgcaggcccccaacagcaccaaccagatgctgtacggcctgcagagccccggcaacatcttcctgcccaacagcatcacccccgaggccctgagctgcagcttccaccccagctacgacttctacagatacaacttcagcatgcccagcagactgatcagcggcagcaaccacctgaaggtgaacgacgacagccaggtgagcttcggcgagggcaagtgcaaccacgtgcactggtaccccgccatcaaccactacctgtag

SEQ ID NO: 41888 - DNA, 1203 bp, Artificial Sequence
  derived and/or modified sequence
atgtttccgtcagtgagggtcaaagtcaagggactagatcctggaaagcaataccatgtggccatcgacgtggtacccgtagattcaaagcgctatcgatacgtataccacagtagtcaatggatggttgctggcaatacagaccacctgtgtatcatcccgagattctatgtgcatcctgattcaccttgttctggcgaaacgtggatgagacagataatctcctttgatcgtatgaagctgactaataacgaaatggatgataaagggcacatcatccttcagagcatgcataaatataagccccgcgtgcatgtcatcgagcaaggatccagtgtggacctaagccagatccagagcctgcctactgaaggggttaaaacgttcagcttcaaggaaactgaattcacaactgtaacggcttatcagaatcagcagatcaccaaacttaaaatcgagcgtaatccattcgccaaaggctttcgggataccggcaggaaccgcggagtactcgacggacttctggaaacatacccttggcggccttcctttaccctcgacttcaagacatttggggctgacacgcagtcaggcagttccgggtcctcccctgtgacatcttcaggaggtgcacccagcccactcaactcccttctgagtccactgtgcttctctcctatgtttcacctgccaacgtccagtcttgggatgccatgtcccgaggcttacctcccaaacgtaaatcttcccctttgttataagatttgccccacaaacttctggcagcagcaaccattagtcctcccggcccccgagagactggcaagctcgaacagctctcaaagcctggcacctctcatgatggaagtgccaatgctgagtagcctgggtgtcaccaactctaagagcggctcctctgaagatagttcagaccagtacctccaggctcctaacagcacaaatcagatgctgtatggccttcaatcccctgggaatatttttttgccaaattccatcacgccagaagccctcagctgtagctttcatccttcgtacgatttctatcgttacaatttctctatgcctagcaggttgatctccgggagtaatcacctgaaagttaacgacgatagccaagtctctttcggtgaaggcaagtgcaatcacgttcattggtatccagccataaaccactacctctag

SEQ ID NO: 41889 - DNA, 1203 bp, Artificial Sequence
  derived and/or modified sequence
atgttccccagcgtacgggttaaggtcaagggcttggaccctggaaagcaataccatgttgcaatcgacgtggtcccagttgattcaaagaggtatagatacgtctaccattcatctcagtggatggtggccgggaatacagaccatctgtgtattatccctcgattttatgtccaccccgatagtccttgttcaggtgaaacctggatgcggcagatcatttcatttgatcgcatgaagctgacaaataatgaaatggacgacaaggggcacatcatcctacagtctatgcacaagtacaagcccagagtgcacgtgatcgagcagggaagcagtgttgacttatcccagattcagtcgctgccaaccgagggcgtgaaaaccttttccttcaaggagacggagttcactaccgtgacagcttaccagaaccagcaaattaccaaactgaagatcgaaaggaacccctttgcaaaagggtttagagacaccggcagaaaccgcggagtgctcgatggactcctggagacctacccttggaggccaagctttacactggactttaaaacatttggtgccgatactcagagcggttcttccggttcctcaccagttacaagctctgggggagcaccgtctccactgaactcactcctgtcaccactctgtttttcccccatgtttcatctccctactagctctcttggaatgccatgcccagaggcctatctgcctaacgtgaacttgcccctgtgttataagatctgtcctaccaacttctggcagcagcaacccttggtcctgcccgcacccgagaggctggcctcatctaacagctctcagtctctggcccctttaatgatggaggttccgatgttgtcttcacttggcgtcacgaacagcaaatctggtagcagtgaagactcatccgatcagtatctgcaggcacccaacagcactaatcagatgctgtatggattgcagtcgcctgggaatatctttctgcctaattcgatcacaccggaggccttatcctgctccttccatcccagctacgatttctatcgttataatttctcaatgccctcacgactgatctcgggctcgaaccacctgaaggtgaacgatgattcacaagtctcatttggagagggcaagtgcaaccacgtacactggtaccctgccatcaaccattatttatag

SEQ ID NO: 41890 - DNA, 1203 bp, Artificial Sequence
  derived and/or modified sequence
atgttccccagcgtgcgggtgaaggtgaagggcctggaccccgggaagcagtaccacgtggccattgatgtggtgcctgtggacagcaagcgctaccgctacgtgtaccacagcagccagtggatggtggccggcaacacagaccacctgtgcatcatcccccgcttctacgtgcacccagacagcccctgcagcggggagacctggatgaggcagatcatcagctttgacaggatgaagctgaccaacaatgagatggatgacaagggccacatcatcctgcagagcatgcacaagtacaagccccgggtgcacgtgattgagcagggcagctctgtggacctgagccagatccagagcctgcccacagaaggagtgaagaccttctccttcaaggagacagagttcaccaccgtgacagcctaccagaaccagcagatcaccaagctgaagattgaaagaaacccctttgccaagggcttccgggacaccggcaggaacagaggagtgctggatggcctgctggagacctacccctggaggcccagcttcaccctggacttcaagacctttggagctgacacccagagcggcagcagcggcagcagccctgtgaccagcagcggcggggcccccagccccctgaacagcctgctgagccccctgtgcttcagccccatgttccacctgcccaccagcagcctgggcatgccctgcccagaggcctacctgcccaacgtgaacctgcccctgtgctacaagatctgccccaccaacttctggcagcagcagcccctggtgctgcctgcccctgagcggctggccagcagcaacagcagccagagcctggcccccctgatgatggaggtgcccatgctgagcagcctgggcgtgaccaacagcaagagcggcagcagcgaggacagcagtgaccagtacctgcaggcccccaacagcaccaaccagatgctgtatggcctgcagagccctggcaacatcttcctgcccaacagcatcaccccagaggccctgagctgcagcttccaccccagctatgacttctaccgctacaacttctccatgcccagccgcctcatcagcggcagcaaccacctgaaggtgaatgatgacagccaggtgtcctttggagagggcaagtgcaaccacgtgcactggtacccagccatcaaccactacctgtag

SEQ ID NO: 41891 - DNA, 1203 bp, Artificial Sequence
  derived and/or modified sequence
atgttccccagcgtgcgggtgaaggtgaagggcctggaccccggcaaacagtaccacgttgctatcgacgtagtgcccgtggatagtaagcgctacaggtatgtgtatcactcgtctcagtggatggtcgcaggaaacaccgatcatttgtgcattatacctaggttctacgttcaccccgatagtccctgttctggagaaacatggatgcggcagattatcagttttgatcgcatgaagctaactaataacgaaatggacgacaagggccatatcatcctgcaatctatgcataaatacaaacctcgggtgcacgtgatcgaacagggctcatccgtggatttaagccaaatacagagtttgccgaccgagggcgtaaagacatttagctttaaagagactgaatttacaaccgtgacggcctaccagaatcagcaaatcacgaagctgaagatcgaaagaaatcccttcgccaagggctttcgcgacacagggcgcaacaggggcgtgctcgatggattgctcgagacctatccctggcggcctagcttcactctggactttaagacttttggggcagacactcaatctggctcaagcggatcaagcccagtaaccagttccgggggtgccccatctccactaaattcgcttctgtctccactgtgcttcagccccatgttccatcttccaaccagctcactgggaatgccctgcccagaagcctatctcccaaacgtgaacttacctctgtgctataagatttgcccgacgaatttctggcaacaacaacccctcgtcctcccggcccccgagagactggcttcttccaattcgagccagtccctagcacctctaatgatggaagtgcccatgcttagctccctgggtgttacgaatagtaaatctggctcatcagaagactccagcgaccagtacctacaggccccaaattcgacaaatcagatgctctatggcttgcagagtcctgggaatatctttttacccaactcaatcacacctgaagccctttcctgtagttttcatccttcatacgatttctatcgctataatttttccatgccttcccgcttgatatctggatctaatcatctcaaagtcaatgatgatagccaagtcagttttggagaaggaaagtgcaatcacgttcactggtaccctgccatcaatcattacctatag

SEQ ID NO: 41892 - DNA, 1203 bp, Artificial Sequence
  derived and/or modified sequence
atgttccccagcgtgcgggtgaaggtgaagggcctggaccccggcaagcagtatcacgtggccatcgacgtggtgccagtggattcaaaaagatataggtatgtctatcactctagccagtggatggtagccggaaacaccgaccatctgtgtatcattccacgtttctacgtccaccctgactccccttgtagcggggagacatggatgagacagatcatcagctttgataggatgaaactgaccaacaacgaaatggacgacaaagggcacatcatactgcagagcatgcataagtataagcctcgggtccacgtgattgagcagggctcaagcgttgacctgtcgcagattcagtcccttccaacagagggggtgaaaaccttcagcttcaaggagaccgaattcactacagtgaccgcgtatcaaaaccagcagatcaccaagttaaagatcgaacggaatccctttgccaaaggattcagagacacgggcaggaaccgaggggtgttagacggcctcttggaaacttatccctggcgccctagcttcacccttgattttaagacctttggcgcggatacacaatccggaagctcaggctcaagccctgtcacatcctcaggtggggcgccatcacctctaaattcactgcttagtcctctgtgcttttccccgatgtttcacctgcccacgagcagtcttggcatgccttgtccagaagcctacctgcccaatgtgaatctacccctctgctacaaaatctgtcctaccaacttttggcagcagcagccacttgtgcttccagcacccgagagactcgccagttccaatagtagccaatccctggccccactaatgatggaggttcccatgcttagcagtcttggggtaactaattcaaaatccgggtcgagtgaggactcatcagaccagtatctccaggcgcctaattccacgaatcagatgctgtatgggcttcagtcacccgggaacatttttcttccaaactcaattaccccggaggctctcagttgttcattccatccctcctacgatttttataggtataacttctccatgccttcccggctgattagcgggagtaaccacctgaaggttaacgacgattcacaggtcagctttggagaaggtaaatgcaatcacgtgcactggtaccctgcaattaaccactatctatag

SEQ ID NO: 41893 - DNA, 1203 bp, Artificial Sequence
  derived and/or modified sequence
atgttcccttctgtccgcgtgaaggttaaaggtctggacccagggaaacagtatcacgttgccatcgatgtagtacctgtggactccaagcgatatcgctacgtgtaccactctagtcagtggatggtggcaggtaacacggaccacctctgtataatccctcgcttctacgtgcatcccgactccccatgttcaggtgagacctggatgcggcagattattagcttcgatcgcatgaaactaacgaacaatgaaatggatgacaagggtcatattatccttcagagtatgcacaaatataagcccagggtgcacgtcatcgagcagggatcttcagtggacttgtcgcagatccagtccctgcccaccgaaggggtgaaaacattttcttttaaagaaaccgaattcacaaccgtcacggcttaccaaaatcagcagattaccaagctgaagatcgaacgtaacccttttgcaaagggcttccgcgacacgggaaggaacaggggggtactggatggtctgctggaaacatacccatggcggccatcattcacgttggacttcaagacctttggtgctgacacccagtctgggtctagtggatcttctcctgtgaccagcagtgggggagcaccaagccccctgaatagcctcctttcaccactgtgctttagtccaatgtttcatctgccgacgtctagtcttggcatgccatgcccagaggcctacctgccaaacgtgaacctacctctttgctataagatatgtccgacaaatttttggcaacagcaacccctggtgttgcctgcgcctgagcggctggctagtagtaattcgtctcagagtctcgctcctctgatgatggaagtgccgatgctgtcttcattaggcgtgaccaatagtaaaagtgggtcgtccgaagacagctcggaccagtacttgcaagccccaaactctaccaaccagatgctgtacgggcttcaaagccccggtaacatcttcctccccaactctataacccctgaggccctgagttgctctttccacccttcatacgacttttaccgatacaacttcagcatgccgtcccggctcatctctggtagcaatcatctgaaggtcaatgacgactcccaggtaagcttcggtgaaggtaagtgcaaccacgtgcattggtatcctgcaattaatcattacctttag

SEQ ID NO: 41894 - DNA, 1203 bp, Artificial Sequence
  derived and/or modified sequence
atgttcccctctgtaagggtgaaagtgaaaggacttgatcccggaaaacagtaccacgtggctatcgatgtcgttcccgtggattctaaacgctataggtatgtgtatcacagcagtcagtggatggtcgccggaaatactgatcatctatgtattattccaaggttctatgtacatcctgactcaccatgtagcggcgaaacctggatgaggcagatcatttccttcgacaggatgaaactcaccaataacgagatggacgacaaaggccacattatcctgcagtcaatgcacaaatacaaaccaagagtgcatgtgattgagcagggttctagcgtggacctgtcccagatacagtctctccctactgagggcgtcaagacatttagcttcaaggagaccgagttcactaccgtgaccgcctatcagaaccaacagatcactaagctgaaaatagaacgaaatcccttcgcaaaggggtttcgggacacaggtcggaaccggggtgtactggatgggttgctcgaaacctatccgtggcgtcctagctttaccttggactttaaaacctttggagcagatacccaaagcggctcttccggaagttcaccagtcacctccagcgggggagcaccaagtccgctgaactccctgctgtcaccactctgctttagccccatgtttcatctccccacgtcgtctctgggcatgccttgtcccgaggcctacttgcccaatgtgaacctacctctttgctataaaatttgtccaactaatttttggcaacagcagcctctcgtcctgccagccccagaaaggctggccagttcaaacagttcgcagtctctggcccctctcatgatggaggtacccatgctgtcctccctgggcgtcactaacagtaaaagcggcagctccgaggactctagtgaccagtacctgcaagctcccaactcaaccaatcaaatgttgtacggtttgcagtcccctgggaatatctttctgcctaattcgattacaccagaggccctcagctgttcattccacccctcttatgacttttaccgttacaatttcagcatgccttcccggctgataagtggaagcaatcacctaaaggtcaacgacgactctcaagtgagcttcggggaggggaagtgcaatcacgtgcactggtacccagctataaaccactatctgtag

SEQ ID NO: 41895 - DNA, 2351 bp, Artificial Sequence
  derived and/or modified sequence
cttctctgggctcttgagaagagctgctgcaggcatttgcagagtgaatgagctctgactgagacttgacttcagaaccactgggctggcctggcctcttgacacagcaacacactgcttcttgccttccagggatggctctgagctctcgggcgcgtgccttctccgtggaagccttggtggggagacccagcaaaagaaaactccaagacccaatacaggcggagcagcctgagctgcgggagaaaaagggcggagaggaagaggaggagagaaggagcagcgctgcagggaagagcgagccgcttgaaaaacaacctaagacagagccctcaacatctgcttcctctggctgcggcagcgacagcggctacggcaacagctctgaaagtctggaagagaaagatattcaaatggagcttcaaggatctgaactgtggaaaagattccatgacatcgggactgagatgatcattactaaagcgggcggatgttcccctctgttcgggtcaaggtgaaagggttggatccagggaagcagtaccatgtggccatcgatgtggtgccggtggattccaaacgctataggtacgtctatcacagctcacagtggatggtagctgggaatacagaccatttgtgcatcattcctagattctatgttcacccggactcaccctgctcgggagagacctggatgcggcagatcatcagctttgatcgcatgaaactcaccaacaatgagatggatgacaaaggccacatcattctgcaatccatgcataagtacaaaccccgagtgcacgtgatagagcaaggcagcagtgttgacctgtcccagattcagtccttgcccactgaaggtgttaaaacattctcctttaaagaaactgagttcaccacagtaacggcttaccaaaaccaacagattacgaaactaaaaatagaaagaaatccttttgctaaaggatttagagatactggaagaaacaggggtgtattggatgggcttttagagacctacccatggaggccttctttcactctcgattttaaaacctttggcgcagacacacaaagtggaagcagtggctcatctccagtgacctctagtggaggggccccctctcctttgaactccttactttctccactttgcttttcacctatgtttcatttacctacaagctcccttggaatgccctgtccagaggcatacctgcccaatgtcaacctgcctctatgctacaagatttgtccaactaatttttggcaacagcaacctcttgttttaccggctcctgaaagactagcaagcagcaacagttctcagtctttagccccactcatgatggaagtgcctatgttatcttccctgggggtcaccaattcaaaaagcggttcatctgaagactccagtgatcagtatctacaagcacctaattctaccaatcaaatgttatatggattacagtcacctggaaatatttttctgccaaactccatcaccccagaagcacttagttgctcctttcatccttcctatgacttttatagatacaatttctctatgccatctagactgataagtggttccaaccatcttaaagtgaatgacgacagtcaagtttcttttggagaaggcaaatgtaatcatgttcattggtatccagcaattaaccattacctttagtaagacaatagcatttctagaacaattacatgtaaacaaatattttctttatttgtagccaaagaaatttcaacagttattgggcttaaaaagcatcattacaatacagtatttctttgttatacatttaaagatttaaagtgccttatcaaataatattcatgaagagttgtttataatgtcaaatgaaacctacaggaatctctgattacagtggccttgagcttcaaaatgagatatgcaataaatattatttgatgatactccaccagtgaaaattgatgctaagtgatgggattttcaattatactgaagctagttcaccacgttaactgcattttacacattgacaatgacaaaaagaagatggatgtaattctcatgaaagcagtgaagcaatttcagttttaaaaatgaagatcggctttcatgtaattatctagtagttgtagaagaaaatttaattatttgtttgcctcatgcctttatactttgctgttgaagaaactactaatctcaatttaagatacaaataaggacacaaactttcaagtattatattttatttatctttgtagcctaaagaccatttaatcttgaaggaacacaaagatcaaatgaaaagtaaaacactctaaataaatttgcttttattttc

SEQ ID NO: 41896 - protein, 335 aa, Artificial Sequence
  derived and/or modified sequence
MAAAAAQGGGGGEPRRTEGVGPGVPGEVEMVKGQPFDVGPRYTQLQYIGEGAYGMVSSAYDHVRKTRVAIKKISPFEHQTYCQRTLREIQILLRFRHENVIGIRDILRASTLEAMRDVYIVQDLMETDLYKLLKSQQLSNDHICYFLYQILRGLKYIHSANVLHRDLKPSNLLINTTCDLKICDFGLARIADPEHDHTGFLTEYVATRWYRAPEIMLNSKGYTKSIDIWSVGCILAEMLSNRPIFPGKHYLDQLNHILALDLLDRMLTFNPNKRITVEEALAHPYLEQYYDPTDEPVAEEPFTFAMELDDLPKERLKELIFQETARFQPGVLEAP

SEQ ID NO: 41897 - DNA, 1008 bp, Artificial Sequence
  derived and/or modified sequence
atggccgccgccgccgcccagggcggcggcggcggcgagcccagaagaaccgagggcgtgggccccggcgtgcccggcgaggtggagatggtgaagggccagcccttcgacgtgggccccagatacacccagctgcagtacatcggcgagggcgcctacggcatggtgagcagcgcctacgaccacgtgagaaagaccagagtggccatcaagaagatcagccccttcgagcaccagacctactgccagagaaccctgagagagatccagatcctgctgagattcagacacgagaacgtgatcggcatcagagacatcctgagagccagcaccctggaggccatgagagacgtgtacatcgtgcaggacctgatggagaccgacctgtacaagctgctgaagagccagcagctgagcaacgaccacatctgctacttcctgtaccagatcctgagaggcctgaagtacatccacagcgccaacgtgctgcacagagacctgaagcccagcaacctgctgatcaacaccacctgcgacctgaagatctgcgacttcggcctggccagaatcgccgaccccgagcacgaccacaccggcttcctgaccgagtacgtggccaccagatggtacagagcccccgagatcatgctgaacagcaagggctacaccaagagcatcgacatctggagcgtgggctgcatcctggccgagatgctgagcaacagacccatcttccccggcaagcactacctggaccagctgaaccacatcctggccctggacctgctggacagaatgctgaccttcaaccccaacaagagaatcaccgtggaggaggccctggcccacccctacctggagcagtactacgaccccaccgacgagcccgtggccgaggagcccttcaccttcgccatggagctggacgacctgcccaaggagagactgaaggagctgatcttccaggagaccgccagattccagcccggcgtgctggaggccccctag

SEQ ID NO: 41898 - DNA, 1008 bp, Artificial Sequence
  derived and/or modified sequence
atggctgcagctgccgctcagggcggaggaggcggcgaaccgcgccggacagagggcgtgggtccgggagttccaggcgaagttgagatggtgaagggtcagccattcgacgtgggtccgagatatacccaacttcagtatatcggagagggagcctacggcatggtaagtagtgcctacgatcacgtgaggaaaacgcgcgtggccatcaagaagattagccctttcgagcatcagacttactgccagcgaacattgagagaaattcagatcttactgcggttccgccatgagaacgtgatcggcatcagagatattcttagggcctctaccctggaggcgatgcgagatgtttatatcgttcaggatttgatggagaccgacctttataaattgctcaagtcacagcagctgagtaacgatcatatctgctactttttataccagatcttgagaggcttgaagtacatccatagcgcaaatgtcctccaccgagatctcaaaccttctaatctgctcattaataccacgtgcgatctgaaaatctgcgattttgggttggccaggattgctgatcctgaacacgaccacacgggcttcttaactgaatacgtggcaacgcgatggtacagggcccccgagattatgctcaacagcaaggggtataccaaaagtatagatatctggtccgttgggtgcattttggccgaaatgctgtcaaataggccaatttttcccggtaagcactacctggatcagctgaatcacatcctcgctttagacctgcttgaccggatgctgactttcaatccaaacaagcgtatcactgtggaggaagcccttgcacacccgtaccttgagcagtactacgaccctacagatgagccagtggcagaggagcctttcacattcgcaatggaattggacgacctgccaaaagaacgcttgaaagagctgatatttcaggagactgcacggtttcagccgggtgtgctggaggccccctag

SEQ ID NO: 41899 - DNA, 1008 bp, Artificial Sequence
  derived and/or modified sequence
atggctgcagcagcggcccagggtggtggcgggggagagcctcgaagaaccgaaggtgtgggccctggggttcctggcgaggtggagatggtaaaggggcagccttttgatgtaggacccaggtatacacagctgcagtacataggcgaaggcgcttatgggatggtgagttccgcttatgaccacgttcgaaaaacccgcgtcgcaatcaagaagattagcccttttgagcaccagacatactgtcaaaggaccctcagagaaatccagattttgctgcgattcaggcatgagaatgttatcggcatccgggacatcctgcgggcctctactttggaggctatgcgggacgtctatatcgtccaggacctgatggaaaccgacctctacaagctgctgaaatctcaacaactgtccaacgaccacatctgttacttcctataccagattctccgcggcctcaagtatatacatagcgcaaatgtactccacagggaccttaaacctagtaacctgcttatcaacaccacatgcgacctaaaaatttgcgacttcgggctggcccggattgcagatcctgagcacgaccatacaggattcctgactgaatatgtggctaccaggtggtatcgtgcccctgaaattatgttaaacagcaaagggtacaccaaaagtatcgacatctggtcagtggggtgcatcctggcagaaatgctgtctaaccggccgatctttccagggaagcactacctcgaccagctcaaccacattttagccctcgatttgctggaccgaatgctgacatttaaccctaacaagcgaattactgtggaggaagccttggcacacccttacctggaacagtattatgatcctactgacgagcccgtcgcggaggaacccttcacctttgccatggagctcgatgacctgcctaaagagagactgaaggagttgattttccaggaaacagctcgcttccagcctggcgtgctggaggctccctag

SEQ ID NO: 41900 - DNA, 1008 bp, Artificial Sequence
  derived and/or modified sequence
atggctgctgctgctgcccagggcggcggcggcggggagcccaggagaacagaaggagtgggccctggggtgcctggagaggtggagatggtgaagggccagccctttgatgtgggcccccgctacacccagctgcagtacatcggggagggcgcctacggcatggtgagcagcgcctatgaccacgtgaggaagaccagggtggccatcaagaagatcagcccctttgagcaccagacctactgccagaggaccctgcgggagatccagatcctgctgcgcttcagacatgaaaatgtgattggcatccgggacatcctgcgggccagcaccctggaggccatgagagatgtgtacatcgtgcaggacctgatggagacagacctgtacaagctgctgaagagccagcagctgagcaatgaccacatctgctacttcctgtaccagatcctgcggggcctgaagtacatccacagcgccaacgtgctgcaccgggacctgaagcccagcaacctgctgatcaacaccacctgtgacctgaagatctgtgactttggcctggccagaattgctgaccctgagcatgaccacacaggcttcctgacagaatatgtggccacccgctggtaccgggcccctgagatcatgctgaacagcaagggctacaccaagagcattgacatctggagcgtgggctgcatcctggccgagatgctgagcaaccggcccatcttccctgggaagcactacctggaccagctgaaccacatcctggccctggacctgctggacaggatgctgaccttcaaccccaacaagaggatcaccgtggaggaggccctggcccacccctacctggagcagtactatgaccccacagatgagcctgtggccgaggagcccttcacctttgccatggagctggatgacctgcccaaggagcggctgaaggagctgatcttccaggagacagcccgcttccagcccggggtgctggaggccccctag

SEQ ID NO: 41901 - DNA, 1008 bp, Artificial Sequence
  derived and/or modified sequence
atggccgccgccgccgcccagggcggcggcggcggcgagccccggaggacggagggagtcgggccaggggtgcctggggaggtggaaatggttaaaggacagccgttcgacgtgggacccagatacacacagttgcagtacattggggagggtgcgtatggcatggtatcctccgcctacgaccacgtgaggaagacacgggttgccatcaaaaagatatctccattcgagcatcagacatactgccagagaactctacgtgagattcagatcttgctgcgattcagacacgagaacgtgatagggatcagggatattttaagggcttctactctagaagctatgagagatgtgtacattgttcaggacctaatggagaccgacctgtataaactgctcaaaagccagcagctttctaatgaccacatatgttatttcctttatcagatcctgcgtggtctcaaatatatacactccgctaacgtgctccaccgagacttaaagccctctaatcttctgattaataccacttgcgacctgaaaatctgtgactttggtctcgctcggattgcagatcccgagcatgaccacaccggatttctcacagagtatgtggcaaccaggtggtacagagcgcctgaaattatgcttaacagcaaaggctacacgaagagcatagatatctggtcagtcggctgtatcctagctgagatgttgtccaaccgaccgattttcccgggtaagcattatttggaccagttgaatcacatccttgccttggacctgctggatcgcatgctaaccttcaatccaaataaacgtattacagtggaggaagcactggctcacccttatctcgagcaatactacgacccaaccgatgagcccgtggccgaagagcccttcactttcgctatggagctggacgatctacccaaagagaggctaaaggaattgatttttcaagagaccgctagattccagcctggggtcctcgaagctccatag

SEQ ID NO: 41902 - DNA, 1008 bp, Artificial Sequence
  derived and/or modified sequence
atggccgccgccgccgcccagggcggcggcggcggcgagccccggcgcacagagggcgtgggcccaggcgtcccaggggaagtagaaatggtgaaaggccagcccttcgatgtgggcccaaggtacacacagctgcagtacatcggggagggtgcctatggaatggtgtctagtgcatacgatcatgtgcgcaagactagagtcgctattaagaagatcagtccatttgagcatcagacctactgccaacggacactgcgggagattcagatcttactgcgcttcaggcatgagaacgttataggtatcagggatatcttacgtgcgtccacgttagaagctatgagggatgtgtacatcgtgcaggatctcatggaaacagatctgtacaaactgctgaagagccagcaattgtccaatgaccatatctgttactttctataccagatactgcgaggcctgaagtatattcattctgccaatgtgctgcacagggacttaaaaccttccaacttgctcatcaacacaacttgcgacctgaagatctgcgatttcggcctggctaggattgccgatcccgaacatgaccacactggatttttgactgagtatgtcgccacccggtggtatcgcgccccggaaattatgctgaactccaagggctataccaaatctatcgacatatggtcggttggctgtatcctggctgagatgctgtcaaataggcccatctttcccgggaaacactacctggaccagctaaaccacatcttggccctggatctccttgacagaatgctgacgtttaaccccaataaaagaataactgtggaagaggcactcgctcacccctacctcgagcagtattacgatcccacggacgagcccgtggcagaggaacctttcacattcgccatggaactggatgatctgcctaaggaacgcctgaaagagctgatcttccaggagacagccaggttccagcctggcgtgttagaggccccctag

SEQ ID NO: 41903 - DNA, 1743 bp, Artificial Sequence
  derived and/or modified sequence
ctggcgcgcgcggccctgcgggtgacaggcaggcgggaaggggcggggcctcgggcggggccgccgtggggaggagggcggtgggaggggaggagtggagatggcggcggcggcggctcaggggggcgggggcggggagccccgtagaaccgagggggtcggcccgggggtcccgggggaggtggagatggtgaaggggcagccgttcgacgtgggcccgcgctacacgcagttgcagtacatcggcgagggcgcgtacggcatggtcagctcggcctatgaccacgtgcgcaagactcgcgtggccatcaagaagatcagccccttcgaacatcagacctactgccagcgcacgctccgggagatccagatcctgctgcgcttccgccatgagaatgtcatcggcatccgagacattctgcgggcgtccaccctggaagccatgagagatgtctacattgtgcaggacctgatggagactgacctgtacaagttgctgaaaagccagcagctgagcaatgaccatatctgctacttcctctaccagatcctgcggggcctcaagtacatccactccgccaacgtgctccaccgagatctaaagccctccaacctgctcatcaacaccacctgcgaccttaagatttgtgatttcggcctggcccggattgccgatcctgagcatgaccacaccggcttcctgacggagtatgtggctacgcgctggtaccgggccccagagatcatgctgaactccaagggctataccaagtccatcgacatctggtctgtgggctgcattctggctgagatgctctctaaccggcccatcttccctggcaagcactacctggatcagctcaaccacattctggcccttgacctgctggaccggatgttaacctttaaccccaataaacggatcacagtggaggaagcgctggctcacccctacctggagcagtactatgacccgacggatgagccagtggccgaggagcccttcaccttcgccatggagctggatgacctacctaaggagcggctgaaggagctcatcttccaggagacagcacgcttccagcccggagtgctggaggccccctagcccagacagacatctctgcaccctggggcctggacctgcctcctgcctgcccctctcccgccagactgttagaaaatggacactgtgcccagcccggaccttggcagcccaggccggggtggagcatgggcctggccacctctctcctttgctgaggcctccagcttcaggcaggccaaggccttctcctccccacccgccctccccacggggcctcgggacctcaggtggccccagttcaatctcccgctgctgctgctgcgcccttaccttccccagcgtcccagtctctggcagttctggaatggaagggttctggctgccccaacctgctgaagggcagaggtggagggtggggggcgctgagtagggactcagggccatgcctgcccccctcatctcattcaaaccccaccctagtttccctgaaggaacattccttagtctcaagggctagcatccctgaggagccaggccgggccgaatcccctccctgtcaaagctgtcacttcgcgtgccctcgctgcttctgtgtgtggtgagcagaagtggagctggggggcgtggagagcccggcgcccctgccacctccctgacccgtctaatatataaatatagagatgtgtctatggctg

SEQ ID NO: 41904 - DNA, 1008 bp, Artificial Sequence
  derived and/or modified sequence
atggcggcggcggcggctcaggggggcgggggcggggagccccgtagaaccgagggggtcggcccgggggtcccgggggaggtggagatggtgaaggggcagccgttcgacgtgggcccgcgctacacgcagttgcagtacatcggcgagggcgcgtacggcatggtcagctcggcctatgaccacgtgcgcaagactcgcgtggccatcaagaagatcagccccttcgaacatcagacctactgccagcgcacgctccgggagatccagatcctgctgcgcttccgccatgagaatgtcatcggcatccgagacattctgcgggcgtccaccctggaagccatgagagatgtctacattgtgcaggacctgatggagactgacctgtacaagttgctgaaaagccagcagctgagcaatgaccatatctgctacttcctctaccagatcctgcggggcctcaagtacatccactccgccaacgtgctccaccgagatctaaagccctccaacctgctcatcaacaccacctgcgaccttaagatttgtgatttcggcctggcccggattgccgatcctgagcatgaccacaccggcttcctgacggagtatgtggctacgcgctggtaccgggccccagagatcatgctgaactccaagggctataccaagtccatcgacatctggtctgtgggctgcattctggctgagatgctctctaaccggcccatcttccctggcaagcactacctggatcagctcaaccacattctggcccttgacctgctggaccggatgttaacctttaaccccaataaacggatcacagtggaggaagcgctggctcacccctacctggagcagtactatgacccgacggatgagccagtggccgaggagcccttcaccttcgccatggagctggatgacctacctaaggagcggctgaaggagctcatcttccaggagacagcacgcttccagcccggagtgctggaggccccctag

SEQ ID NO: 41905 - DNA, 1008 bp, Artificial Sequence
  derived and/or modified sequence
atggccgctgcggctgcacaaggaggcggtggtggagagccacgcaggacagaaggagtcggccctggggttccaggagaagtcgaaatggtcaagggtcagccctttgacgtggggcctcgttacacgcagctccagtacataggtgagggcgcttacggtatggtctcaagtgcatacgatcatgttcggaagactcgcgtagctatcaagaagatatccccgttcgagcatcagacctactgtcagcgcactttgagggagattcagattttactgcggttccgccatgagaatgtcataggtatccgggatatactgcgggcaagcaccttggaagccatgcgcgatgtttatatagtacaggatctgatggagacagatctatacaagttattgaagtcgcaacaattatccaacgaccacatttgttactttttgtaccaaattttgagaggtctgaagtacattcattcagcgaatgtgctgcaccgcgaccttaagccttccaacctgctcatcaacaccacctgtgatttgaaaatctgtgactttggtttggcccgaatcgccgaccccgagcacgaccacacaggttttttgacagaatatgtcgcgacacgatggtatagagcccctgaaattatgctaaacagcaaaggctacaccaaatcaattgatatatggagcgtaggttgcatattggcggagatgctaagtaaccggccaatttttccgggaaagcattacctggatcagctgaatcatattctcgccctagacttactggataggatgctcacctttaatccaaacaagagaataaccgtggaggaggctcttgcccacccatacctggaacaatactacgacccgaccgatgagccagtggccgaggaacccttcacgttcgctatggagctggacgacctgcccaaagagcggttaaaggagctgatcttccaggagaccgccaggttccaacccggtgtgttggaagcaccctag

SEQ ID NO: 41906 - DNA, 1008 bp, Artificial Sequence
  derived and/or modified sequence
atggccgctgccgcagctcagggtggaggtggcggagagcctcgtaggacagagggagttggacctggcgtcccaggggaggtggagatggtgaaggggcagccattcgatgtcgggccaaggtatacgcagctgcaatatatcggagagggcgcatacggcatggtcagtagcgcctatgatcatgtgagaaagaccagagtcgcaataaagaagataagtccatttgaacaccagacgtactgccagcggactctgagggagatccagatcttgctgcgctttcgccatgaaaatgttattggaatccgagacattcttagggcgtctaccctcgaggctatgagggatgtttacatcgtgcaggatctcatggaaacagacttatacaagttactgaagagtcagcaacttagtaatgatcacatctgttatttcctgtatcagattctacgaggtctcaagtacatccattcagctaacgtactccatagagatttgaagccctctaacctgttgattaatacaacgtgcgacctaaagatatgcgacttcggcctagcacggattgctgatcccgaacacgaccacactggattcttgaccgagtacgttgcaacgcggtggtatagggcccctgagatcatgctgaatagtaaaggatatactaagtcgatcgacatttggagtgttggatgcatcctggctgagatgcttagtaaccgcccaatattccccggaaagcactatctggaccagctcaatcacattctggctttagatctcttagatcggatgttaaccttcaaccccaataaacggatcactgtcgaggaggccctggcccatccatacctggagcagtattatgatccgaccgacgaacctgtggccgaggagccattcactttcgccatggaactagatgatctccctaaagagaggttgaaagaactgattttccaagaaaccgctagatttcagcccggagtgctggaggctccctag

SEQ ID NO: 41907 - protein, 685 aa, Artificial Sequence
  derived and/or modified sequence
MEGYSEEASLLRHLEKVASEEEEVPLVVYLKENAALLTANGLHLSQNREAQQSSPAPPPAEVHSPAADVNQNLASPSATLTTPTSNSSHNPPATDVNQNPPATVVPQSLPLSSIQQNSSEAQLPSNGTGPASKPSTLCADGQPQAPAEEVRCSTLLIDKVSTPATTTSTFSREATLIPSSRPPASDFMSSSLLIDIQPNTLVVSADQEMSGRAAATTPTKVYSEVHFTLAKPPSVVNRTARPFGIQAPGGTSQMERSPMLERRHFGEKAPAPQPPSLPDRSPRPQRHIMSRSPMVERRMMGQRSPASERRPLGNFTAPPTYTETLSTAPLASWVRSPPSYSVLYPSSDPKSSHLKGQAVPASKTGILEESMARRGSRKSMFTFVEKPKVTPNPDLLDLVQTADEKRRQRDQGEVGVEEEPFALGAEASNFQQEPAPRDRASPAAAEEVVPEWASCLKSPRIQAKPKPKPNQNLSEASGKGAELYARRQSRMEKYVIESSSHTPELARCPSPTMSLPSSWKYPTNAPGAFRVASRSPARTPPASLYHGYLPENGVLRPEPTKQPPYQLRPSLFVLSPIKEPAKVSPRAASPAKPSSLDLVPNLPKGALPPSPALPRPSRSSPGLYTSPGQDSLQPTAVSPPYGGDISPVSPSRAWSPRAKQAPRPSFSTRNAGIEAQVWKPSFCFK

SEQ ID NO: 41908 - protein, 166 aa, Artificial Sequence
  derived and/or modified sequence
MLLILLSVALLAFSSAQDLDEDVSQEDVPLVISDGGDSEQFIDEERQGPPLGGQQSQPSAGDGNQNDGPQQGPPQQGGQQQQGPPPPQGKPQGPPQQGGHPPPPQGRPQGPPQQGGHPRPPRGRPQGPPQQGGHQQGPPPPPPGKPQGPPPQGGRPQGPPQGQSPQ

SEQ ID NO: 41909 - protein, 166 aa, Artificial Sequence
  derived and/or modified sequence
MLLILLSVALLAFSSAQDLNEDVSQEDVPLVISDGGDSEQFLDEERQGPPLGGQQSQPSAGDGNQDDGPQQGPPQQGGQQQQGPPPPQGKPQGPPQQGGHPPPPQGRPQGPPQQGGHPRPPRGRPQGPPQQGGHQQGPPPPPPGKPQGPPPQGGRPQGPPQGQSPQ

SEQ ID NO: 41910 - protein, 96 aa, Artificial Sequence
  derived and/or modified sequence
MLLILLSVALLAFSSAQDLDEDVSQEDVPLVISDGGDSEQFIDEEGHKDHPNREAISKVLPHLLLESPRDHLPKGAAHKDLHRGSLLSNLGFNDRK

SEQ ID NO: 41911 - DNA, 303 bp, Artificial Sequence
  derived and/or modified sequence
atgtggggcttcctggtgctgaaggccagatggctggtgacccccgtgagaaccctggccaccgaggccggccagaagcccagcctgagaggcctgctggacgtgggcaacatccagcacagagccgccagagccagaggcctgaccagaggcgtgatcagagtgagcccccaggagagaagccagcagaaccagagcgcccccaagggccccacccccagcaccagacccaagcccagaaccctgggcccccaggcccacagcctggccctgcagagcgtggacctgctgttcagaccctag

SEQ ID NO: 41912 - DNA, 423 bp, Artificial Sequence
  derived and/or modified sequence
atgaagggccaggagggcatcagaggcgagggctgcaccgaccccgagatcaaggccagcccccagatgtgggccgccagattcagaggcatgagaagcagattcagccccctgttcagccaggccaccgagatgggccccagagtgagcgccggctggtgcctgagcggcggcggcagaaaggtgagcagcctgcagggcgacttcccccccggcggcttctgggccctgagcaacgacagcgccctgagcctgccccccctgagcctgccccacccccaccccctgagaccccccggcctgggcgtgaacgagttcacccagggcctgcacccccccctgcaccccgccgccagcgtgttccagacctgcttctacagaaagccccactactgcagcaccctgagacccaccaccacctag

SEQ ID NO: 41913 - DNA, 501 bp, Artificial Sequence
  derived and/or modified sequence
atgctgctgatcctgctgagcgtggccctgctggccttcagcagcgcccaggacctggacgaggacgtgagccaggaggacgtgcccctggtgatcagcgacggcggcgacagcgagcagttcatcgacgaggagagacagggcccccccctgggcggccagcagagccagcccagcgccggcgacggcaaccagaacgacggcccccagcagggccccccccagcagggcggccagcagcagcagggccccccccccccccagggcaagccccagggccccccccagcagggcggccaccccccccccccccagggcagaccccagggccccccccagcagggcggccaccccagaccccccagaggcagaccccagggccccccccagcagggcggccaccagcagggcccccccccccccccccccggcaagccccagggcccccccccccagggcggcagaccccagggccccccccagggccagagcccccagtag

SEQ ID NO: 41914 - DNA, 381 bp, Artificial Sequence
  derived and/or modified sequence
atgggcagaatcttccagctgctgagagacagaagaatcagcagcagaggccccggcctgcacacccccaaggccgagcccagaagaagaaagggcctgaccaccggcctgatgacccaggccgagagacagaagcaggcccaccagagacaggccgccatgagagagaccgccctgtggtgcaccggccacatcagacccagaacccacacccacaccggcacccacacccagaccgacagagagagagagagaaacacccagagactgagagacagagagagaagagagaacggcagacacacccacatccacacccagacccacacccagagcctgatcgccaaggccctgaaggacacccaccccggcaacccctag

SEQ ID NO: 41915 - DNA, 588 bp, Artificial Sequence
  derived and/or modified sequence
atgaacagcgtgttcagacagcccggcagcaacttcagcttccccatctaccagcccagcgccagcgtgacccacggcctgagcttcttctgcgaggtgagcccccagatgctgaccccccaggactacagaggcaagcagcagggccacagaggctgccccggctgcatggtggccatggacacctggcccgccgtgctgcccgagctgcccggcttctggggcgagggcagcggcggccaggcctggggcgccagaggcgagcccctgctgcagaaggccaactgcctgctggaggccgtgagactgttcctgaactacagacccctgggcgccgagggcggcgagctgaccttcggcaagagactgctggtgcccaccgccgtgagctgcgcctacgactgcgtgagcagcagcgccttcctgggcatccagctgctgggcgaccccaccagaagccccggccactgctacagacaggacttcaacggcaccctgagactgagagagggcaagggcctggtgcagagccacaccggcaccctgtgggccggccccctgcaggagggcacccagggccagacctag

SEQ ID NO: 41916 - DNA, 501 bp, Artificial Sequence
  derived and/or modified sequence
atgctactgattttgttatccgtggctctcttagccttctccagcgcacaggacttggacgaagacgtgagccaagaggatgtccctctggttatatctgatggaggcgactcagagcagttcattgacgaagagcggcagggcccgcctctgggcgggcagcagtctcagccttccgccggggatggtaatcagaatgatggtcctcagcaaggcccccctcagcagggtgggcagcagcagcaggggcctccacccccccagggcaaacctcaaggcccacctcaacaagggggccatccaccaccacctcagggacggcctcagggtccccctcagcaaggggggcatccacggcccccaagggggcggccacagggcccaccgcagcagggcggccaccagcagggtcctccgccgccgcccccgggcaaaccccaagggccccccccacaggggggccgtccccaggggccgccacagggccaaagcccccagtag

SEQ ID NO: 41917 - DNA, 501 bp, Artificial Sequence
  derived and/or modified sequence
atgctcttgattctcctgagtgtggccctgttggccttctctagcgcccaagaccttgatgaggacgtgagccaggaagacgtccccctcgtcatttcagatgggggggactcagagcagtttatcgatgaggagcgccagggtccgccgctgggaggccagcaatcccaaccaagtgccggcgacggaaaccagaatgatggccctcagcaggggccacctcagcagggtggccagcagcaacaaggaccaccaccgccgcaagggaagccccagggccctccccaacagggcggtcaccctccacctccgcaaggcagaccccaagggcctccgcagcaaggtggtcatccgcggcctcccaggggaagacctcaaggccccccacaacagggaggtcatcaacagggccctcccccgccgcctccaggcaagccccagggcccccctccccaggggggtcggcctcagggaccaccacaggggcagagtccacagtag

SEQ ID NO: 41918 - DNA, 501 bp, Artificial Sequence
  derived and/or modified sequence
atgctgctgatcttgttaagcgttgccctcctcgctttctcgagtgctcaagacctagacgaggatgtcagccaggaggatgtcccattggtaatatcggacgggggggactcagagcagttcatcgatgaggagcgccagggcccgccactcggaggacagcagtctcagcccagcgctggtgatgggaatcagaatgatggcccacagcaaggacctccgcagcaggggggccagcagcagcagggtcccccccccccgcagggaaagccccaggggccgccccaacagggggggcaccctccccctcctcagggacgacctcagggtcccccacagcagggcggtcatcctaggccacctagggggcgcccccaaggccccccccagcaaggaggccaccagcaagggccccctccgcctcctcctggaaagccccagggcccgccgcctcaaggaggccggcctcagggtcccccacagggccaaagcccgcagtag

SEQ ID NO: 41919 - DNA, 501 bp, Artificial Sequence
  derived and/or modified sequence
atgctcctaattttattgagtgtggccttattggccttcagttcagctcaggatttggatgaagatgtgtcccaggaggatgttccactcgtaatttccgatggtggggactccgagcagttcattgacgaagaaagacaaggcccccccttgggtggccagcaatctcagccctctgctggcgatggcaaccagaacgacggcccgcaacaaggcccgccgcagcaggggggccaacagcagcagggccctccacctccacagggcaagcctcagggccctcctcagcagggcggacacccccctcctccacagggccggccccagggcccgccccagcaaggaggacaccctcgtccaccccgcggcagacctcagggccctccccagcagggaggtcaccaacagggcccgcctccccctcccccaggtaagccccaggggccccccccgcaggggggacgaccccagggcccaccccaggggcagagcccacagtag

SEQ ID NO: 41920 - DNA, 423 bp, Artificial Sequence
  derived and/or modified sequence
atgaagggccaggagggcatccggggggagggctgcacagatcctgagatcaaggccagcccccagatgtgggccgcccgcttccggggcatgaggagccgcttcagccccctcttcagccaggccacagagatgggcccccgggtgtctgctggctggtgcctgagcggcggcggcaggaaggtgagcagcctgcagggcgacttccccccaggcggcttctgggccctgagcaatgattctgccctgagcctgccccccctgagcctgccccacccccaccccctgcggcccccaggcctgggcgtgaatgagttcacccagggcctgcacccccccctgcaccctgctgcctctgtgttccagacctgcttctacaggaagccccactactgcagcaccctgcggcccaccaccacctag

SEQ ID NO: 41921 - DNA, 501 bp, Artificial Sequence
  derived and/or modified sequence
atgctgctgatcctgctgtctgtggccctgctggccttcagcagcgcccaggacctggatgaagatgtgtcccaggaggatgtgcccctggtgatcagtgatggaggagacagcgagcagttcattgatgaggagcggcagggcccccccctgggcggccagcagagccagcccagcgctggagatggcaaccagaatgatggcccccagcagggccccccccagcagggcggccagcagcagcagggccccccaccaccccagggcaagccccagggccccccccagcagggcggccaccccccaccaccccagggccggccccagggccccccccagcagggcggccacccccggcccccccggggccggccccagggccccccccagcagggcggccaccagcagggccccccacctcctcctcctgggaagccccagggccccccaccccagggcggccggccccagggccccccccagggccagagcccccagtag

SEQ ID NO: 41922 - DNA, 501 bp, Artificial Sequence
  derived and/or modified sequence
atgctgctgatcctgctgagcgtggccctgctggccttcagcagcgctcaagacctcgacgaggacgtgtcccaggaagacgtcccactggtgattagtgatggtggggactctgaacagttcatcgacgaggagcgacagggccccccgttaggcggacagcaaagtcagcccagtgccggggatggaaatcagaatgatggaccgcagcagggtcccccacagcagggcgggcagcagcagcaaggccctcctcctccccaggggaaaccccagggacctcctcagcaagggggtcacccacctcccccacaagggcggccccagggccccccccagcaaggaggacacccaagacctccccgtggacgaccccaggggcctccacagcagggagggcaccagcagggccctcctccgcccccccccggcaagccgcagggaccgccaccccagggcggccggccacagggacctccacagggacagagcccccagtag

SEQ ID NO: 41923 - DNA, 501 bp, Artificial Sequence
  derived and/or modified sequence
atgctgctgatcctgctgagcgtggccctgctggccttcagcagcgctcaggacctggatgaggatgtatcccaagaagacgtaccgctggtaatctccgatggtggagatagtgaacagtttatcgatgaagagaggcagggcccgccccttggcgggcagcaaagtcagccatcagcaggggacggcaatcagaatgatggcccgcagcagggtcctccccagcaaggtggccagcagcagcaggggccaccaccaccccaggggaaaccccagggccccccgcagcagggaggtcaccccccacccccacagggcagacctcagggccctccgcagcagggcgggcatccaagacccccacgtgggcgtccccaaggccccccccagcaaggagggcaccagcagggcccccctccgcctcctccgggaaagcctcaaggcccacccccccaggggggccgccctcagggtcctccccagggtcagtcgccccaatag

SEQ ID NO: 41924 - DNA, 501 bp, Artificial Sequence
  derived and/or modified sequence
atgctgctgatcctgctgagcgtggccctgctggccttcagcagcgctcaagacctggatgaggatgtcagccaagaagacgtgccccttgtaatttcagacgggggtgactctgagcagtttattgatgaggagcggcagggtccaccgctcgggggacaacagtctcagccaagtgccggagatggaaaccaaaacgatggaccacaacaagggccaccacagcaaggaggtcaacagcagcagggtccgcctcccccgcaaggcaaaccacaggggccgcctcagcagggagggcatccccctcctccccagggccgaccccaaggaccgccccagcaagggggtcatccacggccgcccaggggccgcccacagggtcctccccagcaggggggccatcagcaaggaccgccccccccccctcccggtaaacctcagggccccccaccccagggtggaaggccccagggcccaccccaagggcagtcgcctcagtag

SEQ ID NO: 41925 - DNA, 501 bp, Artificial Sequence
  derived and/or modified sequence
atgctgctgatcctgctgagcgtggccctgctggccttcagcagcgcacaggatcttgatgaagatgtgagtcaggaggatgtcccactggtgatctccgatggtggggactctgagcagtttatagatgaggagcgacaaggccctcccctaggtgggcaacagtctcagccctcggcaggcgatggaaaccagaacgatggcccgcagcagggccccccccaacaaggaggacagcagcaacaggggccccctcctccacaggggaaaccacagggacctccacagcagggaggccatcccccccccccacaggggagacctcaggggccaccacagcagggtggccaccctcggcctccgcggggtaggcctcaaggcccaccacagcaagggggacaccagcagggacccccccctccccctcctggcaaaccacaaggccctcccccacagggtggaagaccacaggggcctcctcaggggcagagtccccaatag

SEQ ID NO: 41926 - DNA, 501 bp, Artificial Sequence
  derived and/or modified sequence
atgctcttaatcctgctgagcgtggcactgcttgccttctcaagtgcacaagaccttgatgaagacgtgtcccaagaggatgtgccactggtaatctcggatggcggagatagcgagcaatttatagatgaggaacgacagggaccacccctgggcggtcagcaatctcagccttctgcgggtgacggaaatcagaacgacggccctcagcaaggccctccccagcaaggaggccaacagcagcaaggcccaccaccaccacaggggaagccccagggccctccccagcaaggaggtcacccaccacccccacagggtagaccacagggacctccccagcagggcggtcatccccgaccgcctaggggtcgccctcagggccctccccaacagggcggtcatcagcagggacccccacccccaccccctgggaaacctcaaggccctcctccccagggcggacgcccacaggggcctccccagggacagagcccccaatag

SEQ ID NO: 41927 - DNA, 501 bp, Artificial Sequence
  derived and/or modified sequence
atgcttcttatcctattatctgttgccctgttggctttctccagcgcacaggatttggatgaggatgtgtcccaggaggacgtgcctttggtgatatcagacggcggagacagtgagcagttcatcgatgaggagcggcagggcccacccctgggaggtcaacagtctcagccaagtgctggagatggaaaccaaaacgacgggccacagcaggggcctccgcagcagggcggtcagcagcagcagggccctccaccccctcagggcaagcctcaggggcctcctcaacagggcggtcacccacccccaccacagggaaggccacaaggtccacctcaacaaggtggacaccctagaccaccccgtgggcgaccacagggaccacctcaacagggcggtcaccaacagggacccccaccaccaccccctggcaagccacagggacccccaccccagggaggacgtccccagggccctcctcagggtcagtcgccacagtag

SEQ ID NO: 41928 - DNA, 501 bp, Artificial Sequence
  derived and/or modified sequence
atgttactgatccttttgagtgtggcgctcttggccttttctagtgcccaagacctagacgaagacgtttcacaagaagacgtgcccctggtgatctcagacgggggtgactctgaacagttcatcgatgaggaacgccagggccctcctctgggcggacagcagagccagccttccgccggagatggtaaccagaacgacggacctcagcaggggccaccccagcaaggcggacagcagcaacaggggcctcctcctccgcaggggaagcctcagggccctcctcaacagggaggacatcctcctccccctcagggccgtcctcaaggcccaccacagcagggcggacacccacgccctccacgcggaaggcctcaggggcctcctcagcaaggcggacaccagcaggggccaccaccaccccctcccggaaaaccccagggtcccccaccacagggaggacgtcctcagggacccccacaagggcaaagcccccagtag

SEQ ID NO: 41929 - DNA, 501 bp, Artificial Sequence
  derived and/or modified sequence
atgctgttaatattattgagcgtagccctgctcgcctttagctcagcccaggacctggacgaagacgtcagtcaggaagacgtaccgctggtgatctcggacggaggcgactccgaacagttcatcgatgaggagagacagggacctccgctagggggtcagcaatcccagccttctgctggggacggcaatcagaatgacggtcctcagcaggggccaccacaacagggaggacagcagcaacagggcccacctccaccacaaggcaaaccccagggaccaccgcagcagggaggacatccacctccacctcagggcagacctcagggacccccacaacagggcggacaccctaggcctcctaggggccgaccccaagggccacctcagcagggtggccaccagcaaggacctcccccaccaccgccaggaaagccacaaggtccaccaccccagggaggtaggcctcaggggcctccacagggacagtccccgcagtag

SEQ ID NO: 41930 - DNA, 673 bp, Artificial Sequence
  derived and/or modified sequence
agcataaagttgggagtgacaccagagccttctgcaagatgcttctgattctgctgtcagtggccctgctggccttcagctcagctcaggacttagatgaagatgtcagccaagaagacgttcccttggtaatatcagatggaggagactctgagcagttcatagatgaggagcgtcagggaccacctttgggaggacagcaatctcaaccctctgctggtgatgggaaccagaatgatggccctcagcagggaccaccccaacaaggaggccagcagcaacaaggtccaccacctcctcagggaaagccacaaggaccaccccaacagggaggccatccccctcctcctcaaggaaggccacaaggaccaccccaacagggaggccatccccgtcctcctcgaggaaggccacaaggaccaccccaacagggaggccatcagcaaggtcctcccccacctcctcctggaaagccccagggaccacctccccaagggggccgcccacaaggacctccacaggggcagtctcctcagtaatctaggattcaatgataggaagtgaataagaagatgacagtgtttcaaatgccttgaaacataatgtgatcatgctctaacttcaatataccaataaaataatcagcttgcaatttctgattatagcatctcct

SEQ ID NO: 41931 - DNA, 641 bp, Artificial Sequence
  derived and/or modified sequence
agcataaagttgggagtgacaccagagccttctgcaagatgcttctgattctgctgtcagtggccctgctggccttcagctcagctcaggacttagatgaagatgtcagccaagaagacgttcccttggtaatatcagatggaggagactctgagcagttcatagatgaggagcgtcagggaccacctttgggaggacagcaatctcaaccctctgctggtgatgggaaccagaatgatggccctcagcagggaccaccccaacaaggaggccagcagcaacaaggtccaccacctcctcagggaaagccacaaggaccaccccaacagggaggccatccccctcctcctcaaggaaggccacaaggaccaccccaacagggaggccatccccgtcctcctcgaggaaggccacaaggaccaccccaacagggaggccatcagcaaggtcctcccccacctcctcctggaaagccccagggaccacctccccaagggggccgcccacaaggacctccacaggggcagtctcctcagtaatctaggattcaatgataggtatgattccagtttattatccatcaaaggctccaactgctacagttctccaacttcattgtgccagtgaatctattgaaaagc

SEQ ID NO: 41932 - DNA, 291 bp, Artificial Sequence
  derived and/or modified sequence
atgctgctgattctactgtccgtcgccctgctggccttctcatcagcccaagacctcgatgaagacgtttctcaagaggacgtccccctggtgatctcagacggcggcgactctgagcagttcatcgacgaagaaggtcataaggatcaccccaaccgagaggctatcagcaaagttcttccacatctgctgctcgaaagcccaagggatcacctccccaagggggctgcccacaaggatttacaccgtgggtcgctactatcaaacctgggctttaacgatcgtaaatag

SEQ ID NO: 41933 - DNA, 501 bp, Artificial Sequence
  derived and/or modified sequence
atgctcctgatcctgctcagcgttgcactgctcgccttcagtagtgcgcaggatttggacgaggacgtgtctcaggaggacgtacccctggtgatcagcgatggtggggattcagaacaattcattgacgaggagcggcaggggcccccgctgggcgggcagcagagccagcctagtgccggagatggcaaccagaacgacggtcctcagcagggtccaccacagcagggaggccaacagcagcaaggccctcctcctccacaggggaagcctcaggggccccctcagcagggaggtcaccccccacctccacagggtcgaccccaaggcccgcctcagcagggggggcacccaagaccaccccgggggcggccgcagggccctccccagcaagggggccatcagcagggacccccaccccccccgccgggaaaacctcagggccctcctccccaggggggacgcccccagggcccgcctcagggccagagcccacagtag

SEQ ID NO: 41934 - DNA, 501 bp, Artificial Sequence
  derived and/or modified sequence
atgctgctcatcctgctatcagtggcactgctcgccttctccagtgcccaagacctcgacgaagacgtctcacaagaggacgtacccctcgtgataagcgacggaggcgactccgaacagttcatagacgaagagagacaaggcccgcctttaggaggccagcagagccagccctccgcaggcgatgggaaccagaacgacggacctcagcaaggtccaccgcagcagggaggacagcagcagcagggaccgccgccccctcagggcaagcctcagggacctcctcagcagggcgggcacccaccaccgccccaggggcgaccacagggccccccccaacagggcggccacccgaggccccctcggggaaggccccaaggccccccgcagcagggaggtcatcagcaggggccccctccgcccccacccggcaagccacaagggccaccgcctcagggggggcgcccccaaggacctccacagggccaaagtccgcagtag

SEQ ID NO: 41935 - DNA, 291 bp, Artificial Sequence
  derived and/or modified sequence
atgctgctgatcctgctgtctgtggccctgctggccttcagcagcgcccaggacctggatgaagatgtgtcccaggaggatgtgcccctggtgatcagtgatggaggagacagcgagcagttcattgatgaggagggccacaaggaccaccccaaccgggaggccatcagcaaggtgctgccccacctgctgctggagagcccccgggaccacctgcccaagggggccgcccacaaggacctgcaccggggcagcctgctgagcaacctgggcttcaatgacaggaagtag

SEQ ID NO: 41936 - DNA, 291 bp, Artificial Sequence
  derived and/or modified sequence
atgctgctgatcctgctgagcgtggccctgctggccttcagcagcgcccaagatcttgacgaggacgtatctcaagaggacgttccccttgtcatcagcgacggcggcgacagcgaacagttcatcgatgaggaagggcacaaagaccacccaaatcgcgaagccatttctaaggtcttgcctcatcttctgctggaatcaccacgggaccatttgcctaagggcgccgcgcacaaagatctgcacaggggtagtctgttatccaacttaggatttaacgacagaaagtag

SEQ ID NO: 41937 - DNA, 501 bp, Artificial Sequence
  derived and/or modified sequence
atgctgctgatcctgctgagcgtggccctgctggccttcagcagcgcccaggatctcgacgaggatgtctctcaggaagatgtccccttggtgatttccgatggcggggacagtgaacagttcatcgatgaggagcggcagggacctccgctgggcggtcagcaaagccaaccttctgccggggacggcaaccagaatgacgggccgcaacagggacccccacaacagggaggacagcaacaacaaggtccgcctcctcctcaaggcaaacctcaaggtcccccacagcagggggggcaccctcccccaccccaggggcggccacagggccctccgcagcagggagggcaccctaggccaccacgaggtcgccctcagggaccacctcagcaaggtgggcaccaacagggcccaccaccccccccacccggcaaaccacagggcccgccccctcagggagggcgtccccagggcccacctcaggggcagagccctcagtag

SEQ ID NO: 41938 - DNA, 501 bp, Artificial Sequence
  derived and/or modified sequence
atgctgctgatcctgctgagcgtggccctgctggccttcagcagcgcacaggacctggatgaggacgtttcccaagaagacgtacctttagttatatccgacggcggcgatagcgagcagtttatagatgaagagcggcagggcccccccctgggaggccagcagagccagcctagtgctggcgacggtaaccagaacgacggtccgcagcaggggccacctcaacaggggggccagcagcaacagggtcctcctcccccccagggaaagccgcaagggcccccccagcaaggaggccaccctccaccgccacagggcagaccacagggtccaccacaacagggcggccacccccggccgccaaggggccggccgcagggacctcctcagcagggcggacaccagcagggcccccccccgccaccccctggtaaacctcagggcccgccgccacagggcgggaggcctcagggcccccctcagggacagtcaccacagtag

SEQ ID NO: 41939 - DNA, 291 bp, Artificial Sequence
  derived and/or modified sequence
atgctgttgatcctactatccgttgcactactggccttctcctctgctcaggacttggatgaggacgtatcccaggaggacgtccccctggtgatatcggatggcggagacagcgagcagttcatagacgaggaggggcacaaggaccacccaaatagagaggccattagtaaagtgcttcctcacctcctcctggagtcccctcgagaccatttgccgaaaggggctgcccacaaagaccttcaccgaggctccctgctgtctaatctcggcttcaatgaccggaagtag

SEQ ID NO: 41940 - DNA, 501 bp, Artificial Sequence
  derived and/or modified sequence
atgctccttattctattatcagtcgcccttctcgcgttctcaagcgcccaggaccttgacgaagatgtatcacaggaggatgtccccctggtcattagcgacggcggtgactccgaacagtttattgacgaagaacgacagggaccgcctcttggcggacagcagagccagcccagcgcgggtgacgggaaccaaaacgacggccctcaacaggggcctcctcaacagggcggacagcagcagcaaggtcctccccctcctcagggcaaacctcaggggcctccacagcagggcggtcaccccccacctcctcagggcagaccccaagggccacctcagcagggcggacatcctaggccacctcgcggtcgacctcagggtcctccacaacaggggggacaccagcaggggccaccacctccacctccgggaaagccacagggacctcctccccagggcggtagaccacaggggcctccccaggggcagagccctcagtag

SEQ ID NO: 41941 - DNA, 501 bp, Artificial Sequence
  derived and/or modified sequence
atgctgctgatcctcctgtctgttgcactgttggcattttcttccgcccaggacctggatgaggatgtttctcaagaagatgtgccccttgtgatttctgacgggggtgacagcgagcaattcattgatgaggaacggcagggacctccgctggggggacagcagtctcagccttccgcaggcgacggtaaccagaacgacggtccacagcagggaccacctcagcagggaggacagcagcagcaggggcctcctcctccacaaggtaagccgcagggaccaccccaacagggcggacacccacctccccctcaaggacgcccacagggaccccctcagcagggcggacaccccagaccacctagaggaaggccccagggaccccctcaacaaggaggtcatcagcagggccctccaccacctccaccaggaaagccgcaggggccacctccgcaggggggacgccctcagggaccccctcaagggcagagtccacagtag

SEQ ID NO: 41942 - DNA, 1864 bp, Artificial Sequence
  derived and/or modified sequence
cataaagttgggagtgacaccagagccttctgcaagatgcttctgattctgctgtcagtggccctgctggccttcagctcagctcaggacttagatgaagatgtcagccaagaagacgttcccttggtaatatcagatggaggagactctgagcagttcatagatgaggaaggccacaaggaccaccccaacagggaggccatcagcaaggtcctcccccacctcctcctggaaagccccagggaccacctccccaagggggccgcccacaaggacctccacaggggcagtctcctcagtaatctaggattcaatgataggaagtgaataagaagatgacagtgtttcaaatgccttgaaacataatgtgatcatgctctaacttcaatataccaataaaataatcagcttgcaatttctgattatagcatctccttctgagtgtttgggactctggaatctgagacccatgttcacattgtaagaacatccaggaccccttctccttgatgtttccagcaagcttctttcctccttatccttattaagtcatctgcctggggaaggagttccactgtttctttccttctctgtcttcttagctcgaatttaaattgcacaattattttcaggtcatttcctgatagtctagtcagcttatgaatgtaagcaaaacaggaccaatgaaagaaagtcccagaagctgagagaaactttaacaagtttgagagtaacttattttgttttctaggaaagtgagtatggttctatgcctgtattccccagaagccactagacctattttcccctattttatcactgatcagttctgtccctgcctatgattcttaccattcttaagaaaacctgaatggatttcatcaaggcggcagcataatttgaagggcaattgcgtgtgaaaattgatgtgacttgatttacacaatagtcagaaaacattttagaaattgatgactttataatgcaaccaggagtattgaaaaaaaagtaagcaatgagctcaaataattaaaaaagagagacaaaatacacttgggagaacagaaataagaattaatgaaaatttaaaagattaaatgaatgagaagaaatgattcataaattttgaactaacagtaataacttcttgaaaatccaataaaattggcaaaagattgtgaaaattctggaagaataagggaaacagataatcttcagagtaatcaggtaaagcttaaacaagtgttttaaaagatgagtttttcctacattctgaaaagcaaacatgaaaaactgaacacagtttttacagatatacaatatggagtgacttatatacaaaatgaccttaaaaatatattaaactcattatagtagttaatatctaagtaaaatatgatgaaatttaatagagaattcactcctcccaaaagcaccttcatggaagattcctcattaacaggcagtcctttagtatgctgatttatacaaaatgctgaaaagaagagaaataccccaagttcttgaaaaaaaattttttgatatgactactctaacagtaataactataaatctcactttaaataatttaaaacaaattaaagtgatatatgagttaaatgaccaagcagacttgattccaggaatgttaaggaatgttcattatttgttttggataatgaagtcagcagaggaaaaaaaaatatgaccatctcaaaagatgccaacgttgtctttgataatatttaatatattttttaaaaaacaattcttgtaaaatacttttttgattagccttctgaccatgattaaaatggtgtacctcaaagtagctgctaaccttatgtgtatctgcaacaccctg

SEQ ID NO: 41943 - DNA, 291 bp, Artificial Sequence
  derived and/or modified sequence
atgctgctgatcctgctgagcgtggccctgctggccttcagcagcgcccaggacctggacgaggacgtgagccaggaggacgtgcccctggtgatcagcgacggcggcgacagcgagcagttcatcgacgaggagggccacaaggaccaccccaacagagaggccatcagcaaggtgctgccccacctgctgctggagagccccagagaccacctgcccaagggcgccgcccacaaggacctgcacagaggcagcctgctgagcaacctgggcttcaacgacagaaagtag

SEQ ID NO: 41944 - protein, 261 aa, Artificial Sequence
  derived and/or modified sequence
MDWGTLHTFIGGVNKHSTSIGKVWITVIFIFRVMILVVAAQEVWGDEQEDFVCNTLQPGCKNVCYDHFFPVSHIRLWALQLIFVSTPALLVAMHVAYYRHETTRKFRRGEKRNDFKDIEDIKKQKVRIEGSLWWTYTSSIFFRIIFEAAFMYVFYFLYNGYHLPWVLKCGIDPCPNLVDCFISRPTEKTVFTIFMISASVICMLLNVAELCYLLLKVCFRRSKRAQTQKNHPNHALKESKQNEMNELISDSGQNAITGFPS

SEQ ID NO: 41945 - DNA, 786 bp, Artificial Sequence
  derived and/or modified sequence
atggattggggtacactccatacttttattggtggagtcaacaagcatagtacgtctatcgggaaagtttggatcaccgtgatttttatcttcagagtgatgattctggtggttgctgctcaggaggtgtggggtgatgagcaagaggatttcgtctgcaataccttacagccaggatgtaaaaacgtgtgctacgatcatttcttccccgtgagccatatccgcctttgggcactgcagctcattttcgtgagtacacctgctttgctcgttgccatgcacgtcgcctactataggcacgagacgacacggaaattcagaagaggtgagaagagaaatgactttaaggacattgaggatatcaagaagcagaaagttcgcattgagggaagcctgtggtggacttatacgtcgagtattttcttccggattatattcgaagctgctttcatgtacgtattctactttttatacaatggataccatctgccgtgggtgttaaaatgcggtattgacccatgcccgaacctagtggactgcttcatttctcgaccaaccgagaagaccgtgtttactattttcatgattagcgccagcgtcatctgtatgctgttgaatgtggcagaactgtgttatctgctcttgaaagtttgcttccgaagatccaagagagcccagacccagaaaaaccatccaaaccacgctttgaaggagtcaaaacagaacgagatgaatgaactcatcagtgatagcgggcagaatgctattacaggcttcccctcctag

SEQ ID NO: 41946 - DNA, 786 bp, Artificial Sequence
  derived and/or modified sequence
atggactggggaacactacatacctttatcggtggcgtgaacaaacactctacaagcattggaaaagtatggataacggtgatctttatatttcgcgttatgatcctggtggtcgctgcccaggaagtctggggtgatgagcaggaagatttcgtgtgtaatacgctgcagccagggtgtaagaatgtttgctacgaccatttctttccagtttcccatattcggctgtgggcactgcagctgatattcgtatccacgccagcactgctcgtggctatgcatgtcgcgtactaccgacatgaaactaccaggaaatttaggcggggggagaagagaaatgacttcaaagatatcgaagacatcaaaaagcaaaaggtccgtatcgagggaagcctgtggtggacctacactagcagcatattttttcggatcatctttgaggccgcctttatgtacgtgttttacttcctgtataacggctaccatctaccttgggtgctcaaatgcggtatcgacccttgcccaaatctggtcgactgcttcattagccggccaaccgaaaagactgtcttcactattttcatgatctcagctagcgtaatctgcatgctgttgaacgtggcggagttatgctacctgctgctcaaagtctgtttccgtcgctccaaaagagcacaaacccagaagaatcatccgaaccatgctctgaaggaaagcaagcaaaatgaaatgaatgagctcatctccgactctggccaaaacgccattaccggcttcccatcatag

SEQ ID NO: 41947 - DNA, 786 bp, Artificial Sequence
  derived and/or modified sequence
atggattggggaacactacacacattcattggcggagtgaataaacattcaactagcatagggaaggtgtggattacagttattttcatatttcgggttatgatcttagtggtcgcagctcaggaagtgtggggtgatgagcaggaggactttgtgtgcaatactcttcagcctgggtgcaagaatgtgtgctacgaccacttctttcccgtctcacatatccggctctgggccctgcagttgatattcgtttccacgcctgcattactggtggctatgcatgtagcctactatagacatgaaaccacccggaagttcaggcgaggggagaaacgcaacgactttaaggacatcgaagatatcaagaaacagaaggtgaggatcgaaggttcgctttggtggacttatacaagctctattttcttccgcatcatttttgaagcggcctttatgtacgtcttctattttctctacaatggctatcatctcccatgggtgctaaagtgcggcattgacccctgcccaaatttggtcgactgcttcatttcaagaccaactgagaagacagtcttcactatcttcatgattagcgcatcagttatctgtatgctactgaacgtcgccgaactctgctatctcctgttgaaagtttgctttagacgctctaagagagcccagacgcagaagaaccaccccaaccacgcccttaaagagtctaagcagaatgagatgaatgagttgataagtgacagcggccagaacgctatcacagggttcccaagttag

SEQ ID NO: 41948 - DNA, 786 bp, Artificial Sequence
  derived and/or modified sequence
atggactggggcaccctgcacacgttcatagggggcgttaacaagcatagcacttctattggaaaagtatggatcacggtaatttttattttcagggtgatgatactggtggtggccgcacaggaagtctggggggatgagcaggaagactttgtctgtaatacccttcagcccgggtgtaagaatgtgtgctatgaccactttttccctgtgtcccacatccggttatgggcactccaattgatttttgttagtaccccagcattattggttgccatgcacgtggcatactatcgtcatgagacaactagaaagtttcgccggggagagaagaggaatgactttaaagatatcgaggatataaagaagcagaaggtacgaatcgaagggagcctgtggtggacctatacaagctctatattcttcaggatcatatttgaggctgcctttatgtacgttttttacttcttatacaatggctatcacttaccttgggttttaaaatgtggcatcgatccttgcccaaacctggtcgattgttttatatcccggcccaccgaaaagaccgtgttcaccatatttatgatttcggcatcagtgatttgcatgttgctaaacgtggccgaactgtgctacctgctgctgaaagtgtgttttcgtcggagtaaacgggcacagacacaaaagaatcaccccaaccacgccttgaaggagtccaagcagaacgagatgaacgagttgatcagtgattctggccaaaacgctatcactggctttccttcttag

SEQ ID NO: 41949 - DNA, 1808 bp, Artificial Sequence
  derived and/or modified sequence
acataactgggggtgtggagagcgcctcattgccactgcagtgactaaagctgggaagacgctggtcagttcacctgccccactggttgttttttaaacaaattctgatacaggcgacatcctcactgaccgagcaaagattgacattcgtatcatcactgtgcaccattggcttctaggcactccagtggggtaggagaaggaggtctgaaaccctcgcagagggatcttgccctcattctttgggtctgaaacactggcagtcgttggaaacaggactcagggataaaccagcgcaatggattgggggacgctgcacactttcatcgggggtgtcaacaaacactccaccagcatcgggaaggtgtggatcacagtcatctttattttccgagtcatgatcctcgtggtggctgcccaggaagtgtggggtgacgagcaagaggacttcgtctgcaacacactgcaaccgggatgcaaaaatgtgtgctatgaccactttttcccggtgtcccacatccggctgtgggccctccagctgatcttcgtctccaccccagcgctgctggtggccatgcatgtggcctactacaggcacgaaaccactcgcaagttcaggcgaggagagaagaggaatgatttcaaagacatagaggacattaaaaagcagaaggttcggatagaggggtcgctgtggtggacgtacaccagcagcatctttttccgaatcatctttgaagcagcctttatgtatgtgttttacttcctttacaatgggtaccacctgccctgggtgttgaaatgtgggattgacccctgccccaaccttgttgactgctttatttctaggccaacagagaagaccgtgtttaccatttttatgatttctgcgtctgtgatttgcatgctgcttaacgtggcagagttgtgctacctgctgctgaaagtgtgttttaggagatcaaagagagcacagacgcaaaaaaatcaccccaatcatgccctaaaggagagtaagcagaatgaaatgaatgagctgatttcagatagtggtcaaaatgcaatcacaggtttcccaagctaaacatttcaaggtaaaatgtagctgcgtcataaggagacttctgtcttctccagaaggcaataccaacctgaaagttccttctgtagcctgaagagtttgtaaatgactttcataataaatagacacttgagttaactttttgtaggatacttgctccattcatacacaacgtaatcaaatatgtggtccatctctgaaaacaagagactgcttgacaaaggagcattgcagtcactttgacaggttccttttaagtggactctctgacaaagtgggtactttctgaaaatttatataactgttgttgataaggaacatttatccaggaattgatacgtttattaggaaaagatatttttataggcttggatgtttttagttctgactttgaatttatataaagtatttttataatgactggtcttccttacctggaaaaacatgcgatgttagttttagaattacaccacaagtatctaaatttggaacttacaaagggtctatcttgtaaatattgttttgcattgtctgttggcaaatttgtgaactgtcatgatacgcttaaggtggaaagtgttcattgcacaatatatttttactgctttctgaatgtagacggaacagtgtggaagcagaaggcttttttaactcatccgtttgccaatcattgcaaacaactgaaatgtggatgtgattgcctcaataaagctcgtccccattgctt

SEQ ID NO: 41950 - DNA, 2131 bp, Artificial Sequence
  derived and/or modified sequence
ccgcagcccgcccgagccgcgtcagggcagaggcggggtggggcgcggttaaaaggcgcagcaggtgggagccggggccttcacccgaaacccgacgagagcccgacagccggcggcgcccgagcccgacctgcctgcccagccggagcgaagggcgccgccccgcgcagagcccgcgccagggccgccggccgcagagcagttaaaacgtgcaggcaccagaaggcacttcctgtcggtgaagaagacctgtctccggtgtcacgggcatcctgtgttttgcaaacggggctgacctcccttcctggggagcaggaagggtcagggaaggaaaagaagtacagaagatctggctaaacaatttctgtatggcgaaagaaaaattctaacttgtacgccctcttcatgcatctttaattcaatttgaatattccaggcgacatcctcactgaccgagcaaagattgacattcgtatcatcactgtgcaccattggcttctaggcactccagtggggtaggagaaggaggtctgaaaccctcgcagagggatcttgccctcattctttgggtctgaaacactggcagtcgttggaaacaggactcagggataaaccagcgcaatggattgggggacgctgcacactttcatcgggggtgtcaacaaacactccaccagcatcgggaaggtgtggatcacagtcatctttattttccgagtcatgatcctcgtggtggctgcccaggaagtgtggggtgacgagcaagaggacttcgtctgcaacacactgcaaccgggatgcaaaaatgtgtgctatgaccactttttcccggtgtcccacatccggctgtgggccctccagctgatcttcgtctccaccccagcgctgctggtggccatgcatgtggcctactacaggcacgaaaccactcgcaagttcaggcgaggagagaagaggaatgatttcaaagacatagaggacattaaaaagcagaaggttcggatagaggggtcgctgtggtggacgtacaccagcagcatctttttccgaatcatctttgaagcagcctttatgtatgtgttttacttcctttacaatgggtaccacctgccctgggtgttgaaatgtgggattgacccctgccccaaccttgttgactgctttatttctaggccaacagagaagaccgtgtttaccatttttatgatttctgcgtctgtgatttgcatgctgcttaacgtggcagagttgtgctacctgctgctgaaagtgtgttttaggagatcaaagagagcacagacgcaaaaaaatcaccccaatcatgccctaaaggagagtaagcagaatgaaatgaatgagctgatttcagatagtggtcaaaatgcaatcacaggtttcccaagctaaacatttcaaggtaaaatgtagctgcgtcataaggagacttctgtcttctccagaaggcaataccaacctgaaagttccttctgtagcctgaagagtttgtaaatgactttcataataaatagacacttgagttaactttttgtaggatacttgctccattcatacacaacgtaatcaaatatgtggtccatctctgaaaacaagagactgcttgacaaaggagcattgcagtcactttgacaggttccttttaagtggactctctgacaaagtgggtactttctgaaaatttatataactgttgttgataaggaacatttatccaggaattgatacgtttattaggaaaagatatttttataggcttggatgtttttagttctgactttgaatttatataaagtatttttataatgactggtcttccttacctggaaaaacatgcgatgttagttttagaattacaccacaagtatctaaatttggaacttacaaagggtctatcttgtaaatattgttttgcattgtctgttggcaaatttgtgaactgtcatgatacgcttaaggtggaaagtgttcattgcacaatatatttttactgctttctgaatgtagacggaacagtgtggaagcagaaggcttttttaactcatccgtttgccaatcattgcaaacaactgaaatgtggatgtgattgcctcaataaagctcgtccccattgctt

SEQ ID NO: 41951 - DNA, 1805 bp, Artificial Sequence
  derived and/or modified sequence
cgacgagagcccgacagccggcggcgcccgagcccgacctgcctgcccagccggagcgaagggcgccgccccgcgcagagcccgcgccagggccgccggccgcagagcaggcgacatcctcactgaccgagcaaagattgacattcgtatcatcactgtgcaccattggcttctaggcactccagtggggtaggagaaggaggtctgaaaccctcgcagagggatcttgccctcattctttgggtctgaaacactggcagtcgttggaaacaggactcagggataaaccagcgcaatggattgggggacgctgcacactttcatcgggggtgtcaacaaacactccaccagcatcgggaaggtgtggatcacagtcatctttattttccgagtcatgatcctcgtggtggctgcccaggaagtgtggggtgacgagcaagaggacttcgtctgcaacacactgcaaccgggatgcaaaaatgtgtgctatgaccactttttcccggtgtcccacatccggctgtgggccctccagctgatcttcgtctccaccccagcgctgctggtggccatgcatgtggcctactacaggcacgaaaccactcgcaagttcaggcgaggagagaagaggaatgatttcaaagacatagaggacattaaaaagcagaaggttcggatagaggggtcgctgtggtggacgtacaccagcagcatctttttccgaatcatctttgaagcagcctttatgtatgtgttttacttcctttacaatgggtaccacctgccctgggtgttgaaatgtgggattgacccctgccccaaccttgttgactgctttatttctaggccaacagagaagaccgtgtttaccatttttatgatttctgcgtctgtgatttgcatgctgcttaacgtggcagagttgtgctacctgctgctgaaagtgtgttttaggagatcaaagagagcacagacgcaaaaaaatcaccccaatcatgccctaaaggagagtaagcagaatgaaatgaatgagctgatttcagatagtggtcaaaatgcaatcacaggtttcccaagctaaacatttcaaggtaaaatgtagctgcgtcataaggagacttctgtcttctccagaaggcaataccaacctgaaagttccttctgtagcctgaagagtttgtaaatgactttcataataaatagacacttgagttaactttttgtaggatacttgctccattcatacacaacgtaatcaaatatgtggtccatctctgaaaacaagagactgcttgacaaaggagcattgcagtcactttgacaggttccttttaagtggactctctgacaaagtgggtactttctgaaaatttatataactgttgttgataaggaacatttatccaggaattgatacgtttattaggaaaagatatttttataggcttggatgtttttagttctgactttgaatttatataaagtatttttataatgactggtcttccttacctggaaaaacatgcgatgttagttttagaattacaccacaagtatctaaatttggaacttacaaagggtctatcttgtaaatattgttttgcattgtctgttggcaaatttgtgaactgtcatgatacgcttaaggtggaaagtgttcattgcacaatatatttttactgctttctgaatgtagacggaacagtgtggaagcagaaggcttttttaactcatccgtttgccaatcattgcaaacaactgaaatgtggatgtgattgcctcaataaagctcgtccccattgctt

SEQ ID NO: 41952 - DNA, 1927 bp, Artificial Sequence
  derived and/or modified sequence
acgagagcccgacagccggcggcgcccgagcccgacctgcctgcccagccggagcgaagggcgccgccccgcgcagagcccgcgccagggccgccggccgcagagcagttaaaacgtgcaggcaccagaaggcacttcctgtcggtgaagaagacctgtctccggtgtcacgggcatcctgtgttttgcaaacggggctgacctcccttcctggggagcaggaagggtcagggcgacatcctcactgaccgagcaaagattgacattcgtatcatcactgtgcaccattggcttctaggcactccagtggggtaggagaaggaggtctgaaaccctcgcagagggatcttgccctcattctttgggtctgaaacactggcagtcgttggaaacaggactcagggataaaccagcgcaatggattgggggacgctgcacactttcatcgggggtgtcaacaaacactccaccagcatcgggaaggtgtggatcacagtcatctttattttccgagtcatgatcctcgtggtggctgcccaggaagtgtggggtgacgagcaagaggacttcgtctgcaacacactgcaaccgggatgcaaaaatgtgtgctatgaccactttttcccggtgtcccacatccggctgtgggccctccagctgatcttcgtctccaccccagcgctgctggtggccatgcatgtggcctactacaggcacgaaaccactcgcaagttcaggcgaggagagaagaggaatgatttcaaagacatagaggacattaaaaagcagaaggttcggatagaggggtcgctgtggtggacgtacaccagcagcatctttttccgaatcatctttgaagcagcctttatgtatgtgttttacttcctttacaatgggtaccacctgccctgggtgttgaaatgtgggattgacccctgccccaaccttgttgactgctttatttctaggccaacagagaagaccgtgtttaccatttttatgatttctgcgtctgtgatttgcatgctgcttaacgtggcagagttgtgctacctgctgctgaaagtgtgttttaggagatcaaagagagcacagacgcaaaaaaatcaccccaatcatgccctaaaggagagtaagcagaatgaaatgaatgagctgatttcagatagtggtcaaaatgcaatcacaggtttcccaagctaaacatttcaaggtaaaatgtagctgcgtcataaggagacttctgtcttctccagaaggcaataccaacctgaaagttccttctgtagcctgaagagtttgtaaatgactttcataataaatagacacttgagttaactttttgtaggatacttgctccattcatacacaacgtaatcaaatatgtggtccatctctgaaaacaagagactgcttgacaaaggagcattgcagtcactttgacaggttccttttaagtggactctctgacaaagtgggtactttctgaaaatttatataactgttgttgataaggaacatttatccaggaattgatacgtttattaggaaaagatatttttataggcttggatgtttttagttctgactttgaatttatataaagtatttttataatgactggtcttccttacctggaaaaacatgcgatgttagttttagaattacaccacaagtatctaaatttggaacttacaaagggtctatcttgtaaatattgttttgcattgtctgttggcaaatttgtgaactgtcatgatacgcttaaggtggaaagtgttcattgcacaatatatttttactgctttctgaatgtagacggaacagtgtggaagcagaaggcttttttaactcatccgtttgccaatcattgcaaacaactgaaatgtggatgtgattgcctcaataaagctcgtccccattgctt

SEQ ID NO: 41953 - DNA, 786 bp, Artificial Sequence
  derived and/or modified sequence
atggactggggcaccctgcacaccttcatcggcggcgtgaacaagcacagcaccagcatcggcaaggtgtggatcaccgtcatcttcatcttccgggtgatgatcctggtggtggccgcccaggaggtgtggggagatgagcaggaggactttgtgtgcaacaccctgcagcccggctgcaagaatgtgtgctatgaccacttcttccctgtgagccacatccggctgtgggccctgcagctgatctttgtgtccaccccagccctgctggtggccatgcacgtggcctactacagacatgagaccaccaggaagttcagaagaggagagaagagaaatgacttcaaggacatcgaggacatcaagaagcagaaggtgcgcatcgagggcagcctgtggtggacctacaccagcagcatcttcttccgcatcatctttgaggccgccttcatgtatgtgttctacttcctgtacaacggctaccacctgccctgggtgctgaagtgtggcatcgacccctgccccaacctggtggactgcttcatcagccggcccacagagaagacagtgttcaccatcttcatgatcagcgccagcgtcatctgcatgctgctgaatgtggccgagctgtgctacctgctgctgaaggtgtgcttccgccgcagcaagagggcccagacccagaagaaccaccccaaccacgccctgaaggagagcaagcagaatgagatgaatgaactcatcagtgacagcggccagaatgccatcaccggcttccccagctag

SEQ ID NO: 41954 - DNA, 786 bp, Artificial Sequence
  derived and/or modified sequence
atggactggggcaccctgcacaccttcatcggcggcgtgaacaagcatagcacctctatcgggaaggtgtggattaccgtaatatttatcttcagggttatgatcttagtggtggctgcccaggaagtatggggagatgaacaggaggactttgtctgtaatacccttcagcctggatgtaaaaatgtttgttacgaccacttcttcccggtgagtcacattcgtctctgggccctccagctgatcttcgtctctacgcccgctctcctcgtggctatgcacgttgcctactaccgccatgagactactcgaaagtttcgaaggggggagaagcgcaacgactttaaagacatcgaggatatcaagaagcaaaaagttaggatagagggctctttgtggtggacatatacgtccagcatattctttagaattatcttcgaggccgcattcatgtacgtcttttacttcctgtacaacggctaccacttaccatgggttctgaaatgcggaatcgatccctgccccaatttggtggattgttttatctctcgccctaccgagaagactgtgtttactatattcatgatctcagctagtgtgatctgcatgctcctcaacgtcgccgagctgtgctatctgttactaaaagtttgctttagacggtcaaaacgagctcagacccagaagaatcacccgaaccacgccctgaaggaaagcaaacaaaacgagatgaatgaactgatctcagactcaggacaaaacgctatcactggcttcccctcatag

SEQ ID NO: 41955 - DNA, 786 bp, Artificial Sequence
  derived and/or modified sequence
atggactggggcaccctgcacaccttcatcggcggcgtgaacaagcattctacatcaatcggaaaggtttggattaccgtcatcttcatttttagagtgatgattttggttgtggccgctcaggaggtctggggcgacgagcaggaggactttgtctgtaacaccctccagccaggttgtaagaacgtgtgttacgaccatttcttcccggtctctcatatacgactgtgggctctgcagctgatcttcgtgtccacccccgccctcctggttgctatgcatgtggcctattataggcacgagactacacgcaagtttcgacggggggagaaaaggaacgactttaaggacattgaggacatcaaaaagcagaaggtgaggatcgagggctcattgtggtggacatatacgtcatccatctttttccgtatcatcttcgaggccgcctttatgtatgtcttttacttcctgtacaatggatatcacttgccgtgggtgttaaagtgtggaatcgacccctgccccaatcttgtcgactgtttcatctcaagacccaccgaaaagacagtgtttacgatatttatgatctccgcatccgttatctgcatgcttctgaacgtggccgagctgtgttatctgttactaaaagtgtgctttcgcagaagtaagcgcgcccagacacagaaaaaccatccaaatcacgccttgaaagagagtaaacagaatgagatgaacgagttgatcagtgacagcggccagaacgccattactggtttcccctcctag

SEQ ID NO: 41956 - DNA, 786 bp, Artificial Sequence
  derived and/or modified sequence
atggactggggcaccctgcacaccttcatcggcggcgtgaacaagcatagtactagcatcggaaaagtctggatcacagtgatcttcatcttccgtgtgatgattttggtggtggcagcacaagaagtgtggggcgatgagcaggaagattttgtgtgcaacacactgcagcctggatgtaagaacgtttgttatgatcactttttccccgtgtcacacattcgcctttgggccttgcagttaatcttcgtgtctaccccagcactactggttgctatgcatgtggcctattaccgccatgaaaccacacgaaagtttaggcgcggggagaagaggaacgactttaaggacattgaggatataaagaaacaaaaggttcggattgaaggatcactctggtggacctacacctccagcatcttttttaggatcattttcgaggctgccttcatgtatgtgttttattttctctataatggttatcaccttccttgggtgctgaaatgtggaatcgacccctgtcctaatttggtcgactgctttattagcagaccgacagagaagactgtgttcacgatatttatgatctcagcttccgttatttgcatgctactgaacgttgccgagctatgttacttgctgttaaaagtttgctttaggagaagtaaacgtgcccagacccagaagaatcaccctaaccacgctttgaaggagagtaaacaaaatgaaatgaacgagttaattagtgacagcggtcagaacgctattacaggcttcccaagttag

SEQ ID NO: 41957 - DNA, 786 bp, Artificial Sequence
  derived and/or modified sequence
atggactggggcaccctgcacaccttcatcggcggcgtgaacaagcacagcacgtctatcgggaaagtctggattacagtaattttcatctttcgagtgatgatacttgtcgttgcagctcaagaggtgtggggggacgagcaagaagactttgtgtgcaatacactgcaaccaggatgcaagaacgtgtgttacgaccacttttttcctgtgtcccacattcgcctctgggcgcttcagctgatatttgtgtcaacccccgcgcttctcgttgccatgcacgtggcctactaccgtcacgaaaccacccgaaaattcagaaggggcgagaagaggaacgattttaaggatattgaggacatcaagaaacaaaaggtgcgtattgaaggatctctgtggtggacatatacatcgagtatattctttcggatcatttttgaggccgcctttatgtacgtgttctacttcctgtacaacggttatcatcttccatgggtgctgaaatgcggaattgatccttgtccgaatctggtcgattgcttcattagcagaccaacagagaagacagtgttcacaatcttcatgattagtgcctctgtcatctgcatgctcctaaatgtggccgagctctgttatttactgcttaaagtttgctttagaaggtctaaacgagcccagacacagaaaaaccatcccaaccacgccctcaaggagtccaagcaaaatgagatgaacgaactgatttctgactccggacaaaacgccataacaggttttccatcctag

SEQ ID NO: 41958 - DNA, 786 bp, Artificial Sequence
  derived and/or modified sequence
atggattggggaacgctgcataccttcatcgggggtgtgaataaacatagcacatcaatcggtaaggtttggattacagtcatatttatttttcgcgttatgattctggtcgttgccgctcaggaagtgtggggggatgaacaggaggatttcgtgtgcaatactcttcagccaggctgcaaaaatgtgtgctacgaccactttttccccgtgagtcatatccgactttgggccctgcagctgatcttcgtctccacacctgctcttttggtggctatgcacgtcgcatactatcgccatgagaccacacggaaattccgaaggggagaaaagagaaatgatttcaaagatatcgaggacatcaagaaacagaaggttcgcattgaggggtctctgtggtggacgtatacgtcttccatttttttcaggatcatttttgaggccgctttcatgtacgtattttacttcctgtacaacggctatcatctgccctgggtactcaaatgtggtatcgatccttgtccaaatctggtcgactgcttcatctctagaccaactgaaaaaactgtgttcacaatcttcatgatcagcgccagcgtaatctgtatgctgttgaatgtggccgaactgtgttatctgttgctgaaggtttgtttcagacgcagtaaaagggcccagactcaaaaaaaccaccctaaccatgccctgaaggagagcaagcaaaacgaaatgaatgaactcattagcgactcaggacagaatgctatcaccggattccccagctag

SEQ ID NO: 41959 - DNA, 786 bp, Artificial Sequence
  derived and/or modified sequence
atggattggggaaccttgcacacattcatcggaggggtgaacaagcatagtacgtctataggtaaggtttggattaccgtgatcttcattttccgcgtaatgatcctcgttgtcgccgcacaggaggtgtggggcgacgaacaggaggatttcgtgtgtaacacattacagcccggatgcaagaacgtctgctatgaccactttttccctgtttcgcacataagactgtgggcgctccagttgatcttcgtgagcactcctgcactgctcgtggccatgcacgtggcgtactaccgtcatgagacgacaaggaagttcaggagaggcgaaaagaggaatgacttcaaagacatcgaagacatcaaaaagcagaaagtgagaatcgagggttcgctgtggtggacttacacaagctcaatttttttcagaattatctttgaggctgctttcatgtacgtattctatttcctgtacaatggctaccacctcccttgggtgttgaaatgtggtattgatccatgtccaaacctggtggactgcttcattagtcgtcccaccgaaaagactgtttttacaatttttatgatctccgcatctgtgatttgcatgctgctgaatgtggccgagttgtgctatttattgctcaaagtgtgttttaggaggagcaaacgcgcacagacacaaaaaaaccatccgaatcatgctttgaaggaatccaaacagaatgagatgaacgaattaatttctgattcaggccagaacgctatcactggattcccatcatag

SEQ ID NO: 41960 - DNA, 786 bp, Artificial Sequence
  derived and/or modified sequence
atggattgggggaccctgcacacctttatcgggggagtgaataaacatagtactagcatcggaaaggtgtggatcaccgtcatcttcatttttcgggttatgattctggtcgttgcagctcaagaagtatggggcgatgaacaggaggattttgtgtgtaatacgctgcagcccggttgtaagaacgtgtgctatgaccactttttccccgtttcacacatccggttgtgggctctgcagctgatctttgtctccacgcccgctctgttagttgccatgcacgtggcttactatcggcacgagaccacgcgcaaattccgtcgaggggagaaaaggaatgatttcaaggatattgaggacattaagaaacagaaagtgcggatcgagggatccctgtggtggacctacacttccagcatctttttcagaattatttttgaagcagcattcatgtacgtgttctattttctgtacaacggatatcatctcccctgggtgctcaaatgcgggatcgatccctgcccgaatctggtggactgtttcatcagccgtccaactgagaaaaccgtgttcaccatcttcatgattagcgcctcggtgatctgtatgctactgaacgtagcagagctgtgttatctgttgttaaaggtttgctttcggcgatctaaacgagctcagacccagaagaatcatcccaaccacgctctgaaagaatctaaacaaaatgaaatgaacgaactgataagtgactccggccagaacgctattacgggattcccttcgtag

SEQ ID NO: 41961 - DNA, 786 bp, Artificial Sequence
  derived and/or modified sequence
atggattgggggacactccatacctttataggcggtgtcaataaacacagtactagcatcggtaaggtctggattaccgtgatttttattttcagggttatgattttagtggtcgctgcccaagaagtctggggcgacgagcaagaagattttgtttgcaacaccctccagccaggctgtaagaacgtgtgctacgaccacttcttcccagttagccacatccggctctgggcacttcagctgatatttgtgtctactccggctctgttggttgcaatgcacgtcgcctattacagacacgagactactcgcaagttccggagaggcgagaagaggaacgatttcaaggacattgaggacatcaagaagcagaaggtccggattgagggatccctgtggtggacgtatacgtcctctatcttctttcggatcattttcgaggctgcgttcatgtacgtgttctattttctgtataatggctaccacctcccctgggtgctgaagtgcggtatcgatccttgtcctaatctggtggactgctttataagccggcctacggagaagaccgtctttacaatattcatgatctctgcttccgtaatatgcatgctgcttaatgtggcagagctctgctacttactgcttaaagtctgttttaggcgatctaaaagagcccagacccaaaagaaccacccaaatcatgcactgaaggagtcgaagcagaacgaaatgaatgagctgatcagcgattctggccagaacgcaattacgggatttccttcttag

SEQ ID NO: 41962 - DNA, 786 bp, Artificial Sequence
  derived and/or modified sequence
atggactggggcaccctgcacaccttcatcggcggcgtgaacaagcacagcaccagcatcggcaaggtgtggatcaccgtgatcttcatcttcagagtgatgatcctggtggtggccgcccaggaggtgtggggcgacgagcaggaggacttcgtgtgcaacaccctgcagcccggctgcaagaacgtgtgctacgaccacttcttccccgtgagccacatcagactgtgggccctgcagctgatcttcgtgagcacccccgccctgctggtggccatgcacgtggcctactacagacacgagaccaccagaaagttcagaagaggcgagaagagaaacgacttcaaggacatcgaggacatcaagaagcagaaggtgagaatcgagggcagcctgtggtggacctacaccagcagcatcttcttcagaatcatcttcgaggccgccttcatgtacgtgttctacttcctgtacaacggctaccacctgccctgggtgctgaagtgcggcatcgacccctgccccaacctggtggactgcttcatcagcagacccaccgagaagaccgtgttcaccatcttcatgatcagcgccagcgtgatctgcatgctgctgaacgtggccgagctgtgctacctgctgctgaaggtgtgcttcagaagaagcaagagagcccagacccagaagaaccaccccaaccacgccctgaaggagagcaagcagaacgagatgaacgagctgatcagcgacagcggccagaacgccatcaccggcttccccagctag

SEQ ID NO: 41963 - DNA, 618 bp, Artificial Sequence
  derived and/or modified sequence
atgatgcggaccctgatcaccacccaccccctgcccctgctgctgctgccacagcagctgttgcaactcgtgcagtttcaggaggtggacacggactttgatttccctgaagaggataagaaagaggagtttgaggagtgtctggaaaagtttttctctactgggccggccaggccaccaacgaaggaaaaagtgaagcggcgtgttctgattgaacccggcatgccgctgaaccatattgagtattgtaatcacgaaatcatgggtaagaacgtctattacaagcaccggtgggttgcagagcactactttctcctgatgcagtacgatgaattgcaaaagatttgttataatagattcgttccatgcaaaaacggaatccgcaagtgcaatcggtccaagggcctggtggagggcgtgtattgcaacctcacggaagctttcgaaatcccggcatgtaagtatgaaagcctctacaggaaaggctatgtgctcatcacgtgctcctggcagaatgagatgcagaaacggatcccccacacaatcaacgacctagtcgagccccctgaacatcgctctttcctctctgaagacggtgtctttgtgatctctccatag

SEQ ID NO: 41964 - DNA, 618 bp, Artificial Sequence
  derived and/or modified sequence
atgatgcggaccctgatcaccacccaccccctgcccctgctgctgctcccacaacagttgctgcagctggtgcagtttcaggaggttgataccgacttcgattttccagaggaggataaaaaagaggaatttgaggaatgcctagagaaatttttcagtaccggaccagcaagacctcctacaaaagagaaagtgaaaagacgtgtcctgattgaacccggcatgccattaaatcatattgagtattgtaaccatgaaattatgggaaaaaatgtctactataagcaccggtgggtcgctgagcactacttcctgttaatgcaatatgacgagctgcagaaaatttgctacaatcgcttcgtgccctgcaagaacgggatccggaagtgtaaccggagtaaggggctcgtggaaggcgtgtactgcaacctcaccgaagcgttcgagatccctgcatgcaaatatgaaagtctgtataggaaaggctacgtgctgataacctgcagttggcaaaatgagatgcagaaacggatccctcacacgatcaacgatctggtcgagccaccagaacatcgaagctttttgtcagaagacggcgtattcgttatctcgccctag

SEQ ID NO: 41965 - DNA, 618 bp, Artificial Sequence
  derived and/or modified sequence
atgatgcggaccctgatcaccacccaccccctgcccctgctgctgctgccccagcaactgttacagctcgtccaattccaggaagtggatacagatttcgattttcccgaggaagataaaaaggaagagtttgaagagtgcctggaaaaattcttctcgactggccctgctcgcccccctaccaaggagaaggttaagcgcagagtcttaatcgaaccgggaatgcctctgaatcacatcgaatactgtaaccatgaaattatgggaaaaaacgtctactacaaacatagatgggtcgcggaacattattttctgctaatgcaatatgacgagctgcagaaaatctgctataatcggttcgtcccctgtaaaaatgggatccgaaaatgtaaccggtccaagggcctggtagagggagtgtattgcaacttaactgaggcgttcgaaatcccagcgtgcaaatacgaatctctgtaccgaaagggatatgtgctgattacctgtagctggcagaatgaaatgcagaaacggattccgcatacaatcaacgatcttgttgagcctcccgaacacagatctttcctgagcgaagacggagtgttcgttatcagcccctag

SEQ ID NO: 41966 - DNA, 618 bp, Artificial Sequence
  derived and/or modified sequence
atgatgcggaccctgatcaccacccaccccctgcccctgctgctgttgccccagcagctgctacaactcgtgcaattccaggaggtcgacacagatttcgacttccccgaggaggataagaaggaggaattcgaagagtgcctggaaaagtttttctccactggaccagctaggccccctactaaagagaaagtgaaacgccgagtcttgattgagcctgggatgcctctgaatcacatcgagtattgtaaccatgagatcatgggcaagaacgtttattacaaacatcggtgggtcgctgaacattattttttactgatgcagtatgacgagttgcagaagatctgctataaccgttttgtcccttgtaaaaatggcatccggaagtgtaatcgtagcaagggcctcgtggaaggtgtctactgtaatctgacagaggcctttgagatccccgcctgtaaatatgaatccctttataggaaaggatacgttctgataacatgcagttggcaaaatgaaatgcagaaaaggataccacatactattaacgaccttgttgagccacctgagcacaggagctttctatctgaagatggagtttttgtgatctctccatag

SEQ ID NO: 41967 - DNA, 618 bp, Artificial Sequence
  derived and/or modified sequence
atgatgagaaccttaatcactactcacccactccctttgctactgctcccacagcagctcctgcaactagtgcagtttcaagaggtcgacacagactttgactttcccgaggaggataaaaaagaggaatttgaggagtgcctggagaagttcttctcgacaggcccagccaggcctccaaccaaggagaaagtaaagagacgtgtcctcatcgagccagggatgccactgaatcacattgaatactgcaatcacgagataatgggtaagaacgtgtattataagcaccgatgggttgctgagcactactttctgctgatgcagtacgacgaattgcaaaagatttgttataatcggtttgtcccgtgcaagaatgggattcggaagtgcaaccgtagtaaggggctggtagagggggtgtactgcaacctaactgaggcattcgaaatccccgcttgcaagtacgagtctctgtaccgtaagggatacgttctgattacttgttcctggcagaacgaaatgcagaagcgtatcccccacactatcaacgatctcgtcgagcctcccgagcaccgctcattccttagcgaggacggggtgttcgtcatctccccctag

SEQ ID NO: 41968 - DNA, 618 bp, Artificial Sequence
  derived and/or modified sequence
atgatgcgcactctgatcacaacccaccccctgcctctcctcctgctcccccagcaactgctgcagctggtgcaattccaggaagtggatacggatttcgactttcctgaagaggacaaaaaagaagaattcgaggaatgtctcgagaaatttttttccacaggcccagcacgtccaccaactaaagaaaaagtaaagcggagggttctgattgaacctggtatgcctttaaatcacatcgagtactgcaaccatgagattatgggaaaaaacgtgtactacaaacatcgctgggtggcagagcattattttctgcttatgcagtatgacgagctacaaaagatctgttataaccggttcgtcccctgtaagaacggaattcgcaagtgcaaccgcagtaagggcctcgtcgagggtgtttattgtaatctgactgaggcattcgagattcccgcatgtaaatacgagtctctctatcgcaaaggctacgtgctcatcacttgctcatggcagaacgagatgcaaaaaaggatcccacatacaattaatgacctggtggagcctccggagcaccggtcctttctctccgaagacggggtatttgtgattagcccatag

SEQ ID NO: 41969 - DNA, 618 bp, Artificial Sequence
  derived and/or modified sequence
atgatgagaacacttatcacgacacacccacttcccctgttacttctcccacagcagctgcttcagctggtgcaattccaggaagtcgataccgattttgatttccccgaggaggataaaaaggaggaatttgaggaatgcctcgagaagttcttctcgacaggcccagcgagacctcccacgaaagagaaggttaaacgacgggtgttgatagaacccggaatgcctctgaatcacatcgagtattgcaaccacgagatcatgggcaagaacgtgtattacaagcatcgctgggtggcggaacactatttcctcctgatgcagtatgacgaactgcagaaaatttgctataaccgtttcgtgccctgtaaaaatgggattcgcaagtgtaaccgctccaaaggtctggtagaaggggtatactgtaatctgacagaggctttcgagatcccggcatgtaagtatgagtcattatacaggaaagggtacgtgcttataacatgcagctggcaaaacgaaatgcagaagcggattccacacacaattaacgatcttgtggaaccgcctgagcatagatcttttctgagcgaggacggagtcttcgttatctcgccttag

SEQ ID NO: 41970 - DNA, 618 bp, Artificial Sequence
  derived and/or modified sequence
atgatgcgtactctgataaccacacatcctctcccactgctccttctcccccagcagttgcttcagttggtacagtttcaggaggtggatacagactttgacttcccggaagaggacaagaaggaggagtttgaagagtgtctggaaaagttcttcagcacgggacctgcaagaccgcctactaaggagaaggttaaacgtagggtcctgattgagcccggtatgccgctaaatcacatcgaatattgcaaccacgagataatgggaaagaacgtgtactacaagcaccggtgggtggcggagcattattttctactcatgcaatacgatgaattacagaagatctgttataacagatttgtgccctgtaagaatggcatccggaagtgtaatcgtagcaagggcctcgtcgaaggggtttattgtaacctgacggaagccttcgagataccagcctgtaaatatgagtccctttataggaaggggtacgtacttataacctgtagttggcagaacgagatgcagaagcgcattccccatacaatcaatgaccttgtcgagccccctgagcatcgaagctttctttccgaagacggtgttttcgtcatctccccatag

SEQ ID NO: 41971 - DNA, 618 bp, Artificial Sequence
  derived and/or modified sequence
atgatgagaacactgataacaacccaccccctgccgctgctgctcttacctcagcagctactgcagttggttcagttccaggaggtggacaccgactttgacttccctgaggaagataaaaaggaagaattcgaggaatgtttggagaaatttttttccaccggaccagcaaggcctcccacaaaggagaaggtcaagcgccgagtgctgatagagccaggtatgcctttaaaccacatcgagtactgcaatcacgaaatcatgggcaaaaatgtttactacaagcaccgctgggtcgcagagcattattttttgctgatgcagtatgacgagcttcagaaaatttgctataatagatttgtgccttgcaagaacggtattcgaaagtgcaaccgctcaaagggcctggtggaaggggtctattgtaatctgacggaggccttcgagatccctgcatgcaaatacgaatccctgtatcgcaaaggctatgtgctgatcacatgctcctggcagaatgaaatgcaaaagaggatccctcacacaataaatgacctcgtggagccacccgagcatagaagcttcctgtcagaagacggagtgttcgttatctccccatag

SEQ ID NO: 41972 - DNA, 618 bp, Artificial Sequence
  derived and/or modified sequence
atgatgcgaactcttatcacgacgcatcccttgcccctgctgctgctcccccagcagttgcttcagctggttcagttccaggaggtggataccgacttcgacttccctgaagaggataaaaaggaggaatttgaagagtgcctggagaaatttttctcgacagggccagctcgccctccaaccaaggagaaggtaaagaggcgggtgctcatcgaaccgggtatgcccctgaaccatatagagtattgcaatcacgagatcatgggcaaaaatgtttactacaaacaccggtgggtggccgaacactattttctcctgatgcagtacgatgaactgcagaagatctgttataatcggtttgttccctgtaaaaacggtatacggaaatgtaaccggagcaaaggactcgtggagggcgtgtattgtaacttgacggaggcttttgagatccctgcatgcaagtacgaatccctgtatcggaaggggtacgtgcttatcacctgctcatggcaaaacgaaatgcagaaaagaattcctcatacaatcaacgacctggtcgagcctccggagcacaggtctttcctgtcggaggacggggtttttgtgatatcaccatag

SEQ ID NO: 41973 - DNA, 618 bp, Artificial Sequence
  derived and/or modified sequence
atgatgcgaaccctgatcaccacacacccacttcctctccttctactcccacagcagctcctgcagcttgtgcagtttcaggaggtcgacaccgacttcgattttcctgaggaggataagaaagaagaattcgaggaatgcctggagaaattctttagcaccgggcccgctaggccacctactaaagagaaggtcaagaggagagttttgattgaacctggaatgccactgaaccacattgaatactgtaatcacgaaatcatgggtaagaatgtatattacaaacatcgttgggtggccgagcactatttcttactgatgcaatacgacgaacttcagaagatttgttataatagattcgtcccttgtaaaaatggcattagaaagtgcaaccgttctaaagggcttgtcgagggcgtgtattgcaatttaactgaagcattcgagattcctgcttgcaagtacgaaagcctctataggaaaggatatgtgctgattacttgcagttggcagaatgagatgcagaaacgaatccctcacacaatcaacgatcttgtcgagcctccagagcaccgatccttcttgagtgaggatggtgtatttgtcatctccccatag

SEQ ID NO: 41974 - DNA, 618 bp, Artificial Sequence
  derived and/or modified sequence
atgatgcgtacgcttattacaacgcatcccctgccattgctcttactaccgcaacagctgttgcagctggtacagttccaagaagtggatacagacttcgacttccccgaagaagataagaaggaagagtttgaggaatgcctggagaagttctttagcacaggccctgcacgaccaccgactaaagaaaaagttaagcgtagggtgcttattgagccgggtatgcctctaaatcatatcgagtactgcaatcacgaaataatgggaaaaaatgtgtattataaacacagatgggtcgctgaacactactttctcctcatgcaatacgatgagcttcagaaaatctgttacaacagatttgtgccctgtaagaacgggattcgaaagtgtaatcgctcaaagggtctagtagaaggagtgtattgtaatttgaccgaagccttcgaaatccctgcttgcaaatatgaatccctgtatcgcaaggggtacgtgctgataacctgcagttggcagaacgaaatgcaaaaacggattcctcataccataaacgatctcgtggaaccccctgaacacagaagttttttgtccgaagatggcgtgttcgtgatctcgccatag

SEQ ID NO: 41975 - DNA, 618 bp, Artificial Sequence
  derived and/or modified sequence
atgatgcgaactctaattacaacccaccctttgccattgttgctgctgccccagcaattgctgcaattggttcagtttcaggaggtggataccgactttgatttccctgaggaagacaaaaaagaggaattcgaggagtgcctggaaaagtttttcagtaccggtcccgcgagacccccaactaaggagaaagtgaaaagaagagtgctgatagaacccgggatgcccctaaatcacattgaatattgtaatcatgagattatgggcaagaatgtctattataaacatcgctgggtcgcagaacattacttcctgctgatgcaatacgatgaactgcagaaaatttgttacaatagattcgtgccatgtaagaacggcattcggaaatgtaacaggtccaagggacttgtcgagggcgtgtattgcaaccttaccgaagcctttgaaatcccggcttgcaagtacgaaagcttgtacaggaagggatacgtgctaataacatgtagctggcagaatgagatgcaaaaaaggataccccataccatcaacgatcttgtggaaccccctgaacatcggtcttttctctctgaagacggtgtatttgtaatttccccctag

SEQ ID NO: 41976 - DNA, 618 bp, Artificial Sequence
  derived and/or modified sequence
atgatgcgcacccttattaccacccatcctcttcccctcttacttttaccacagcagctgctacagctagtgcaattccaagaggtcgacacggacttcgatttccccgaggaggacaagaaggaagaatttgaagagtgcttggagaaattttttagcaccgggcctgcacgcccccctactaaagagaaagttaagagaagagttctgatcgaacccggtatgcccttgaatcatattgaatactgtaatcacgagattatggggaagaacgtatactataagcacagatgggtagctgaacattatttcctactaatgcagtatgatgagttgcagaagatatgttacaacaggttcgtcccctgtaagaacggtatccgtaagtgcaaccgctcaaaggggctcgtggaaggagtctattgcaatctgacggaggcgtttgagattcccgcttgtaagtatgagtctctatacaggaaaggatacgtcctgatcacttgctcgtggcaaaacgaaatgcagaaacggatcccccacactatcaatgatctggttgagccacccgagcatcgaagttttctctcagaggacggagtttttgttatttcaccatag

SEQ ID NO: 41977 - DNA, 618 bp, Artificial Sequence
  derived and/or modified sequence
atgatgcgtaccttgattacgacacatcccctgccgctactcttgctgccacaacagctgttgcaactggttcagtttcaggaggtggataccgatttcgattttccggaagaagacaaaaaagaagaatttgaggagtgtcttgagaagttcttctcaaccgggcccgcccggccacccactaaggagaaagtaaagcgacgggtgctcattgagcctggaatgccactcaatcacatcgagtactgtaatcatgaaattatgggcaaaaatgtgtattacaagcatcgatgggttgccgaacactatttcttgttgatgcaatatgatgagttacaaaaaatctgctataataggttcgtaccttgtaaaaacggcataagaaagtgtaacagatccaagggactggtagaaggtgtgtattgtaatcttacagaggcctttgagattccagcttgcaagtatgagagtctgtacagaaaaggttacgtcttaatcacgtgctcctggcagaatgagatgcagaagcgaattcctcatacaattaatgatctggtcgaacctcccgagcatagatctttcctttctgaagatggtgtttttgtcatctccccttag

SEQ ID NO: 41978 - DNA, 618 bp, Artificial Sequence
  derived and/or modified sequence
atgatgagaacactcataacaacgcacccgctccccctcctcttgttacctcaacagctgttgcaactggtgcagttccaagaagtcgacaccgatttcgacttccctgaagaggataaaaaggaagaatttgaggagtgcctagaaaaattcttttcaacaggtcctgcccggccacccacaaaagaaaaggtaaaaaggcgcgtcctgatcgaacccggaatgcctctgaatcatattgagtattgcaaccacgagatcatgggaaagaatgtatattataaacatcgctgggtagctgagcattatttcctcctcatgcagtatgacgagcttcagaagatttgctacaaccgcttcgtaccttgtaaaaatggcattcgtaagtgtaaccgctccaagggcctggtcgagggcgtttattgcaaccttacagaagcttttgaaatcccggcttgtaaatatgaaagcttataccgcaaaggatatgtgctcattacctgttcatggcaaaatgagatgcaaaagagaatccctcatacaatcaatgacttggtggagcccccggaacaccggtccttcttgagtgaagacggggtgttcgtcatttctccatag

SEQ ID NO: 41979 - DNA, 618 bp, Artificial Sequence
  derived and/or modified sequence
atgatgagaactctgattaccactcacccacttcccctgctgctattacctcaacagttactgcagctcgtccagttccaggaagtggacactgattttgatttccctgaggaggacaaaaaagaggaattcgaagaatgtttagaaaagttcttttctaccggaccagcccgcccccccacaaaggaaaaggtgaagagaagggtattgatcgaaccggggatgccacttaatcacattgaatattgtaatcatgagatcatgggtaaaaacgtgtactataagcaccgctgggtcgccgaacattattttctgctcatgcagtatgacgaacttcagaagatctgttataacagatttgtcccatgtaagaatggtatcagaaagtgcaatcggagtaaagggctggtagagggcgtgtattgcaatcttaccgaggcatttgaaattcctgcttgtaagtatgagagcctgtataggaaaggatacgtcttaattacttgttcttggcagaacgaaatgcagaaacggattccccacaccatcaacgatttagtggaacctcctgagcacagatcatttttgagcgaagacggcgtgtttgtaatatcaccatag

SEQ ID NO: 41980 - DNA, 618 bp, Artificial Sequence
  derived and/or modified sequence
atgatgcggaccctaataactacgcaccccctaccattacttctcctcccccagcagttacttcagctagtgcagttccaagaagtagacaccgactttgatttccctgaggaggacaagaaagaagaatttgaagaatgcctggagaagtttttcagcaccggaccggcaagaccacccactaaagaaaaggtgaaaaggcgggtgctgatagagcctggcatgccactaaatcacatcgaatactgtaaccatgagattatgggaaaaaacgtgtattacaagcaccgctgggtagctgaacactacttcctgctgatgcaatatgacgaactccagaaaatttgctataatagatttgtgccatgcaagaacgggatcagaaaatgtaaccggagtaagggactggtggagggtgtgtactgcaatctgacagaagcgtttgagatacccgcatgtaaatatgagagcctgtaccgcaaaggatacgtgttgattacatgcagctggcaaaacgaaatgcagaagagaattccccatactatcaacgatctggtcgaaccacccgaacatcggagctttctgagcgaggatggcgtgttcgtaatttcaccatag

SEQ ID NO: 41981 - DNA, 618 bp, Artificial Sequence
  derived and/or modified sequence
atgatgcggaccctcattaccacacatccattacccttactcctgctcccacagcaactgctgcaactagtccagttccaggaggtagatacagacttcgacttcccagaggaagataaaaaggaggaatttgaagaatgtctagaaaagttcttttcgaccggccctgccagaccccctacaaaggagaaagtgaagcgaagggtattgatcgagccgggtatgcccctcaaccacattgaatattgcaaccacgagattatgggcaagaatgtgtactacaagcatagatgggttgccgaacattactttctccttatgcagtacgacgagctgcagaaaatttgttacaacagattcgtgccctgcaaaaatggtatccggaagtgcaaccgatctaagggacttgtggaaggcgtttactgtaacttgacagaggcgttcgaaatacccgcttgcaaatatgaaagcttgtatagaaagggttatgtattgattacatgttcttggcagaacgaaatgcagaagagaataccgcatactattaatgacctggttgagccccccgaacaccgctcgttcttgagtgaagatggcgtttttgtaatttcaccttag

SEQ ID NO: 41982 - DNA, 618 bp, Artificial Sequence
  derived and/or modified sequence
atgatgcgtacacttataaccacacaccctctgcctctactcctgttgccccaacaactgctccaactggtacagtttcaggaagttgacaccgatttcgattttcccgaggaagacaaaaaagaagagtttgaggaatgtttggagaagttcttttcgaccggccctgccaggccccccacaaaggagaaagtgaaacggagagtgctgatcgaacctggcatgccattgaaccacattgaatactgcaatcacgagattatgggtaagaacgtttactacaaacaccggtgggtagcagaacattatttcctactgatgcagtatgacgaactgcagaagatttgctacaatcgattcgtgccgtgtaagaatggtatcaggaagtgtaatagatccaaaggactagtagagggcgtgtactgcaatctcacagaagcctttgaaatccctgcatgcaagtatgaaagtctgtaccgaaaagggtacgtgttaattacatgttcgtggcagaacgaaatgcagaagaggatcccccataccataaatgacctagttgaacctccggagcatcgtagtttcctgagcgaagacggcgttttcgttatatctccctag

SEQ ID NO: 41983 - DNA, 618 bp, Artificial Sequence
  derived and/or modified sequence
atgatgcgaaccctgataaccacacacccgttgcccttgctgttgcttccacaacagctcctacagcttgtgcagttccaagaagtggatacggattttgattttccagaggaagataagaaggaagaattcgaggagtgtttggaaaaattcttctccaccggaccagccagaccacccactaaagaaaaagtcaaacgacgagtgctaatcgaacctggaatgccactgaatcatatcgagtactgcaaccacgagattatgggaaagaacgtgtattataagcatcgctgggtggccgaacactacttcttactgatgcaatacgacgagctgcagaagatttgttataatcgctttgtcccctgcaaaaatggaatacggaaatgcaacagatccaaaggattggttgagggggtttattgcaatctcacagaggccttcgagatcccagcatgtaaatacgaatcactgtatcggaagggctacgtactaattacctgcagttggcagaacgagatgcagaaaaggatacctcatactataaatgacctggtggaaccacctgaacacaggagttttctttccgaagacggcgtgttcgtcatctcaccctag

SEQ ID NO: 41984 - DNA, 618 bp, Artificial Sequence
  derived and/or modified sequence
atgatgaggacattaataactactcatccgctgccattactccttcttcctcagcagttgctccagctcgtacagttccaggaagtggatactgatttcgattttccagaagaagataagaaagaggaattcgaagaatgcttagagaaatttttttcaaccggtcctgcacgcccgcccaccaaagaaaaagtgaagcgcagggtgttgattgaacccggaatgccactgaaccacatagaatactgtaatcatgagattatggggaaaaatgtttactacaaacaccggtgggtcgcggaacattattttcttctcatgcagtacgatgaactccagaagatttgttataatcgttttgttccttgcaaaaatggtatccgtaagtgtaaccgcagtaaaggcttggtagaaggagtgtattgcaacctcaccgaagctttcgagatacccgcttgtaaatatgaaagtctctatagaaaaggttacgtcctgatcacctgttcatggcagaatgaaatgcaaaagcgtattcctcataccattaacgatctggttgaaccccctgagcatcggtccttcctctcagaagacggagtatttgtcattagtccatag

SEQ ID NO: 41985 - DNA, 618 bp, Artificial Sequence
  derived and/or modified sequence
atgatgagaaccctgatcaccacccaccccctgcccctgctgctgctgccccagcagctgctgcagctggtgcagttccaggaggtggacaccgacttcgacttccccgaggaggacaagaaggaggagttcgaggagtgcctggagaagttcttcagcaccggccccgccagaccccccaccaaggagaaggtgaagagaagagtgctgatcgagcccggcatgcccctgaaccacatcgagtactgcaaccacgagatcatgggcaagaacgtgtactacaagcacagatgggtggccgagcactacttcctgctgatgcagtacgacgagctgcagaagatctgctacaacagattcgtgccctgcaagaacggcatcagaaagtgcaacagaagcaagggcctggtggagggcgtgtactgcaacctgaccgaggccttcgagatccccgcctgcaagtacgagagcctgtacagaaagggctacgtgctgatcacctgcagctggcagaacgagatgcagaagagaatcccccacaccatcaacgacctggtggagccccccgagcacagaagcttcctgagcgaggacggcgtgttcgtgatcagcccctag

SEQ ID NO: 41986 - DNA, 618 bp, Artificial Sequence
  derived and/or modified sequence
atgatgcgaacgctgatcacaacccatcctctccccttgctgctcctgcctcagcagctcctgcagctcgtccagttccaggaagttgacacagactttgacttcccagaggaggataagaaggaagaatttgaagaatgtctggaaaagttcttctctactggtccagctaggcctccaaccaaagaaaaagtgaagagaagggttttgattgagccaggcatgcctctgaaccacatcgaatattgtaaccacgaaataatggggaagaatgtgtactataagcatcgctgggtagctgagcattatttcctgctgatgcagtatgatgagttacaaaaaatctgttataatagattcgtcccttgcaagaacgggattaggaagtgcaatagaagcaagggtctggtggaaggagtatactgcaatctgaccgaagcttttgaaatcccggcgtgtaagtatgagagtctgtacaggaagggatatgtgctgataacgtgctcctggcagaacgaaatgcagaaacgcataccccacaccattaacgacctcgtcgaacccccggaacaccgctcctttctcagtgaggatggggttttcgttataagtccgtag

SEQ ID NO: 41987 - DNA, 618 bp, Artificial Sequence
  derived and/or modified sequence
atgatgaggacattgattactactcatccactgccactcttactgctgccacaacagctgctgcagcttgtgcagttccaggaagtcgacacagatttcgatttccctgaggaagacaagaaagaggaatttgaggagtgtctggaaaagtttttttctaccggacccgcacgcccccccaccaaagaaaaggttaagagaagggtactcatcgagccaggcatgcccctaaaccacatcgagtactgcaaccatgagataatgggaaaaaatgtttactacaaacacagatgggtcgcagaacactatttcctgctcatgcagtacgacgagcttcaaaaaatttgttataataggtttgtcccatgtaaaaatggcataaggaaatgtaatcgctccaagggtcttgttgaaggcgtttactgcaatctcacagaggcctttgagatccctgcatgcaaatatgagtctctataccgaaagggatacgttctcatcacttgttcatggcagaatgaaatgcagaaaagaataccacacaccatcaatgacctggtagaaccaccggaacataggagctttctctccgaagatggtgtcttcgtgattagcccttag

SEQ ID NO: 41988 - DNA, 618 bp, Artificial Sequence
  derived and/or modified sequence
atgatgaggacattgatcacaacacaccctctgccactgctcctcctgcctcaacagctgctgcagctggtgcagtttcaggaagtcgatactgattttgattttcccgaggaagataagaaggaggagttcgaggagtgcttggagaagttctttagcaccgggcccgcgcggccacctactaaggagaaggtcaaaagacgggtcttgatcgaaccaggtatgcccctgaaccatattgagtattgcaatcacgagataatggggaagaacgtgtactacaagcatagatgggtagccgagcactactttctgctgatgcaatacgatgagctccagaagatctgctacaatagattcgtcccatgcaagaatgggatccggaagtgcaacagatctaaaggcctggtggaaggagtgtattgcaaccttaccgaagctttcgagatcccagcctgtaaatatgagtccctctaccgcaagggatacgtgctgatcacgtgttcgtggcagaatgaaatgcaaaaaagaatcccacacactattaacgatttggtcgaaccaccagaacatcgaagcttcttgagcgaggatggggtcttcgtgatctccccatag

SEQ ID NO: 41989 - DNA, 618 bp, Artificial Sequence
  derived and/or modified sequence
atgatgcgaaccctgattactacacacccactccctctcctgcttctccctcaacagctcctgcaactcgtgcagttccaggaagtggacacagatttcgactttcctgaggaggacaagaaggaggagttcgaggagtgcctagaaaaatttttttcaaccgggcctgcacggccacctacaaaggagaaggtcaaaagaagagtgctgattgagcccggcatgcctctaaatcacattgagtactgtaaccatgaaatcatgggcaagaacgtgtactataagcacaggtgggtggcggagcattactttcttctcatgcaatacgacgaactgcaaaagatctgttataacaggtttgtgccctgcaagaatggcataaggaagtgcaaccggtcaaagggtttggttgagggcgtctactgtaatctcacggaggcctttgagatccctgcctgcaaatatgagagcctatatcgaaaagggtacgtcctaatcacatgcagttggcagaacgaaatgcagaaaaggatccctcatacaatcaatgatttagtggagccccctgagcatcggtccttccttagcgaggacggcgtcttcgtcatttctccatag

SEQ ID NO: 41990 - DNA, 618 bp, Artificial Sequence
  derived and/or modified sequence
atgatgagaacgcttattacaacacaccctcttccattgctgctgctgccccaacagctcctgcagctcgtgcagttccaggaagtagacacagatttcgattttccggaggaagacaagaaagaggaattcgaagaatgcctggagaaattcttctccaccggtccagcacggccccctacaaaagagaaggtgaagagaagggtacttatcgaacctgggatgcctcttaatcacatcgagtactgtaaccacgaaataatgggaaagaatgtatattacaaacatcgctgggtggctgagcactactttcttctgatgcagtatgatgagcttcaaaaaatctgctataatcgattcgtgccttgcaagaacggcatcaggaagtgtaacagatcaaagggtctggtggagggggtctactgcaatcttaccgaggctttcgagattcctgcttgcaaatacgagtcattataccgcaagggctacgtgcttatcacatgcagctggcaaaatgaaatgcagaagaggattccccatacaatcaacgatttagtggaaccaccagagcaccgctcatttctgtccgaagatggagtgttcgtgatttctccatag

SEQ ID NO: 41991 - DNA, 618 bp, Artificial Sequence
  derived and/or modified sequence
atgatgcggactctgattactacacaccctctgcctttactactcctaccacagcagctgctgcagttagtccagtttcaggaggtagacacagacttcgacttccctgaggaggacaagaaagaggaattcgaggagtgtctggagaagttcttctctacaggcccagcgagacctcccacgaaggagaaggttaaaaggcgtgtcctcatagagcctggcatgcctttgaaccacatcgagtactgcaaccatgagatcatgggaaagaatgtgtactacaagcataggtgggtcgccgagcactactttctgcttatgcaatacgatgagctgcagaaaatttgctataacagattcgtgccctgcaagaacgggattaggaagtgcaaccggtctaaagggctcgttgagggggtatattgcaaccttactgaggcctttgagatccccgcctgcaaatacgaatctctgtatagaaagggatatgtcttgataacctgctcatggcagaacgagatgcagaaaagaatcccccatacaattaacgacctcgtagaacccccagagcacagatcctttctgagtgaggatggagtcttcgtcatctccccttag

SEQ ID NO: 41992 - DNA, 618 bp, Artificial Sequence
  derived and/or modified sequence
atgatgaggaccctcatcaccacccaccccctgcccctgctgctgctgccccagcagctgctgcagctggtgcagttccaggaggtggacacagactttgacttccctgaggaggacaagaaggaggagtttgaggagtgcctggagaagttcttcagcacaggccctgcccggccccccaccaaggagaaggtgaagagaagagtgctgattgagcccggcatgcccctgaaccacatcgagtactgcaaccacgagatcatgggcaagaatgtgtactacaagcaccgctgggtggccgagcactacttcctgctgatgcagtatgatgagctgcagaagatctgctacaacagatttgtgccctgcaagaatggcatcaggaagtgcaacagaagcaagggcctggtggagggcgtgtactgcaacctgacagaggcctttgagatcccagcctgcaagtatgagagcctgtacaggaagggctacgtgctgatcacctgctcctggcagaatgagatgcagaagaggatcccccacaccatcaatgacctggtggagcccccagagcaccgctccttcctgtctgaagatggagtgtttgtgatcagcccctag

SEQ ID NO: 41993 - DNA, 618 bp, Artificial Sequence
  derived and/or modified sequence
atgatgcggaccctgatcaccacccaccccctgcccctgctgctgctccctcaacaactgctgcagctggtccagttccaggaggtggatacagactttgattttccagaggaagacaaaaaagaagagttcgaggagtgtttggagaaatttttttccactggacccgcacgccctccaacgaaagaaaaagtgaagcgcagggttttgatcgaacctggtatgccactcaaccacattgaatattgtaaccacgagatcatgggcaagaatgtctattataagcacaggtgggtcgcggaacactacttcctcctcatgcagtacgacgagcttcagaagatctgctataaccggttcgttccgtgtaagaacggaatcagaaagtgtaatcgtagcaaaggactggtggaaggtgtgtactgcaaccttactgaggctttcgagatccctgcttgtaagtatgagagtctatatcggaagggatacgtacttatcacatgttcttggcaaaacgagatgcagaaaaggatcccacacaccatcaacgatctggtcgagccccccgagcaccgctcattcctgagtgaggacggcgtgttcgtgatttcaccatag

SEQ ID NO: 41994 - DNA, 618 bp, Artificial Sequence
  derived and/or modified sequence
atgatgcggaccctgatcaccacccaccccctgcccctgctgctgttgccacagcagctgctgcagctggttcaatttcaggaagttgatactgacttcgactttccagaagaagataaaaaggaagagtttgaagagtgcctagagaagtttttcagcaccggcccggcccggccccccaccaaggagaaggtgaaaagaagagtgcttatcgagcccggcatgcccttgaaccatattgaatactgcaaccacgaaataatgggcaagaatgtgtactacaaacatcgctgggtggcggaacattatttcttgttaatgcagtacgacgagctgcaaaagatctgctataaccggttcgtcccttgcaagaacgggattcggaaatgcaatcgcagtaagggactggtggagggtgtgtattgtaatttaacagaggcatttgaaataccggcatgcaaatatgagagcctttataggaagggttacgtactcatcacatgttcctggcagaacgagatgcagaaacggattccccacacaataaatgacctggtggaaccgcccgaacatcgcagcttcctgtcagaggacggagtcttcgtaatctctccctag

SEQ ID NO: 41995 - RNA, 618 nt, Artificial Sequence
  derived and/or modified sequence
augaugcgaacccugaucaccacacacccacuuccucuccuucuacucccacagcagcuccugcagcuugugcaguuucaggaggucgacaccgacuucgauuuuccugaggaggauaagaaagaagaauucgaggaaugccuggagaaauucuuuagcaccgggcccgcuaggccaccuacuaaagagaaggucaagaggagaguuuugauugaaccuggaaugccacugaaccacauugaauacuguaaucacgaaaucauggguaagaauguauauuacaaacaucguuggguggccgagcacuauuucuuacugaugcaauacgacgaacuucagaagauuuguuauaauagauucgucccuuguaaaaauggcauuagaaagugcaaccguucuaaagggcuugucgagggcguguauugcaauuuaacugaagcauucgagauuccugcuugcaaguacgaaagccucuauaggaaaggauaugugcugauuacuugcaguuggcagaaugagaugcagaaacgaaucccucacacaaucaacgaucuugucgagccuccagagcaccgauccuucuugagugaggaugguguauuugucaucuccccauag

SEQ ID NO: 41996 - RNA, 618 nt, Artificial Sequence
  derived and/or modified sequence
augaugcguacgcuuauuacaacgcauccccugccauugcucuuacuaccgcaacagcuguugcagcugguacaguuccaagaaguggauacagacuucgacuuccccgaagaagauaagaaggaagaguuugaggaaugccuggagaaguucuuuagcacaggcccugcacgaccaccgacuaaagaaaaaguuaagcguagggugcuuauugagccggguaugccucuaaaucauaucgaguacugcaaucacgaaauaaugggaaaaaauguguauuauaaacacagaugggucgcugaacacuacuuucuccucaugcaauacgaugagcuucagaaaaucuguuacaacagauuugugcccuguaagaacgggauucgaaaguguaaucgcucaaagggucuaguagaaggaguguauuguaauuugaccgaagccuucgaaaucccugcuugcaaauaugaaucccuguaucgcaagggguacgugcugauaaccugcaguuggcagaacgaaaugcaaaaacggauuccucauaccauaaacgaucucguggaacccccugaacacagaaguuuuuuguccgaagauggcguguucgugaucucgccauag

SEQ ID NO: 41997 - RNA, 618 nt, Artificial Sequence
  derived and/or modified sequence
augaugcgaacucuaauuacaacccacccuuugccauuguugcugcugccccagcaauugcugcaauugguucaguuucaggagguggauaccgacuuugauuucccugaggaagacaaaaaagaggaauucgaggagugccuggaaaaguuuuucaguaccggucccgcgagacccccaacuaaggagaaagugaaaagaagagugcugauagaacccgggaugccccuaaaucacauugaauauuguaaucaugagauuaugggcaagaaugucuauuauaaacaucgcugggucgcagaacauuacuuccugcugaugcaauacgaugaacugcagaaaauuuguuacaauagauucgugccauguaagaacggcauucggaaauguaacagguccaagggacuugucgagggcguguauugcaaccuuaccgaagccuuugaaaucccggcuugcaaguacgaaagcuuguacaggaagggauacgugcuaauaacauguagcuggcagaaugagaugcaaaaaaggauaccccauaccaucaacgaucuuguggaacccccugaacaucggucuuuucucucugaagacgguguauuuguaauuucccccuag

SEQ ID NO: 41998 - RNA, 618 nt, Artificial Sequence
  derived and/or modified sequence
augaugcgcacccuuauuaccacccauccucuuccccucuuacuuuuaccacagcagcugcuacagcuagugcaauuccaagaggucgacacggacuucgauuuccccgaggaggacaagaaggaagaauuugaagagugcuuggagaaauuuuuuagcaccgggccugcacgccccccuacuaaagagaaaguuaagagaagaguucugaucgaacccgguaugcccuugaaucauauugaauacuguaaucacgagauuauggggaagaacguauacuauaagcacagauggguagcugaacauuauuuccuacuaaugcaguaugaugaguugcagaagauauguuacaacagguucguccccuguaagaacgguauccguaagugcaaccgcucaaaggggcucguggaaggagucuauugcaaucugacggaggcguuugagauucccgcuuguaaguaugagucucuauacaggaaaggauacguccugaucacuugcucguggcaaaacgaaaugcagaaacggaucccccacacuaucaaugaucugguugagccacccgagcaucgaaguuuucucucagaggacggaguuuuuguuauuucaccauag

SEQ ID NO: 41999 - RNA, 618 nt, Artificial Sequence
  derived and/or modified sequence
augaugcguaccuugauuacgacacauccccugccgcuacucuugcugccacaacagcuguugcaacugguucaguuucaggagguggauaccgauuucgauuuuccggaagaagacaaaaaagaagaauuugaggagugucuugagaaguucuucucaaccgggcccgcccggccacccacuaaggagaaaguaaagcgacgggugcucauugagccuggaaugccacucaaucacaucgaguacuguaaucaugaaauuaugggcaaaaauguguauuacaagcaucgauggguugccgaacacuauuucuuguugaugcaauaugaugaguuacaaaaaaucugcuauaauagguucguaccuuguaaaaacggcauaagaaaguguaacagauccaagggacugguagaagguguguauuguaaucuuacagaggccuuugagauuccagcuugcaaguaugagagucuguacagaaaagguuacgucuuaaucacgugcuccuggcagaaugagaugcagaagcgaauuccucauacaauuaaugaucuggucgaaccucccgagcauagaucuuuccuuucugaagaugguguuuuugucaucuccccuuag

SEQ ID NO: 42000 - RNA, 618 nt, Artificial Sequence
  derived and/or modified sequence
augaugagaacacucauaacaacgcacccgcucccccuccucuuguuaccucaacagcuguugcaacuggugcaguuccaagaagucgacaccgauuucgacuucccugaagaggauaaaaaggaagaauuugaggagugccuagaaaaauucuuuucaacagguccugcccggccacccacaaaagaaaagguaaaaaggcgcguccugaucgaacccggaaugccucugaaucauauugaguauugcaaccacgagaucaugggaaagaauguauauuauaaacaucgcuggguagcugagcauuauuuccuccucaugcaguaugacgagcuucagaagauuugcuacaaccgcuucguaccuuguaaaaauggcauucguaaguguaaccgcuccaagggccuggucgagggcguuuauugcaaccuuacagaagcuuuugaaaucccggcuuguaaauaugaaagcuuauaccgcaaaggauaugugcucauuaccuguucauggcaaaaugagaugcaaaagagaaucccucauacaaucaaugacuugguggagcccccggaacaccgguccuucuugagugaagacgggguguucgucauuucuccauag

SEQ ID NO: 42001 - RNA, 618 nt, Artificial Sequence
  derived and/or modified sequence
augaugagaacucugauuaccacucacccacuuccccugcugcuauuaccucaacaguuacugcagcucguccaguuccaggaaguggacacugauuuugauuucccugaggaggacaaaaaagaggaauucgaagaauguuuagaaaaguucuuuucuaccggaccagcccgcccccccacaaaggaaaaggugaagagaaggguauugaucgaaccggggaugccacuuaaucacauugaauauuguaaucaugagaucauggguaaaaacguguacuauaagcaccgcugggucgccgaacauuauuuucugcucaugcaguaugacgaacuucagaagaucuguuauaacagauuugucccauguaagaaugguaucagaaagugcaaucggaguaaagggcugguagagggcguguauugcaaucuuaccgaggcauuugaaauuccugcuuguaaguaugagagccuguauaggaaaggauacgucuuaauuacuuguucuuggcagaacgaaaugcagaaacggauuccccacaccaucaacgauuuaguggaaccuccugagcacagaucauuuuugagcgaagacggcguguuuguaauaucaccauag

SEQ ID NO: 42002 - RNA, 618 nt, Artificial Sequence
  derived and/or modified sequence
augaugcggacccuaauaacuacgcacccccuaccauuacuucuccucccccagcaguuacuucagcuagugcaguuccaagaaguagacaccgacuuugauuucccugaggaggacaagaaagaagaauuugaagaaugccuggagaaguuuuucagcaccggaccggcaagaccacccacuaaagaaaaggugaaaaggcgggugcugauagagccuggcaugccacuaaaucacaucgaauacuguaaccaugagauuaugggaaaaaacguguauuacaagcaccgcuggguagcugaacacuacuuccugcugaugcaauaugacgaacuccagaaaauuugcuauaauagauuugugccaugcaagaacgggaucagaaaauguaaccggaguaagggacugguggaggguguguacugcaaucugacagaagcguuugagauacccgcauguaaauaugagagccuguaccgcaaaggauacguguugauuacaugcagcuggcaaaacgaaaugcagaagagaauuccccauacuaucaacgaucuggucgaaccacccgaacaucggagcuuucugagcgaggauggcguguucguaauuucaccauag

SEQ ID NO: 42003 - RNA, 618 nt, Artificial Sequence
  derived and/or modified sequence
augaugcggacccucauuaccacacauccauuacccuuacuccugcucccacagcaacugcugcaacuaguccaguuccaggagguagauacagacuucgacuucccagaggaagauaaaaaggaggaauuugaagaaugucuagaaaaguucuuuucgaccggcccugccagacccccuacaaaggagaaagugaagcgaaggguauugaucgagccggguaugccccucaaccacauugaauauugcaaccacgagauuaugggcaagaauguguacuacaagcauagauggguugccgaacauuacuuucuccuuaugcaguacgacgagcugcagaaaauuuguuacaacagauucgugcccugcaaaaaugguauccggaagugcaaccgaucuaagggacuuguggaaggcguuuacuguaacuugacagaggcguucgaaauacccgcuugcaaauaugaaagcuuguauagaaaggguuauguauugauuacauguucuuggcagaacgaaaugcagaagagaauaccgcauacuauuaaugaccugguugagccccccgaacaccgcucguucuugagugaagauggcguuuuuguaauuucaccuuag

SEQ ID NO: 42004 - RNA, 618 nt, Artificial Sequence
  derived and/or modified sequence
augaugcguacacuuauaaccacacacccucugccucuacuccuguugccccaacaacugcuccaacugguacaguuucaggaaguugacaccgauuucgauuuucccgaggaagacaaaaaagaagaguuugaggaauguuuggagaaguucuuuucgaccggcccugccaggccccccacaaaggagaaagugaaacggagagugcugaucgaaccuggcaugccauugaaccacauugaauacugcaaucacgagauuauggguaagaacguuuacuacaaacaccgguggguagcagaacauuauuuccuacugaugcaguaugacgaacugcagaagauuugcuacaaucgauucgugccguguaagaaugguaucaggaaguguaauagauccaaaggacuaguagagggcguguacugcaaucucacagaagccuuugaaaucccugcaugcaaguaugaaagucuguaccgaaaaggguacguguuaauuacauguucguggcagaacgaaaugcagaagaggaucccccauaccauaaaugaccuaguugaaccuccggagcaucguaguuuccugagcgaagacggcguuuucguuauaucucccuag

SEQ ID NO: 42005 - RNA, 618 nt, Artificial Sequence
  derived and/or modified sequence
augaugcgaacccugauaaccacacacccguugcccuugcuguugcuuccacaacagcuccuacagcuugugcaguuccaagaaguggauacggauuuugauuuuccagaggaagauaagaaggaagaauucgaggaguguuuggaaaaauucuucuccaccggaccagccagaccacccacuaaagaaaaagucaaacgacgagugcuaaucgaaccuggaaugccacugaaucauaucgaguacugcaaccacgagauuaugggaaagaacguguauuauaagcaucgcuggguggccgaacacuacuucuuacugaugcaauacgacgagcugcagaagauuuguuauaaucgcuuuguccccugcaaaaauggaauacggaaaugcaacagauccaaaggauugguugaggggguuuauugcaaucucacagaggccuucgagaucccagcauguaaauacgaaucacuguaucggaagggcuacguacuaauuaccugcaguuggcagaacgagaugcagaaaaggauaccucauacuauaaaugaccugguggaaccaccugaacacaggaguuuucuuuccgaagacggcguguucgucaucucacccuag

SEQ ID NO: 42006 - RNA, 618 nt, Artificial Sequence
  derived and/or modified sequence
augaugaggacauuaauaacuacucauccgcugccauuacuccuucuuccucagcaguugcuccagcucguacaguuccaggaaguggauacugauuucgauuuuccagaagaagauaagaaagaggaauucgaagaaugcuuagagaaauuuuuuucaaccgguccugcacgcccgcccaccaaagaaaaagugaagcgcaggguguugauugaacccggaaugccacugaaccacauagaauacuguaaucaugagauuauggggaaaaauguuuacuacaaacaccggugggucgcggaacauuauuuucuucucaugcaguacgaugaacuccagaagauuuguuauaaucguuuuguuccuugcaaaaaugguauccguaaguguaaccgcaguaaaggcuugguagaaggaguguauugcaaccucaccgaagcuuucgagauacccgcuuguaaauaugaaagucucuauagaaaagguuacguccugaucaccuguucauggcagaaugaaaugcaaaagcguauuccucauaccauuaacgaucugguugaacccccugagcaucgguccuuccucucagaagacggaguauuugucauuaguccauag

SEQ ID NO: 42007 - protein, 205 aa, Artificial Sequence
  derived and/or modified sequence
MMRTLITTHPLPLLLLPQQLLQLVQFQEVDTDFDFPEEDKKEEFEECLEKFFSTGPARPPTKEKVKRRVLIEPGMPLNHIEYCNHEIMGKNVYYKHRWVAEHYFLLMQYDELQKICYNRFVPCKNGIRKCNRSKGLVEGVYCNLTEAFEIPACKYESLYRKGYVLITCSWQNEMQKRIPHTINDLVEPPEHRSFLSEDGVFVISP

SEQ ID NO: 42008 - protein, 210 aa, Artificial Sequence
  derived and/or modified sequence
MSAGKMMRTLITTHPLPLLLLPQQLLQLVQFQEVDTDFDFPEEDKKEEFEECLEKFFSTGPARPPTKEKVKRRVLIEPGMPLNHIEYCNHEIMGKNVYYKHRWVAEHYFLLMQYDELQKICYNRFVPCKNGIRKCNRSKGLVEGVYCNLTEAFEIPACKYESLYRKGYVLITCSWQNEMQKRIPHTINDLVEPPEHRSFLSEDGVFVISP

SEQ ID NO: 42009 - DNA, 633 bp, Artificial Sequence
  derived and/or modified sequence
atgagcgccggcaagatgatgcggaccctgatcaccacccaccccctgccactgttacttctcccacagcagctcctgcaactggtgcagtttcaggaggtcgataccgatttcgattttcctgaagaggacaaaaaggaagagtttgaggagtgtctggaaaagtttttctcaacaggaccggcacgtcccccgacaaaggagaaagtgaaaagaagagtgcttatcgagccaggaatgcccctgaatcacatcgagtactgcaaccatgagatcatgggcaaaaacgtatattacaagcatcgctgggtggccgagcactattttctccttatgcagtacgatgagctgcagaagatctgctacaaccgctttgtcccatgtaaaaatgggataagaaaatgtaaccggtctaaggggttagtcgagggggtgtactgcaatctgactgaggcctttgaaatcccggcttgcaaatacgaatctctttatagaaagggatatgtgctaattacgtgctcgtggcagaacgaaatgcaaaagaggatcccgcacacgattaacgacctcgtggagccccctgagcatagatcctttctcagtgaagacggcgtgttcgttatcagcccgtag

SEQ ID NO: 42010 - DNA, 633 bp, Artificial Sequence
  derived and/or modified sequence
atgagcgccggcaagatgatgcggaccctgatcaccacccaccccctgccattactgttactgcctcagcaactgctgcagctggtgcaatttcaagaagtggatacagacttcgactttcccgaagaggacaaaaaggaggagtttgaggagtgtctggagaagtttttctctaccgggcccgcgaggcctccaacaaaagagaaagtcaagaggcgggtcttgatcgagcctggtatgccccttaaccatattgagtactgcaatcatgaaataatgggcaagaatgtatactacaaacaccggtgggtcgcagaacactacttcctcctcatgcaatacgacgagctccagaagatttgctacaaccggttcgttccttgcaagaatggaatccgcaaatgcaatcgctcaaagggcctcgtcgagggagtgtactgtaacttgacagaggcctttgagattcccgcatgcaaatacgaaagcctgtatcgaaaaggctatgttctcattacttgtagttggcagaatgaaatgcaaaaaagaataccgcacacaataaatgacttggtggaacctcccgaacaccggtcattcctgagcgaagatggggtctttgtaatctccccctag

SEQ ID NO: 42011 - DNA, 633 bp, Artificial Sequence
  derived and/or modified sequence
atgagcgccggcaagatgatgcggaccctgatcaccacccaccccctacccctgctgctgctgccccagcagctgcttcagcttgtgcagttccaggaggtggatactgactttgactttccagaggaggataaaaaagaagaattcgaagagtgtctggaaaagttcttctctacaggacccgccaggccaccaactaaggagaaagttaaaagaagggtcctgatcgaacctggaatgcctctgaatcacattgaatattgtaaccatgaaatcatggggaaaaatgtctattacaagcaccgctgggtggccgagcactacttcctcctcatgcagtatgacgaactgcaaaaaatttgttacaatcggtttgtgccctgtaagaacggcattaggaagtgcaacaggtcaaaaggcctagtggaaggcgtgtactgcaatctcacggaagcattcgaaattcccgcgtgcaagtacgagtccctgtaccggaaggggtacgttctgatcacctgttcttggcagaatgaaatgcaaaagcgcatcccccacacaatcaacgacctagtagaacctcccgaacatagatcatttctgtccgaggatggtgtcttcgtgatcagtccttag

SEQ ID NO: 42012 - DNA, 1247 bp, Artificial Sequence
  derived and/or modified sequence
gctctacctcttggacttccaacttctgtgagtcaacatagtgcctcttgcatttaagaaacatctcatcacactcttatcagcattgagtttaaatttcaattagtgagaactgaggaaaaaccaagaagcctgcattccacagatcaagatgttgcagaggctccgcgttcttgtgagagtatgttccgagctctctgacctgtcaccatgggatcactcttttgaagagacttcctggaggacactgatgacatgtctgcaggaaaaatgatgagaactctcatcaccacacacccactgcccctgcttctattgccgcagcagctgctgcagctggtgcagtttcaagaggtggatacagattttgatttcccagaagaagataaaaaagaagaatttgaagagtgtttggaaaaattttttagtacagggcccgccagaccacctaccaaagaaaaagtcaaaagacgtgtccttattgaacctggaatgccactaaatcatatagagtactgtaaccatgaaatcatgggaaaaaatgtttactacaaacaccgttgggtggcagaacattacttccttcttatgcaatatgacgagctccaaaaaatctgttacaacagatttgtgccatgtaagaatggaattaggaaatgtaacaggagcaaaggtcttgtagaaggagtgtattgtaatttaacagaagcatttgaaataccagcgtgtaaatacgaatcactttataggaagggctacgtccttatcacttgttcatggcaaaatgaaatgcaaaaacgtattcctcatactataaatgatctcgtggagccacctgaacacagaagtttcctcagtgaggatggtgtctttgtcatatcgccctagcagagcgttctctgagagcttagggtgggaggaatatttctctccatactgatccttatagatcaaagttgagaatggtaattttgcttccattcactttaatcacccaccttcctttcttcctttcccaacacctcacaaaagcaccttaggctaggttcacagacggtgctctgagatgtggtctcatgcaggtcccctaagttagcatgccttgaatgtgttacggatacagatgcctgcagtggaaggatgaccagcaccaagaggaaaaggaaatggttgcctgaagtgtgctccaaagacacatccatgtgattctctagttcagcagaaagaataaaaattgcttcaatcta

SEQ ID NO: 42013 - DNA, 633 bp, Artificial Sequence
  derived and/or modified sequence
atgtctgcagggaagatgatgcgcactctcatcaccactcacccgctcccactgttactgctaccccaacaactgttacagctggtccaattccaggaggtagacaccgattttgattttcctgaggaagacaaaaaggaggagttcgaggagtgcctggagaaattctttagcaccggaccagcacggcctccaaccaaggagaaggtgaaaagaagggtgctcatcgaacccggaatgccgctgaatcacatcgaatattgcaatcatgaaatcatggggaagaacgtgtactacaaacatcggtgggtggccgaacactactttctgctcatgcagtacgacgagttgcaaaagatctgctacaacagatttgtgccttgcaagaacggcatccggaagtgcaacagaagtaaagggctggttgagggcgtctactgcaacctcacagaggccttcgagattccagcatgtaagtacgaatccctttaccgcaaaggctacgtgctcataacctgctcatggcaaaacgagatgcaaaagaggatcccacatacgataaatgatctggtggaaccgcctgaacaccggagttttctatcagaggacggcgtcttcgttatttccccatag

SEQ ID NO: 42014 - DNA, 633 bp, Artificial Sequence
  derived and/or modified sequence
atgtctgctggcaagatgatgcggaccctgatcacaactcacccgctgccccttctgctgttgccacagcagctcctccagctggtgcaattccaggaggtggataccgacttcgatttccctgaggaggacaagaaagaggaattcgaggaatgtttagaaaaattcttctctactgggccagctcggcctcccaccaaggagaaagttaagcgcagggttctgattgaaccaggcatgccacttaatcatattgaatattgcaatcatgagattatgggcaagaatgtctactacaagcatcgttgggtggccgagcattacttcctactgatgcagtatgacgagctccagaagatttgctacaatcgcttcgtaccgtgcaagaatggaatcagaaagtgtaatcgctcaaagggcttagtcgaaggcgtttattgcaaccttaccgaagcctttgaaatacccgcttgcaaatacgaatccctgtaccggaagggctatgttcttatcacttgctcttggcagaatgaaatgcagaagcggattccccacacaataaatgatttggtggagccacctgagcaccggagttttctctctgaagatggtgtgtttgtcatctccccatag

SEQ ID NO: 42015 - DNA, 633 bp, Artificial Sequence
  derived and/or modified sequence
atgtctgccggaaaaatgatgaggacgttgatcactacccatccactcccactacttttattgccgcagcagctcctgcagctagtgcagtttcaggaagtcgatactgactttgactttcccgaggaggataagaaggaagagttcgaggaatgcttggaaaaattttttagtactggacctgcccgaccaccaaccaaggaaaaagtcaagaggcgagtccttatcgagcctggaatgccgctcaatcacatcgagtactgcaaccatgagattatgggcaaaaatgtatactataagcaccgctgggtggccgaacattactttctgctgatgcagtatgatgaactccagaagatctgttacaatagatttgtcccatgcaagaacggcatccgcaaatgcaatagatccaaaggcttagtcgaaggggtgtattgcaatctaaccgaggccttcgaaatccccgcatgcaaatatgagagcctttaccggaaaggctacgtactgatcacatgtagttggcagaatgaaatgcaaaaaagaattccacataccattaacgaccttgtggagccacccgaacatcggtcattcctcagcgaagatggggtgtttgtgatatctccttag

SEQ ID NO: 42016 - DNA, 633 bp, Artificial Sequence
  derived and/or modified sequence
atgtcagctggaaagatgatgcgtacactgatcacgactcatcccctgccactccttctgttaccacagcagcttctgcaactagttcagtttcaggaagtcgatacagatttcgactttcctgaagaggataagaaggaagaattcgaggaatgcctggagaagtttttttctactggccctgccagacccccaacaaaggagaaggtgaaacgcagggtcctcatcgagcccggtatgccacttaaccatattgagtactgtaaccacgagatcatgggaaagaacgtgtactacaaacaccgctgggtcgccgagcattactttctgcttatgcagtatgacgaactgcagaagatatgttacaacagatttgtcccttgtaagaatgggattcgtaaatgcaatcggtccaagggacttgtagagggggtgtattgcaacctcacagaggcatttgaaattccggcttgcaaatatgaaagtctctatcgtaagggctatgtgttgattacctgctcctggcagaatgaaatgcaaaagaggatcccccatacaattaacgatctcgtcgagccaccggaacatcgatcattcctgtctgaggacggagtgtttgtcatcagcccatag

SEQ ID NO: 42017 - DNA, 1084 bp, Artificial Sequence
  derived and/or modified sequence
gctctacctcttggacttccaacttctgtgagtcaacatagtgcctcttgcatttaagaaacatctcatcacactcttatcagcattgagttttgtctgcaggaaaaatgatgagaactctcatcaccacacacccactgcccctgcttctattgccgcagcagctgctgcagctggtgcagtttcaagaggtggatacagattttgatttcccagaagaagataaaaaagaagaatttgaagagtgtttggaaaaattttttagtacagggcccgccagaccacctaccaaagaaaaagtcaaaagacgtgtccttattgaacctggaatgccactaaatcatatagagtactgtaaccatgaaatcatgggaaaaaatgtttactacaaacaccgttgggtggcagaacattacttccttcttatgcaatatgacgagctccaaaaaatctgttacaacagatttgtgccatgtaagaatggaattaggaaatgtaacaggagcaaaggtcttgtagaaggagtgtattgtaatttaacagaagcatttgaaataccagcgtgtaaatacgaatcactttataggaagggctacgtccttatcacttgttcatggcaaaatgaaatgcaaaaacgtattcctcatactataaatgatctcgtggagccacctgaacacagaagtttcctcagtgaggatggtgtctttgtcatatcgccctagcagagcgttctctgagagcttagggtgggaggaatatttctctccatactgatccttatagatcaaagttgagaatggtaattttgcttccattcactttaatcacccaccttcctttcttcctttcccaacacctcacaaaagcaccttaggctaggttcacagacggtgctctgagatgtggtctcatgcaggtcccctaagttagcatgccttgaatgtgttacggatacagatgcctgcagtggaaggatgaccagcaccaagaggaaaaggaaatggttgcctgaagtgtgctccaaagacacatccatgtgattctctagttcagcagaaagaataaaaattgcttcaatcta

SEQ ID NO: 42018 - DNA, 633 bp, Artificial Sequence
  derived and/or modified sequence
atgtctgccggaaaaatgatgcgcaccctcataacaacccacccgctcccgttactactcctaccgcagcaacttctacaactggttcaattccaagaagtcgatactgacttcgattttccagaggaggacaaaaaagaggagtttgaggagtgtctcgagaaatttttcagtacaggaccagcccgcccccccacaaaagaaaaggtgaagcgcagagtactcattgaacccggaatgcctcttaatcacatcgaatactgcaaccacgaaattatgggcaaaaacgtgtactataaacaccgttgggtggcagagcactatttccttttaatgcagtatgatgaacttcagaaaatctgttacaacagattcgtcccatgtaagaacggtatccggaaatgcaacaggtcaaaaggactggtagaaggcgtgtattgtaacttgacggaggcctttgaaattcctgcttgcaagtatgaaagtttgtacaggaagggatacgttctgatcacctgcagctggcagaacgagatgcaaaaaaggattccacatacaattaatgacctcgtagaaccacctgaacaccggtcctttctctccgaagacggggtctttgtcatcagtccctag

SEQ ID NO: 42019 - DNA, 633 bp, Artificial Sequence
  derived and/or modified sequence
atgagcgctggaaaaatgatgcgcacattgatcactacccacccgctgccactgctcctcctgccccaacagctgttacagctcgtccaatttcaagaggtggacaccgactttgattttccggaggaagacaaaaaagaggaatttgaggagtgccttgagaagtttttcagcacgggtccagcacgccccccaaccaaggaaaaggtgaaacggagagttttaatcgaacctggaatgcccctcaatcatatcgaatactgtaatcacgagataatgggcaaaaacgtgtattacaaacatcggtgggtcgccgagcattattttcttctgatgcaatatgacgaactgcagaaaatatgctacaatcgatttgttccttgcaaaaatggaattcgcaagtgcaatcgctccaaaggcctagttgaaggagtttactgcaatcttaccgaagcttttgagatccctgcatgcaaatatgagtctctataccggaaagggtacgtgctgattacatgctcttggcagaatgagatgcagaagcggattccccataccattaatgatctggtagagccacctgagcatagaagttttctttccgaggacggtgtgttcgttatctccccctag

SEQ ID NO: 42020 - DNA, 633 bp, Artificial Sequence
  derived and/or modified sequence
atgagtgcaggcaaaatgatgcgcacactgataacaactcacccactcccactgcttctcttgccccagcagctgctgcaactagtgcaattccaggaggttgataccgattttgactttcctgaagaggacaaaaaggaggaattcgaggaatgcctggagaaattcttcagcacaggtcccgcgcggccaccgaccaaggaaaaggtgaaaagaagagtgcttatcgaacccggaatgccgttaaatcacatagaatattgcaaccacgagataatgggcaagaacgtatattataaacaccgttgggtagcggagcactactttctcctgatgcaatacgacgaactacagaaaatttgttacaacaggttcgtgccctgcaaaaacggtatacgcaagtgcaataggtcaaagggactggtggagggcgtctactgcaacctgacagaagccttcgagataccggcttgcaaatatgagtcgttataccggaaaggatacgttctaatcacctgtagttggcaaaacgagatgcaaaagcggatacctcatactatcaatgacctcgtcgaaccgcccgagcacaggagttttctatctgaagacggagtcttcgtgatttctccctag

SEQ ID NO: 42021 - DNA, 633 bp, Artificial Sequence
  derived and/or modified sequence
atgagtgcaggaaaaatgatgcggacactgataaccacacatcccttacccctgctgctgctgccccagcagctgctccaattggtccagtttcaagaagtcgataccgactttgactttccagaagaggacaagaaggaagagtttgaggaatgcttggaaaaattcttttctaccggtccagcccggccaccaactaaggaaaaggttaagcggagagttctgatagagcctggtatgccgttgaaccacatagagtactgtaaccatgaaattatgggaaagaacgtgtactacaagcatcgctgggttgctgaacattactttctgttaatgcaatacgacgagttacaaaagatttgttataatcggttcgttccatgtaagaatggtatcaggaagtgtaatcgttccaagggactagttgaaggcgtctattgtaatctgactgaagcgttcgagattccagcctgtaagtatgagagcctgtaccgtaagggttatgtgcttatcacctgttcctggcagaacgagatgcagaaacgtatacctcacacaatcaacgatttggtcgagccccctgaacatcgcagcttcctgagtgaagatggagtctttgtgattagcccatag

SEQ ID NO: 42022 - DNA, 633 bp, Artificial Sequence
  derived and/or modified sequence
atgtcagctggcaagatgatgcgaaccctgatcaccacccacccgttaccactgctcctgctcccccagcagctgctgcaattggtccaatttcaagaagtagacacagactttgacttccccgaggaagataaaaaggaagagttcgaagaatgtctagagaaatttttcagcacaggtcccgcacgaccaccgacaaaggaaaaagtgaaacgtagagtattgatcgaacccggcatgcctctcaatcacatagaatactgcaatcacgaaatcatggggaagaacgtctactacaagcatcgatgggtcgccgaacattatttcctgctcatgcagtatgatgaactccagaagatctgttataaccggtttgtgccatgcaaaaatgggatcaggaagtgtaaccgaagtaaaggactggtcgagggcgtttattgtaacctcactgaggcatttgagatacccgcttgcaaatacgaaagtctgtatcgtaagggatatgtgctgatcacttgcagttggcaaaatgaaatgcaaaagagaatcccacataccattaacgatctggttgagcctccagagcaccgcagcttcttaagcgaagacggcgtatttgtgatcagtccttag

SEQ ID NO: 42023 - DNA, 633 bp, Artificial Sequence
  derived and/or modified sequence
atgtcggccggaaaaatgatgcgcaccctaattaccacccatccactccctttactgctgctcccacagcaactattacaattggtgcagtttcaagaagtagatacagactttgacttcccagaggaggacaaaaaggaagaatttgaggaatgcttggagaaattttttagcaccggcccagcgagaccacccaccaaagaaaaggttaagcggcgtgttcttatcgagcctggcatgcccctcaaccacatagaatactgcaaccacgagatcatgggaaagaacgtatactacaaacaccggtgggtggccgaacactattttctcctgatgcaatacgatgagcttcaaaagatctgttacaatcgcttcgtgccctgcaagaacggaatcagaaagtgcaatcgctcaaaaggcttggtggagggggtgtactgtaatttgactgaggctttcgaaatccccgcctgtaaatacgaaagcttatatcgtaagggttacgttctaatcacatgttcctggcagaatgagatgcaaaagagaataccgcatacaatcaatgatctcgtagagcctccagaacatcgatcctttctctccgaggacggcgtgtttgtgatttccccctag

SEQ ID NO: 42024 - DNA, 633 bp, Artificial Sequence
  derived and/or modified sequence
atgtccgcaggaaagatgatgagaaccctgatcacaacccacccactaccactgctactactaccccagcagctgctgcagttagtgcaatttcaagaggttgataccgatttcgatttcccagaggaagacaaaaaagaggagtttgaggagtgtctagaaaagttcttcagtactggccccgccagaccgccaaccaaggaaaaggtgaagagaagagtgctgatcgagccgggaatgccgttgaatcacatcgaatactgtaatcacgaaattatgggcaagaatgtttattacaaacaccgatgggtggccgaacattacttcctgctgatgcaatacgacgaactacagaagatctgctacaacagattcgtaccatgtaagaacggtatccgcaagtgcaacaggagcaaaggcctggtggaaggagtttattgtaacctgaccgaagctttcgaaatcccagcatgcaagtacgaatccttatatagaaagggctacgtgctgattacttgttcttggcaaaatgaaatgcagaaaagaattcctcacaccataaacgatctggttgagcctcccgagcatagaagtttcctttcagaagacggcgtgttcgtgatttccccatag

SEQ ID NO: 42025 - DNA, 633 bp, Artificial Sequence
  derived and/or modified sequence
atgtcagctggaaagatgatgcgtactctgatcactacccaccccctacctttactgctgctaccacagcagctcttgcaactggtccagtttcaagaggttgacaccgactttgattttcccgaggaagataaaaaagaggagttcgaggaatgtttggagaaattttttagcaccggtccagctagaccacctaccaaagagaaagttaaacgaagagtgttgattgagccgggaatgcccctgaaccatatagaatattgcaatcacgaaatcatgggaaaaaatgtctattacaaacatagatgggtggcagagcattatttcctgctgatgcaatacgatgaactgcagaagatttgttataaccggtttgtgccctgcaaaaacggaatccgcaagtgcaaccggagcaaggggttggtagaaggggtgtattgtaacctgactgaggcctttgaaatccccgcttgtaagtatgaaagcctgtatcgaaagggttacgtcctcatcacgtgtagttggcagaacgagatgcagaaaagaatcccacacacaattaatgacctggtagagcctcctgagcacagaagttttctttccgaagatggcgtttttgtaatcagcccctag

SEQ ID NO: 42026 - DNA, 1136 bp, Artificial Sequence
  derived and/or modified sequence
gctctacctcttggacttccaacttctgtgagtcaacatagtgcctcttgcatttaagaaacatctcatcacactcttatcagcattgagtttaaatttcaattagtgagaactgaggaaaaaccaagaagcctgcattccacagtgtctgcaggaaaaatgatgagaactctcatcaccacacacccactgcccctgcttctattgccgcagcagctgctgcagctggtgcagtttcaagaggtggatacagattttgatttcccagaagaagataaaaaagaagaatttgaagagtgtttggaaaaattttttagtacagggcccgccagaccacctaccaaagaaaaagtcaaaagacgtgtccttattgaacctggaatgccactaaatcatatagagtactgtaaccatgaaatcatgggaaaaaatgtttactacaaacaccgttgggtggcagaacattacttccttcttatgcaatatgacgagctccaaaaaatctgttacaacagatttgtgccatgtaagaatggaattaggaaatgtaacaggagcaaaggtcttgtagaaggagtgtattgtaatttaacagaagcatttgaaataccagcgtgtaaatacgaatcactttataggaagggctacgtccttatcacttgttcatggcaaaatgaaatgcaaaaacgtattcctcatactataaatgatctcgtggagccacctgaacacagaagtttcctcagtgaggatggtgtctttgtcatatcgccctagcagagcgttctctgagagcttagggtgggaggaatatttctctccatactgatccttatagatcaaagttgagaatggtaattttgcttccattcactttaatcacccaccttcctttcttcctttcccaacacctcacaaaagcaccttaggctaggttcacagacggtgctctgagatgtggtctcatgcaggtcccctaagttagcatgccttgaatgtgttacggatacagatgcctgcagtggaaggatgaccagcaccaagaggaaaaggaaatggttgcctgaagtgtgctccaaagacacatccatgtgattctctagttcagcagaaagaataaaaattgcttcaatcta

SEQ ID NO: 42027 - DNA, 1172 bp, Artificial Sequence
  derived and/or modified sequence
gctctacctcttggacttccaacttctgtgagtcaacatagtgcctcttgcatttaagaaacatctcatcacactcttatcagcattgagtttaaatttcaattagtgagaactgaggaaaaaccaagaagcctgcattccacagatcaagatgttgcagaggctccgcgttcttgtgagatgtctgcaggaaaaatgatgagaactctcatcaccacacacccactgcccctgcttctattgccgcagcagctgctgcagctggtgcagtttcaagaggtggatacagattttgatttcccagaagaagataaaaaagaagaatttgaagagtgtttggaaaaattttttagtacagggcccgccagaccacctaccaaagaaaaagtcaaaagacgtgtccttattgaacctggaatgccactaaatcatatagagtactgtaaccatgaaatcatgggaaaaaatgtttactacaaacaccgttgggtggcagaacattacttccttcttatgcaatatgacgagctccaaaaaatctgttacaacagatttgtgccatgtaagaatggaattaggaaatgtaacaggagcaaaggtcttgtagaaggagtgtattgtaatttaacagaagcatttgaaataccagcgtgtaaatacgaatcactttataggaagggctacgtccttatcacttgttcatggcaaaatgaaatgcaaaaacgtattcctcatactataaatgatctcgtggagccacctgaacacagaagtttcctcagtgaggatggtgtctttgtcatatcgccctagcagagcgttctctgagagcttagggtgggaggaatatttctctccatactgatccttatagatcaaagttgagaatggtaattttgcttccattcactttaatcacccaccttcctttcttcctttcccaacacctcacaaaagcaccttaggctaggttcacagacggtgctctgagatgtggtctcatgcaggtcccctaagttagcatgccttgaatgtgttacggatacagatgcctgcagtggaaggatgaccagcaccaagaggaaaaggaaatggttgcctgaagtgtgctccaaagacacatccatgtgattctctagttcagcagaaagaataaaaattgcttcaatcta

SEQ ID NO: 42028 - DNA, 1101 bp, Artificial Sequence
  derived and/or modified sequence
gctctacctcttggacttccaacttctgtgagtcaacatagtgcctcttgcatttaagaaatttcaattagtgagaactgaggaaaaaccaagaagcctgcattccacagtgtctgcaggaaaaatgatgagaactctcatcaccacacacccactgcccctgcttctattgccgcagcagctgctgcagctggtgcagtttcaagaggtggatacagattttgatttcccagaagaagataaaaaagaagaatttgaagagtgtttggaaaaattttttagtacagggcccgccagaccacctaccaaagaaaaagtcaaaagacgtgtccttattgaacctggaatgccactaaatcatatagagtactgtaaccatgaaatcatgggaaaaaatgtttactacaaacaccgttgggtggcagaacattacttccttcttatgcaatatgacgagctccaaaaaatctgttacaacagatttgtgccatgtaagaatggaattaggaaatgtaacaggagcaaaggtcttgtagaaggagtgtattgtaatttaacagaagcatttgaaataccagcgtgtaaatacgaatcactttataggaagggctacgtccttatcacttgttcatggcaaaatgaaatgcaaaaacgtattcctcatactataaatgatctcgtggagccacctgaacacagaagtttcctcagtgaggatggtgtctttgtcatatcgccctagcagagcgttctctgagagcttagggtgggaggaatatttctctccatactgatccttatagatcaaagttgagaatggtaattttgcttccattcactttaatcacccaccttcctttcttcctttcccaacacctcacaaaagcaccttaggctaggttcacagacggtgctctgagatgtggtctcatgcaggtcccctaagttagcatgccttgaatgtgttacggatacagatgcctgcagtggaaggatgaccagcaccaagaggaaaaggaaatggttgcctgaagtgtgctccaaagacacatccatgtgattctctagttcagcagaaagaataaaaattgcttcaatcta

SEQ ID NO: 42029 - DNA, 2668 bp, Artificial Sequence
  derived and/or modified sequence
gctctacctcttggacttccaacttctgtgagtcaacatagtgcctcttgcatttaagaaatttcaattagtgagaactgaggaaaaaccaagaagcctgcattccacagatcaagatgttgcagaggctccgcgttcttgtgagagtatgttccgagctctctgacctgtcaccatgggatcactcttttgaagagacttcctggaggacactgatgacagtgtgaaagcagggatgggaggaaaagcagggaggggagggacagtgtggcacatggccgccccagagtgcccattctcacatcgccattttaggcaactttttcttttctttcccattctctgcactcctatgctcaactttcctgtctctactttctgatgtgttccccaacacccacctttctttaattccatcattctctaacctttctacacacatatatacaaacttagtatccagcctagaacaggaggctgtccatctccatcactgatagatcaaggtctccaggtaatgactgttagagaatcactcaggttgccaccaagtaggacttcttttacaacgagcctggtaaggtaagaaaactcaggaggttgcttctgcaattaaataattggttcttcatggagcatggaccaatttgtcaaagcactctaggggctcaaattccgttttagcactggccatttcagtagtcattgtgtttgacagcctagagagagagatacagtctagccttaagaagggaaaccagactgatagaggccatagaatagcagctaaggacagatgtgtggaatttagacaaaaataggcttgaaccaggagtctgccggatctaatgtgagattttaagcaacttcccttcacggagagatgttaataactttacacttctttttgcaactttcattgttataataacaacaatgctaaaaataatatatttattatagggttgtttggatgatggtgataatgtacttagagtgcttagtctagtgcttggcacttaactcctcattatgctagctatgactgtgtatcattgtttttactttagggtgacttcaagaatgtatttatcccagctgctcaaacttgaaccttccttgaccccttccccaagggcatctatggtcaaataagggcaagaggagaaagaaagacatggttaaggaatttttcttatcaaagtggaatgttcgaaaggggagggtggctcttttcagagcaagttctcaactcctggaaagggaaaagatgcatttatttcagacgaaaggagcatgtgagcctcctctctgcaccctccctttctccccactgctgtcttgatttcctttctccttccctctctccttaatctctctcttgctccatttcttccttgtttccttttcttcctccttacctttatttctctccctttctcattctccttcctttcaccttttcttctcttaccacagctctagactgactgtaggcctagtaaggtcatttttgtcaataatttagaagtattcagatcgattatgagttggtaatttaaaaatggtccaaaatcttagagcccagaacagcaacatgtggcataactgtgccccacacaggaaatggaagcaagcacattatcacaatagaacatatcccgttatctcttttagtgtctgcaggaaaaatgatgagaactctcatcaccacacacccactgcccctgcttctattgccgcagcagctgctgcagctggtgcagtttcaagaggtggatacagattttgatttcccagaagaagataaaaaagaagaatttgaagagtgtttggaaaaattttttagtacagggcccgccagaccacctaccaaagaaaaagtcaaaagacgtgtccttattgaacctggaatgccactaaatcatatagagtactgtaaccatgaaatcatgggaaaaaatgtttactacaaacaccgttgggtggcagaacattacttccttcttatgcaatatgacgagctccaaaaaatctgttacaacagatttgtgccatgtaagaatggaattaggaaatgtaacaggagcaaaggtcttgtagaaggagtgtattgtaatttaacagaagcatttgaaataccagcgtgtaaatacgaatcactttataggaagggctacgtccttatcacttgttcatggcaaaatgaaatgcaaaaacgtattcctcatactataaatgatctcgtggagccacctgaacacagaagtttcctcagtgaggatggtgtctttgtcatatcgccctagcagagcgttctctgagagcttagggtgggaggaatatttctctccatactgatccttatagatcaaagttgagaatggtaattttgcttccattcactttaatcacccaccttcctttcttcctttcccaacacctcacaaaagcaccttaggctaggttcacagacggtgctctgagatgtggtctcatgcaggtcccctaagttagcatgccttgaatgtgttacggatacagatgcctgcagtggaaggatgaccagcaccaagaggaaaaggaaatggttgcctgaagtgtgctccaaagacacatccatgtgattctctagttcagcagaaagaataaaaattgcttcaatcta

SEQ ID NO: 42030 - DNA, 1212 bp, Artificial Sequence
  derived and/or modified sequence
gctctacctcttggacttccaacttctgtgagtcaacatagtgcctcttgcatttaagaaatttcaattagtgagaactgaggaaaaaccaagaagcctgcattccacagatcaagatgttgcagaggctccgcgttcttgtgagagtatgttccgagctctctgacctgtcaccatgggatcactcttttgaagagacttcctggaggacactgatgacatgtctgcaggaaaaatgatgagaactctcatcaccacacacccactgcccctgcttctattgccgcagcagctgctgcagctggtgcagtttcaagaggtggatacagattttgatttcccagaagaagataaaaaagaagaatttgaagagtgtttggaaaaattttttagtacagggcccgccagaccacctaccaaagaaaaagtcaaaagacgtgtccttattgaacctggaatgccactaaatcatatagagtactgtaaccatgaaatcatgggaaaaaatgtttactacaaacaccgttgggtggcagaacattacttccttcttatgcaatatgacgagctccaaaaaatctgttacaacagatttgtgccatgtaagaatggaattaggaaatgtaacaggagcaaaggtcttgtagaaggagtgtattgtaatttaacagaagcatttgaaataccagcgtgtaaatacgaatcactttataggaagggctacgtccttatcacttgttcatggcaaaatgaaatgcaaaaacgtattcctcatactataaatgatctcgtggagccacctgaacacagaagtttcctcagtgaggatggtgtctttgtcatatcgccctagcagagcgttctctgagagcttagggtgggaggaatatttctctccatactgatccttatagatcaaagttgagaatggtaattttgcttccattcactttaatcacccaccttcctttcttcctttcccaacacctcacaaaagcaccttaggctaggttcacagacggtgctctgagatgtggtctcatgcaggtcccctaagttagcatgccttgaatgtgttacggatacagatgcctgcagtggaaggatgaccagcaccaagaggaaaaggaaatggttgcctgaagtgtgctccaaagacacatccatgtgattctctagttcagcagaaagaataaaaattgcttcaatcta

SEQ ID NO: 42031 - DNA, 2703 bp, Artificial Sequence
  derived and/or modified sequence
gctctacctcttggacttccaacttctgtgagtcaacatagtgcctcttgcatttaagaaacatctcatcacactcttatcagcattgagtttaaatttcaattagtgagaactgaggaaaaaccaagaagcctgcattccacagatcaagatgttgcagaggctccgcgttcttgtgagagtatgttccgagctctctgacctgtcaccatgggatcactcttttgaagagacttcctggaggacactgatgacagtgtgaaagcagggatgggaggaaaagcagggaggggagggacagtgtggcacatggccgccccagagtgcccattctcacatcgccattttaggcaactttttcttttctttcccattctctgcactcctatgctcaactttcctgtctctactttctgatgtgttccccaacacccacctttctttaattccatcattctctaacctttctacacacatatatacaaacttagtatccagcctagaacaggaggctgtccatctccatcactgatagatcaaggtctccaggtaatgactgttagagaatcactcaggttgccaccaagtaggacttcttttacaacgagcctggtaaggtaagaaaactcaggaggttgcttctgcaattaaataattggttcttcatggagcatggaccaatttgtcaaagcactctaggggctcaaattccgttttagcactggccatttcagtagtcattgtgtttgacagcctagagagagagatacagtctagccttaagaagggaaaccagactgatagaggccatagaatagcagctaaggacagatgtgtggaatttagacaaaaataggcttgaaccaggagtctgccggatctaatgtgagattttaagcaacttcccttcacggagagatgttaataactttacacttctttttgcaactttcattgttataataacaacaatgctaaaaataatatatttattatagggttgtttggatgatggtgataatgtacttagagtgcttagtctagtgcttggcacttaactcctcattatgctagctatgactgtgtatcattgtttttactttagggtgacttcaagaatgtatttatcccagctgctcaaacttgaaccttccttgaccccttccccaagggcatctatggtcaaataagggcaagaggagaaagaaagacatggttaaggaatttttcttatcaaagtggaatgttcgaaaggggagggtggctcttttcagagcaagttctcaactcctggaaagggaaaagatgcatttatttcagacgaaaggagcatgtgagcctcctctctgcaccctccctttctccccactgctgtcttgatttcctttctccttccctctctccttaatctctctcttgctccatttcttccttgtttccttttcttcctccttacctttatttctctccctttctcattctccttcctttcaccttttcttctcttaccacagctctagactgactgtaggcctagtaaggtcatttttgtcaataatttagaagtattcagatcgattatgagttggtaatttaaaaatggtccaaaatcttagagcccagaacagcaacatgtggcataactgtgccccacacaggaaatggaagcaagcacattatcacaatagaacatatcccgttatctcttttagtgtctgcaggaaaaatgatgagaactctcatcaccacacacccactgcccctgcttctattgccgcagcagctgctgcagctggtgcagtttcaagaggtggatacagattttgatttcccagaagaagataaaaaagaagaatttgaagagtgtttggaaaaattttttagtacagggcccgccagaccacctaccaaagaaaaagtcaaaagacgtgtccttattgaacctggaatgccactaaatcatatagagtactgtaaccatgaaatcatgggaaaaaatgtttactacaaacaccgttgggtggcagaacattacttccttcttatgcaatatgacgagctccaaaaaatctgttacaacagatttgtgccatgtaagaatggaattaggaaatgtaacaggagcaaaggtcttgtagaaggagtgtattgtaatttaacagaagcatttgaaataccagcgtgtaaatacgaatcactttataggaagggctacgtccttatcacttgttcatggcaaaatgaaatgcaaaaacgtattcctcatactataaatgatctcgtggagccacctgaacacagaagtttcctcagtgaggatggtgtctttgtcatatcgccctagcagagcgttctctgagagcttagggtgggaggaatatttctctccatactgatccttatagatcaaagttgagaatggtaattttgcttccattcactttaatcacccaccttcctttcttcctttcccaacacctcacaaaagcaccttaggctaggttcacagacggtgctctgagatgtggtctcatgcaggtcccctaagttagcatgccttgaatgtgttacggatacagatgcctgcagtggaaggatgaccagcaccaagaggaaaaggaaatggttgcctgaagtgtgctccaaagacacatccatgtgattctctagttcagcagaaagaataaaaattgcttcaatcta

SEQ ID NO: 42032 - DNA, 1137 bp, Artificial Sequence
  derived and/or modified sequence
gctctacctcttggacttccaacttctgtgagtcaacatagtgcctcttgcatttaagaaatttcaattagtgagaactgaggaaaaaccaagaagcctgcattccacagatcaagatgttgcagaggctccgcgttcttgtgagatgtctgcaggaaaaatgatgagaactctcatcaccacacacccactgcccctgcttctattgccgcagcagctgctgcagctggtgcagtttcaagaggtggatacagattttgatttcccagaagaagataaaaaagaagaatttgaagagtgtttggaaaaattttttagtacagggcccgccagaccacctaccaaagaaaaagtcaaaagacgtgtccttattgaacctggaatgccactaaatcatatagagtactgtaaccatgaaatcatgggaaaaaatgtttactacaaacaccgttgggtggcagaacattacttccttcttatgcaatatgacgagctccaaaaaatctgttacaacagatttgtgccatgtaagaatggaattaggaaatgtaacaggagcaaaggtcttgtagaaggagtgtattgtaatttaacagaagcatttgaaataccagcgtgtaaatacgaatcactttataggaagggctacgtccttatcacttgttcatggcaaaatgaaatgcaaaaacgtattcctcatactataaatgatctcgtggagccacctgaacacagaagtttcctcagtgaggatggtgtctttgtcatatcgccctagcagagcgttctctgagagcttagggtgggaggaatatttctctccatactgatccttatagatcaaagttgagaatggtaattttgcttccattcactttaatcacccaccttcctttcttcctttcccaacacctcacaaaagcaccttaggctaggttcacagacggtgctctgagatgtggtctcatgcaggtcccctaagttagcatgccttgaatgtgttacggatacagatgcctgcagtggaaggatgaccagcaccaagaggaaaaggaaatggttgcctgaagtgtgctccaaagacacatccatgtgattctctagttcagcagaaagaataaaaattgcttcaatcta

SEQ ID NO: 42033 - DNA, 633 bp, Artificial Sequence
  derived and/or modified sequence
atgagcgccggcaagatgatgagaaccctgatcaccacccaccccctgcccctgctgctgctgccccagcagctgctgcagctggtgcagttccaggaggtggacaccgacttcgacttccccgaggaggacaagaaggaggagttcgaggagtgcctggagaagttcttcagcaccggccccgccagaccccccaccaaggagaaggtgaagagaagagtgctgatcgagcccggcatgcccctgaaccacatcgagtactgcaaccacgagatcatgggcaagaacgtgtactacaagcacagatgggtggccgagcactacttcctgctgatgcagtacgacgagctgcagaagatctgctacaacagattcgtgccctgcaagaacggcatcagaaagtgcaacagaagcaagggcctggtggagggcgtgtactgcaacctgaccgaggccttcgagatccccgcctgcaagtacgagagcctgtacagaaagggctacgtgctgatcacctgcagctggcagaacgagatgcagaagagaatcccccacaccatcaacgacctggtggagccccccgagcacagaagcttcctgagcgaggacggcgtgttcgtgatcagcccctag

SEQ ID NO: 42034 - DNA, 1049 bp, Artificial Sequence
  derived and/or modified sequence
gctctacctcttggacttccaacttctgtgagtcaacatagtgcctcttgcatttaagtgtctgcaggaaaaatgatgagaactctcatcaccacacacccactgcccctgcttctattgccgcagcagctgctgcagctggtgcagtttcaagaggtggatacagattttgatttcccagaagaagataaaaaagaagaatttgaagagtgtttggaaaaattttttagtacagggcccgccagaccacctaccaaagaaaaagtcaaaagacgtgtccttattgaacctggaatgccactaaatcatatagagtactgtaaccatgaaatcatgggaaaaaatgtttactacaaacaccgttgggtggcagaacattacttccttcttatgcaatatgacgagctccaaaaaatctgttacaacagatttgtgccatgtaagaatggaattaggaaatgtaacaggagcaaaggtcttgtagaaggagtgtattgtaatttaacagaagcatttgaaataccagcgtgtaaatacgaatcactttataggaagggctacgtccttatcacttgttcatggcaaaatgaaatgcaaaaacgtattcctcatactataaatgatctcgtggagccacctgaacacagaagtttcctcagtgaggatggtgtctttgtcatatcgccctagcagagcgttctctgagagcttagggtgggaggaatatttctctccatactgatccttatagatcaaagttgagaatggtaattttgcttccattcactttaatcacccaccttcctttcttcctttcccaacacctcacaaaagcaccttaggctaggttcacagacggtgctctgagatgtggtctcatgcaggtcccctaagttagcatgccttgaatgtgttacggatacagatgcctgcagtggaaggatgaccagcaccaagaggaaaaggaaatggttgcctgaagtgtgctccaaagacacatccatgtgattctctagttcagcagaaagaataaaaattgcttcaatcta

SEQ ID NO: 42035 - DNA, 633 bp, Artificial Sequence
  derived and/or modified sequence
atgtcagccggcaagatgatgaggaccctcatcacaacacaccccttacctcttcttttgctgccccagcagctgctccagctggtgcaatttcaagaagttgacaccgactttgattttccagaggaagataaaaaagaggagttcgaggagtgcttagaaaagttcttctcgacggggcccgcccgtccacctaccaaggaaaaagttaagcggcgagttctgattgagccaggcatgccccttaaccatatagagtactgcaaccatgagatcatgggtaagaacgtatattataagcacaggtgggtggctgaacactacttccttctgatgcagtatgacgaattgcaaaagatctgctataacagattcgttccttgcaagaacggcatccgcaagtgtaatagatctaaaggtctggttgaaggagtgtattgtaatctcaccgaggccttcgagatcccagcttgcaagtacgagagcctttataggaaagggtatgtattgattacttgcagctggcagaacgaaatgcagaagaggatcccgcatactataaacgacttggtagagccgcccgaacacagaagcttcctgtcagaggatggggtcttcgttatcagcccttag

SEQ ID NO: 42036 - DNA, 633 bp, Artificial Sequence
  derived and/or modified sequence
atgagtgcggggaagatgatgaggacactcattaccacacacccacttccacttctgctcttaccccagcagttgcttcaacttgtccaattccaagaggtggataccgatttcgatttcccagaggaggataaaaaagaagagttcgaggagtgcttagaaaaatttttctctaccggacctgcccggccgcctacaaaggagaaagtcaagcgtcgcgtgctcatcgaacccggaatgccactcaaccacatcgagtactgtaaccacgagatcatgggaaaaaacgtgtactataagcacagatgggtggctgagcattattttctcttgatgcagtatgatgagctccagaaaatctgttacaaccggtttgtaccttgcaaaaacggtataagaaagtgcaaccgcagcaaaggtctggtggaaggcgtgtactgtaacctgactgaggcctttgagataccagcttgcaaatacgaaagtctttacagaaaagggtacgtgttgattacttgttcctggcaaaatgagatgcaaaaaaggattccacacaccattaacgacttggtcgaaccccccgagcacagatcttttctctctgaggatggcgtattcgtgatcagtccctag

SEQ ID NO: 42037 - DNA, 633 bp, Artificial Sequence
  derived and/or modified sequence
atgagcgccgggaaaatgatgcgaacactgataaccacacacccactaccactactcctgctgcctcaacagctcctgcagctcgtccagtttcaggaagttgacacagattttgactttcccgaagaagataagaaggaagaatttgaggagtgcttggagaagttcttttcgactggaccagcccgacctccaactaaagagaaagttaagcgtagagtcttaatcgaacccggcatgccactgaatcatatagaatattgtaaccacgagataatgggaaaaaatgtttattataagcatcgttgggtggcggagcactatttcctcctgatgcagtatgatgaattacaaaaaatttgctacaaccggttcgtgccgtgtaagaatgggattcgtaaatgtaacagatccaaaggtctggtggagggcgtttactgcaacctgaccgaggccttcgagattcccgcttgtaaatacgaatcgctctatagaaagggttatgtccttatcacttgctcatggcagaacgagatgcagaagaggatcccgcacaccattaacgacctggtagagcccccggaacacaggagttttctcagcgaggatggcgttttcgtaatcagtccctag

SEQ ID NO: 42038 - DNA, 633 bp, Artificial Sequence
  derived and/or modified sequence
atgagcgctggcaagatgatgcgaacattaatcactacccaccccctgccccttctgctgcttccacagcagctgctccagctcgtacagtttcaggaggtcgacaccgactttgacttcccagaagaggataaaaaagaggagttcgaggagtgcctggagaagttcttctctacggggcccgcacggccacccactaaggaaaaggtgaaaaggcgggtccttatcgaaccagggatgccactgaaccatattgagtattgcaatcatgaaattatgggaaagaatgtgtactacaagcatagatgggtggctgaacactattttctgctgatgcagtatgatgaactgcaaaagatctgttacaatagattcgtgccctgcaaaaatggtattcgtaaatgcaatcgaagcaagggacttgtcgagggcgtttactgtaacttaactgaggcattcgagatcccagcctgcaaatatgagtcactctaccggaaaggatatgtgctaatcacctgcagttggcagaatgagatgcagaaacgcattccacacaccattaatgatctggtggagcccccagagcacaggagcttcttgtccgaggacggagtttttgtcatcagcccctag

SEQ ID NO: 42039 - DNA, 633 bp, Artificial Sequence
  derived and/or modified sequence
atgtctgctgggaagatgatgaggaccctcatcaccacccaccccctgcccctgctgctgctgccccagcagctgctgcagctggtgcagttccaggaggtggacacagactttgacttccctgaggaggacaagaaggaggagtttgaagaatgtctggagaagttcttcagcactggacctgcccggccccccaccaaggagaaggtgaagagaagagtgctgattgagcccggcatgcccctgaaccacatcgagtactgcaaccacgagatcatgggcaagaatgtgtactacaagcaccgctgggtggccgagcactacttcctgctgatgcagtatgatgagctgcagaagatctgctacaacagatttgtgccctgcaagaatggcatcaggaagtgcaacagaagcaagggcctggtggagggcgtgtactgcaacctgacagaggcctttgagatcccagcctgcaagtatgagagcctgtacaggaagggctacgtgctgatcacctgctcctggcagaatgagatgcagaagaggatcccccacaccatcaatgacctggtggagcccccagagcacaggagcttcctgtctgaagatggagtgtttgtgatcagcccctag

SEQ ID NO: 42040 - DNA, 633 bp, Artificial Sequence
  derived and/or modified sequence
atgagcgccggcaagatgatgcggaccctgatcaccacccaccccctacccctgctgctactcccccagcagctcctccagctggtccagtttcaagaggtggacaccgattttgacttcccagaggaggacaagaaagaagaattcgaagagtgcttggagaagtttttctcaacggggcccgctcggccacctaccaaagaaaaagtgaaaagaagagttttgatcgagccgggcatgcccctgaatcatatagaatactgtaatcacgagattatggggaaaaacgtctattacaaacacagatgggttgccgagcactattttctccttatgcagtacgatgaactccaaaagatttgctataaccgctttgtgccctgcaaaaatggaatccgaaagtgtaacagaagcaaggggctggttgagggcgtttattgtaatctgaccgaagcttttgagattcctgcctgtaagtacgaatctctttaccgtaaaggatatgtgctcattacttgcagttggcagaacgagatgcagaaaaggatcccccacactatcaatgacttggtagaacccccagagcaccgttcctttctctctgaagatggcgtcttcgttatctcaccatag

SEQ ID NO: 42041 - RNA, 633 nt, Artificial Sequence
  derived and/or modified sequence
augucugccggaaaaaugaugcgcacccucauaacaacccacccgcucccguuacuacuccuaccgcagcaacuucuacaacugguucaauuccaagaagucgauacugacuucgauuuuccagaggaggacaaaaaagaggaguuugaggagugucucgagaaauuuuucaguacaggaccagcccgcccccccacaaaagaaaaggugaagcgcagaguacucauugaacccggaaugccucuuaaucacaucgaauacugcaaccacgaaauuaugggcaaaaacguguacuauaaacaccguuggguggcagagcacuauuuccuuuuaaugcaguaugaugaacuucagaaaaucuguuacaacagauucgucccauguaagaacgguauccggaaaugcaacaggucaaaaggacugguagaaggcguguauuguaacuugacggaggccuuugaaauuccugcuugcaaguaugaaaguuuguacaggaagggauacguucugaucaccugcagcuggcagaacgagaugcaaaaaaggauuccacauacaauuaaugaccucguagaaccaccugaacaccgguccuuucucuccgaagacggggucuuugucaucagucccuag

SEQ ID NO: 42042 - RNA, 633 nt, Artificial Sequence
  derived and/or modified sequence
augagcgcuggaaaaaugaugcgcacauugaucacuacccacccgcugccacugcuccuccugccccaacagcuguuacagcucguccaauuucaagagguggacaccgacuuugauuuuccggaggaagacaaaaaagaggaauuugaggagugccuugagaaguuuuucagcacggguccagcacgccccccaaccaaggaaaaggugaaacggagaguuuuaaucgaaccuggaaugccccucaaucauaucgaauacuguaaucacgagauaaugggcaaaaacguguauuacaaacaucggugggucgccgagcauuauuuucuucugaugcaauaugacgaacugcagaaaauaugcuacaaucgauuuguuccuugcaaaaauggaauucgcaagugcaaucgcuccaaaggccuaguugaaggaguuuacugcaaucuuaccgaagcuuuugagaucccugcaugcaaauaugagucucuauaccggaaaggguacgugcugauuacaugcucuuggcagaaugagaugcagaagcggauuccccauaccauuaaugaucugguagagccaccugagcauagaaguuuucuuuccgaggacgguguguucguuaucucccccuag

SEQ ID NO: 42043 - RNA, 633 nt, Artificial Sequence
  derived and/or modified sequence
augagugcaggcaaaaugaugcgcacacugauaacaacucacccacucccacugcuucucuugccccagcagcugcugcaacuagugcaauuccaggagguugauaccgauuuugacuuuccugaagaggacaaaaaggaggaauucgaggaaugccuggagaaauucuucagcacaggucccgcgcggccaccgaccaaggaaaaggugaaaagaagagugcuuaucgaacccggaaugccguuaaaucacauagaauauugcaaccacgagauaaugggcaagaacguauauuauaaacaccguuggguagcggagcacuacuuucuccugaugcaauacgacgaacuacagaaaauuuguuacaacagguucgugcccugcaaaaacgguauacgcaagugcaauaggucaaagggacugguggagggcgucuacugcaaccugacagaagccuucgagauaccggcuugcaaauaugagucguuauaccggaaaggauacguucuaaucaccuguaguuggcaaaacgagaugcaaaagcggauaccucauacuaucaaugaccucgucgaaccgcccgagcacaggaguuuucuaucugaagacggagucuucgugauuucucccuag

SEQ ID NO: 42044 - RNA, 633 nt, Artificial Sequence
  derived and/or modified sequence
augagugcaggaaaaaugaugcggacacugauaaccacacaucccuuaccccugcugcugcugccccagcagcugcuccaauugguccaguuucaagaagucgauaccgacuuugacuuuccagaagaggacaagaaggaagaguuugaggaaugcuuggaaaaauucuuuucuaccgguccagcccggccaccaacuaaggaaaagguuaagcggagaguucugauagagccugguaugccguugaaccacauagaguacuguaaccaugaaauuaugggaaagaacguguacuacaagcaucgcuggguugcugaacauuacuuucuguuaaugcaauacgacgaguuacaaaagauuuguuauaaucgguucguuccauguaagaaugguaucaggaaguguaaucguuccaagggacuaguugaaggcgucuauuguaaucugacugaagcguucgagauuccagccuguaaguaugagagccuguaccguaaggguuaugugcuuaucaccuguuccuggcagaacgagaugcagaaacguauaccucacacaaucaacgauuuggucgagcccccugaacaucgcagcuuccugagugaagauggagucuuugugauuagcccauag

SEQ ID NO: 42045 - RNA, 633 nt, Artificial Sequence
  derived and/or modified sequence
augucagcuggcaagaugaugcgaacccugaucaccacccacccguuaccacugcuccugcucccccagcagcugcugcaauugguccaauuucaagaaguagacacagacuuugacuuccccgaggaagauaaaaaggaagaguucgaagaaugucuagagaaauuuuucagcacaggucccgcacgaccaccgacaaaggaaaaagugaaacguagaguauugaucgaacccggcaugccucucaaucacauagaauacugcaaucacgaaaucauggggaagaacgucuacuacaagcaucgaugggucgccgaacauuauuuccugcucaugcaguaugaugaacuccagaagaucuguuauaaccgguuugugccaugcaaaaaugggaucaggaaguguaaccgaaguaaaggacuggucgagggcguuuauuguaaccucacugaggcauuugagauacccgcuugcaaauacgaaagucuguaucguaagggauaugugcugaucacuugcaguuggcaaaaugaaaugcaaaagagaaucccacauaccauuaacgaucugguugagccuccagagcaccgcagcuucuuaagcgaagacggcguauuugugaucaguccuuag

SEQ ID NO: 42046 - RNA, 633 nt, Artificial Sequence
  derived and/or modified sequence
augucggccggaaaaaugaugcgcacccuaauuaccacccauccacucccuuuacugcugcucccacagcaacuauuacaauuggugcaguuucaagaaguagauacagacuuugacuucccagaggaggacaaaaaggaagaauuugaggaaugcuuggagaaauuuuuuagcaccggcccagcgagaccacccaccaaagaaaagguuaagcggcguguucuuaucgagccuggcaugccccucaaccacauagaauacugcaaccacgagaucaugggaaagaacguauacuacaaacaccgguggguggccgaacacuauuuucuccugaugcaauacgaugagcuucaaaagaucuguuacaaucgcuucgugcccugcaagaacggaaucagaaagugcaaucgcucaaaaggcuugguggaggggguguacuguaauuugacugaggcuuucgaaauccccgccuguaaauacgaaagcuuauaucguaaggguuacguucuaaucacauguuccuggcagaaugagaugcaaaagagaauaccgcauacaaucaaugaucucguagagccuccagaacaucgauccuuucucuccgaggacggcguguuugugauuucccccuag

SEQ ID NO: 42047 - RNA, 633 nt, Artificial Sequence
  derived and/or modified sequence
auguccgcaggaaagaugaugagaacccugaucacaacccacccacuaccacugcuacuacuaccccagcagcugcugcaguuagugcaauuucaagagguugauaccgauuucgauuucccagaggaagacaaaaaagaggaguuugaggagugucuagaaaaguucuucaguacuggccccgccagaccgccaaccaaggaaaaggugaagagaagagugcugaucgagccgggaaugccguugaaucacaucgaauacuguaaucacgaaauuaugggcaagaauguuuauuacaaacaccgauggguggccgaacauuacuuccugcugaugcaauacgacgaacuacagaagaucugcuacaacagauucguaccauguaagaacgguauccgcaagugcaacaggagcaaaggccugguggaaggaguuuauuguaaccugaccgaagcuuucgaaaucccagcaugcaaguacgaauccuuauauagaaagggcuacgugcugauuacuuguucuuggcaaaaugaaaugcagaaaagaauuccucacaccauaaacgaucugguugagccucccgagcauagaaguuuccuuucagaagacggcguguucgugauuuccccauag

SEQ ID NO: 42048 - RNA, 633 nt, Artificial Sequence
  derived and/or modified sequence
augucagcuggaaagaugaugcguacucugaucacuacccacccccuaccuuuacugcugcuaccacagcagcucuugcaacugguccaguuucaagagguugacaccgacuuugauuuucccgaggaagauaaaaaagaggaguucgaggaauguuuggagaaauuuuuuagcaccgguccagcuagaccaccuaccaaagagaaaguuaaacgaagaguguugauugagccgggaaugccccugaaccauauagaauauugcaaucacgaaaucaugggaaaaaaugucuauuacaaacauagauggguggcagagcauuauuuccugcugaugcaauacgaugaacugcagaagauuuguuauaaccgguuugugcccugcaaaaacggaauccgcaagugcaaccggagcaagggguugguagaagggguguauuguaaccugacugaggccuuugaaauccccgcuuguaaguaugaaagccuguaucgaaaggguuacguccucaucacguguaguuggcagaacgagaugcagaaaagaaucccacacacaauuaaugaccugguagagccuccugagcacagaaguuuucuuuccgaagauggcguuuuuguaaucagccccuag

SEQ ID NO: 42049 - protein, 181 aa, Artificial Sequence
  derived and/or modified sequence
MAAAAWLQVLPVILLLLGAHPSPLSFFSAGPATVAAADRSKWHIPIPSGKNYFSFGKILFRNTTIFLKFDGEPCDLSLNITWYLKSADCYNEIYNFKAEEVELYLEKLKEKRGLSGKYQTSSKLFQNCSELFKTQTFSGDFMHRLPLLGEKQEAKENGTNLTFIGDKTIQMPFLKKHFLDC

SEQ ID NO: 42050 - DNA, 546 bp, Artificial Sequence
  derived and/or modified sequence
atggccgccgccgcctggctgcaggtgctgcccgtgatcctgctgctgctgggcgcccaccccagccccctgagcttcttcagcgccggccccgccaccgtggccgccgccgacagaagcaagtggcacatccccatccccagcggcaagaactacttcagcttcggcaagatcctgttcagaaacaccaccatcttcctgaagttcgacggcgagccctgcgacctgagcctgaacatcacctggtacctgaagagcgccgactgctacaacgagatctacaacttcaaggccgaggaggtggagctgtacctggagaagctgaaggagaagagaggcctgagcggcaagtaccagaccagcagcaagctgttccagaactgcagcgagctgttcaagacccagaccttcagcggcgacttcatgcacagactgcccctgctgggcgagaagcaggaggccaaggagaacggcaccaacctgaccttcatcggcgacaagaccatccagatgcccttcctgaagaagcacttcctggactgctag

SEQ ID NO: 42051 - DNA, 546 bp, Artificial Sequence
  derived and/or modified sequence
atggccgccgccgcgtggctccaggtgctacctgtgatactactcctcctcggcgcgcacccctctcctctcagcttcttctctgccggccctgcgactgttgcagctgccgaccgctcaaaatggcacatcccgatcccgtcgggtaagaattacttttcttttggtaagatcctgtttcgaaatactacaatcttcctcaaatttgatggagagccatgcgacctgtcattgaatatcacctggtatttgaaatccgccgactgttataatgaaatttacaactttaaagccgaggaagtggaattatatctggaaaagctgaaggagaaacgcggattgtcaggaaaatatcagacctcttccaaactgtttcagaattgctcagaactgtttaaaactcagaccttttccggagattttatgcatagattgccattgctgggcgaaaaacaggaggcaaaggagaacggaactaacctgacgttcataggagataaaaccattcagatgcctttcctcaagaagcactttcttgactgctag

SEQ ID NO: 42052 - DNA, 546 bp, Artificial Sequence
  derived and/or modified sequence
atggctgctgctgcctggctgcaggtgctgcctgtgatcctgctgctgctgggcgcccaccccagccccctgtccttcttctctgctggccctgccaccgtggccgctgctgacaggagcaagtggcacatccccatccccagcggcaagaactacttctcctttgggaagatcctcttcaggaacaccaccatcttcctgaagtttgatggagagccctgtgacctgagcctgaacatcacctggtacctgaagtctgctgactgctacaatgagatctacaacttcaaggccgaggaggtggagctgtacctggagaagctgaaggagaagaggggcctgagcggcaagtaccagaccagcagcaagctgttccagaactgcagcgagctgttcaagacccagaccttcagcggggacttcatgcaccggctgcccctgctgggggagaagcaggaggccaaggaaaatggcaccaacctgaccttcatcggggacaagaccatccagatgcccttcctgaagaagcacttcctggactgctag

SEQ ID NO: 42053 - DNA, 546 bp, Artificial Sequence
  derived and/or modified sequence
atggccgccgccgcctggctgcaggtgctgcccgtgatcctgctgctgctgggcgctcatccttcaccgctgtcgtttttttccgcaggccccgccacagtggcggctgcagacaggtcaaagtggcacattcccattcccagcgggaagaactatttcagctttggtaagatccttttcagaaacaccactatcttcctgaaatttgacggcgaaccctgcgacctttccctgaatattacttggtatctcaagtctgctgactgttacaatgagatttataactttaaggcagaagaggtggaattatacctcgaaaaacttaaagaaaagagaggactgtcaggcaagtaccagaccagttccaaactgttccagaattgcagcgagctcttcaaaactcagacattctcaggtgatttcatgcacagactgcccctcctgggagaaaagcaggaggcgaaggaaaacggaacgaacctcacattcattggagataagactatccaaatgccattcttgaaaaagcactttctggattgctag

SEQ ID NO: 42054 - DNA, 546 bp, Artificial Sequence
  derived and/or modified sequence
atggctgcagctgcctggttacaagtactgcccgtgatcttgctcctgctgggtgctcatcctagccctctaagcttctttagtgctggcccagcgactgtggccgcagcagacagaagcaagtggcatatacccatccctagtgggaagaattacttttccttcggcaagatcctgtttagaaatacgacaatcttcttgaagttcgacggggagccatgtgaccttagccttaacatcacgtggtatctgaaatcagctgattgctataacgaaatatataattttaaggctgaagaggtggaactttacctggagaagctgaaggagaagcgcggactgtcaggcaaatatcagactagttcaaaactgtttcagaactgctccgagttgtttaagacacaaacattttctggcgactttatgcaccggctgccactcctgggagagaaacaagaagccaaagagaacggaactaatctcacatttattggagacaaaaccatacaaatgccatttttgaagaagcatttcttagactgctag

SEQ ID NO: 42055 - DNA, 1716 bp, Artificial Sequence
  derived and/or modified sequence
gacgactgtctgagagaggggccgctacgccgcacagcaaacaagctccgcgacgtttccaggacccggataatcccgcccttagagcagagccggaagaaggcgggacgaaccggaagagggtgaaatgctttcggtaggcactccacggctgtgaagatggcggcggctgcgtggcttcaggtgttgcctgtcattcttctgcttctgggagctcacccgtcaccactgtcgtttttcagtgcgggaccggcaaccgtagctgctgccgaccggtccaaatggcacattccgataccgtcggggaaaaattattttagttttggaaagatcctcttcagaaataccactatcttcctgaagtttgatggagaaccttgtgacctgtctttgaatataacctggtatctgaaaagcgctgattgttacaatgaaatctataacttcaaggcagaagaagtagagttgtatttggaaaaacttaaggaaaaaagaggcttgtctgggaaatatcaaacatcatcaaaattgttccagaactgcagtgaactctttaaaacacagaccttttctggagattttatgcatcgactgcctcttttaggagaaaaacaggaggctaaggagaatggaacaaaccttacctttattggagacaaaaccattcagatgcctttcttgaagaaacatttcttggattgttgaaagactttaataatttccaaagttccaaaagttgattttgatagtttttgccagtgttttcgttgcttttatggatgagtagattttcagagtttcttattctgccattctgaaagtgttctcactacctaaaccccagttttatttgtacagaattttaactgaatgtaagttaggcatgacagtctttgttaatttttttaaacaaaagatagccattaggactgggtacagtggctcacgcctgtaatgccaacactttgggaggccaaggtgggcagatgacttgaggttgggagttcgagaccagcttggccaatgtggtgaaactttgtctttactaaaaatacaaaaattagttgctcatggtggcaggcacctgtaatccaagctactcaggaggctgaggcaggagaatcgcgtgaacttgggaggtggaggctgcagtgagctgagatcacgctactgcactccagcctgggcagccagtgagattccatctcaaaaaaaaaagaaaaaagatattcattggattttctcttactaataggtatatattcactgtgaaaatggagacgatatacataaatgaaaagaagaaaatagtaatctataataccatgcagtgatatatttatcttcctattcttttgtatatgggcatgtttatattattttaaaaagggaatcttagagtatgtattatatgacttttttttgtagcttagcaatataacatggacatgtcgtcagtttggtaaatattgtattgcatcgttacttaaatgcttgtatagtgtcttattgtatgagtacattgcaatttgttcaattctctgttcttgaacttttatgagtttcattatcttggaattttatgcagtgttgtgattaatattttaactacatttgcttttaagtctttattttctgatctcagaagaattgtatattgggataagtttttaattctataacttaaaagtaaaaatcctttgtaattttatgttc

SEQ ID NO: 42056 - protein, 602 aa, Artificial Sequence
  derived and/or modified sequence
MFPAQDALPRSGLNLKEEPLLPAGLGSVRSWMQGAGILDASTAAQSGVGLARAHFEKQPPSNLRKSNFFHFVLAMYDRQGQPVEVERTAFIDFVEKDREPGAEKTNNGIHYRLRLVYNNGLRTEQDLYVRLIDSMSKQAIIYEGQDKNPEMCRVLLTHEIMCSRCCDRKSCGNRNETPSDPVIIDRFFLKFFLKCNQNCLKNAGNPRDMRRFQVVVSTTVSVDGHVLAVSDNMFVHNNSKHGRRARRLDPSEAATPCIKAISPGEGWTTGGATVIVIGDNFFDGLQVVFGNVLVWSELITPHAIRVQTPPRHIPGVVEVTLSYKSKQFCKGCPGRFVYTALNEPTIDYGFQRLQKVIPRHPGDPERLPKEVLLKRAADLAEALYGVPGSNQELLLKRAADVAEALYSTPRAPGPLAPLAPSHPHPAVVGINAFSSPLAIAVGDATPGPEPGYARSCSSASPRGFAPSPGSQQSGYGGGLGAGLGGYGAPGVAGLGVPGSPSFLNGSTATSPFAIMPSSPPLAAASSMSLPAAAPTTSVFSFSPVNMISAVKQRSAFAPVLRPPSSPPQACPRAHGEGLPDQSFEDSDKFHSPARGLQGLAYS

SEQ ID NO: 42057 - protein, 598 aa, Artificial Sequence
  derived and/or modified sequence
MDALPRSGLNLKEEPLLPAGLGSVRSWMQGAGILDASTAAQSGVGLARAHFEKQPPSNLRKSNFFHFVLAMYDRQGQPVEVERTAFIDFVEKDREPGAEKTNNGIHYRLRLVYNNGLRTEQDLYVRLIDSMSKQAIIYEGQDKNPEMCRVLLTHEIMCSRCCDRKSCGNRNETPSDPVIIDRFFLKFFLKCNQNCLKNAGNPRDMRRFQVVVSTTVSVDGHVLAVSDNMFVHNNSKHGRRARRLDPSEAATPCIKAISPGEGWTTGGATVIVIGDNFFDGLQVVFGNVLVWSELITPHAIRVQTPPRHIPGVVEVTLSYKSKQFCKGCPGRFVYTALNEPTIDYGFQRLQKVIPRHPGDPERLPKEVLLKRAADLAEALYGVPGSNQELLLKRAADVAEALYSTPRAPGPLAPLAPSHPHPAVVGINAFSSPLAIAVGDATPGPEPGYARSCSSASPRGFAPSPGSQQSGYGGGLGAGLGGYGAPGVAGLGVPGSPSFLNGSTATSPFAIMPSSPPLAAASSMSLPAAAPTTSVFSFSPVNMISAVKQRSAFAPVLRPPSSPPQACPRAHGEGLPDQSFEDSDKFHSPARGLQGLAYS

SEQ ID NO: 42058 - DNA, 1809 bp, Artificial Sequence
  derived and/or modified sequence
atgttcccagcccaggatgcactgccccgctctggattgaaccttaaggaggagcccctgctcccagccggccttggttcggtgaggtcatggatgcagggcgcagggattcttgacgcatctactgcagcccagagtggtgttggactagcaagggctcatttcgagaaacagccgccctctaacctgcgcaagtctaatttctttcattttgtcctggcgatgtacgacaggcaaggacagccggttgaagtggaacgcacagcctttattgacttcgtcgaaaaggacagggagcccggggcagagaagacaaataacgggatacactatcgcctcagattggtgtacaataatggactacgtactgagcaggatctgtatgtgaggctaattgactctatgtcaaaacaggctatcatctacgagggtcaagacaagaatccagaaatgtgccgtgtattactgactcatgaaatcatgtgctctagatgctgcgaccgaaaatcatgtggaaaccggaatgagactccaagcgatcccgtaattatcgacaggttttttctaaagtttttcctgaaatgcaatcagaactgtctgaagaacgcgggaaaccctcgcgacatgcgccggttccaggtagtggttagtacaactgtcagcgtggatggacatgtcctggcggtatccgacaatatgttcgttcacaacaatagtaaacacggaagaagagccaggcgactggatccttcggaggccgctacaccttgcatcaaagctataagtccaggcgaggggtggaccactggcggagcgactgtaattgtgatcggagacaattttttcgatggactgcaggtagtcttcggcaacgtactcgtgtggagcgaactcatcactccgcacgcaataagggttcagactcctccacgccacataccaggagtagtggaggtgacactatcctataagagtaagcagttttgcaagggatgccccggcagattcgtgtacacggccctgaatgaacccaccatcgactatggttttcagaggctccagaaagtcatcccaagacatccgggcgaccctgagaggctgccaaaagaggtgttactcaaacgcgctgccgacctggccgaggccctgtacggagtcccaggcagcaaccaggagctgctgttaaaacgggccgccgacgtggcagaggctctttatagcaccccacgggccccgggtcccctggccccattggctcctagtcacccccatccggcggtggtggggattaacgccttctcaagccctctggccatcgctgtgggagacgccacacctggccctgaaccgggatacgcccgctcctgctcgtcggcttcaccacgggggttcgcaccaagccctggttcacaacagagtggctatggtgggggcctcggcgctggactcggcggatacggggctccaggcgtagctggtttgggagtgcccggatccccatcatttttaaacggcagcaccgctacatcaccttttgctatcatgccctccagtccacccctggccgccgcaagctctatgtccctgcccgcagccgcaccgaccacgtccgtctttagcttctctcctgtcaacatgatttccgcagtcaaacagcgtagtgcctttgcaccagtgctccggccacctagcagtcccccacaagcttgcccccgcgctcacggagaaggcttgcctgaccaatcttttgaagactccgacaagttccacagccctgcccgagggttgcagggactggcctatagttag

SEQ ID NO: 42059 - DNA, 1797 bp, Artificial Sequence
  derived and/or modified sequence
atggatgcgctgccgcgcagcggcctaaacctcaaggaagagcccctactcccggccggcctaggctccgtgcggtcatggatgcagggtgcgggcatcctggacgctagtactgccgcacagtccggagtcggcttagccagggcccactttgagaaacaaccaccctccaatctgcgcaagtctaatttcttccactttgtccttgccatgtatgatcgccaagggcagcccgtcgaagtcgagcgcacagcctttattgactttgtggaaaaggacagagaaccgggagcagaaaagacgaataatggcatccactacaggttaaggctcgtctataataacggcctcagaactgagcaagatctgtatgtcaggctcatcgactccatgtccaagcaggcgatcatatacgagggccaggataagaatcccgaaatgtgtcgtgttctgctgacccatgagatcatgtgctccaggtgctgcgatcggaagtcctgtggaaaccggaacgagaccccctcagacccagtgattatcgatcggttttttctcaagttctttcttaagtgcaatcagaattgtctgaaaaacgcgggcaacccccgggacatgcgaagattccaggtcgtggtgtctacaaccgtgtctgtggacgggcatgtcctggccgtgtccgacaatatgttcgtgcacaataattcaaagcacgggcggcgcgcccgccggctggatccatcagaggctgcaaccccttgcatcaaggcgatcagtccaggcgaaggttggacaaccggaggggccaccgtcatcgtcatcggagataatttttttgatggccttcaagtcgtgttcggcaacgtgttggtctggagtgagcttattacgcctcacgccattagagtgcagacaccgccaaggcatattcccggagtagtagaggtaactctgagctacaaatccaagcagttttgcaaaggctgccctggaagattcgtgtacacagctctgaatgagcccacgattgactacggtttccagcgtctgcaaaaagtgattccccggcatcccggtgaccccgagcgcctcccaaaagaagttttactgaagcgagcagcagatctcgcagaagccctctatggagtgccaggatcaaatcaggagctgctcctaaaaagggccgccgatgtcgcagaggctctatactcgactcccagagcacctggacccctggccccccttgctcccagccacccccaccccgctgtggtcgggatcaacgccttttcttctcctctcgccatagcagtgggggatgccactccaggcccggagccggggtatgcccgcagctgctcaagcgcttcccccaggggcttcgcaccttctcctggctcgcagcaatctggctacggtgggggtctaggggcgggtctcgggggctacggggcaccgggtgtggccggccttggcgtccccgggtctccatccttcttgaatggcagcacggccacatctccatttgcaatcatgccctcatcccccccactggctgcagccagctccatgtctctgccggccgccgcacccacgactagtgtattctcttttagtcccgttaacatgattagcgctgttaaacagaggagcgcgttcgcgccggtactgcggccccccagctcccccccacaagcttgtccacgcgcacacggagagggcctgcctgaccagagttttgaggacagcgacaaatttcatagtccagctcgcggactgcagggactcgcctactcctag

SEQ ID NO: 42060 - DNA, 1809 bp, Artificial Sequence
  derived and/or modified sequence
atgtttcctgcccaggatgccctgcccaggagcggcctgaacctgaaggaggagcccctgctgcctgctggcctgggctctgtgcgctcctggatgcagggcgccggcatcctggatgccagcacagctgcccagagcggcgtgggcctggcccgggcccactttgagaagcagccccccagcaacctgaggaagagcaacttcttccactttgtgctggccatgtatgaccggcagggccagcctgtggaggtggagaggacagccttcatcgactttgtggagaaggaccgggagcccggggctgagaagaccaacaacggcatccactaccgcctgcggctggtgtacaacaacggcctgaggacagagcaggacctgtatgtgcggctgattgacagcatgagcaagcaggccatcatctatgagggccaggacaagaaccctgagatgtgccgggtgctgctgacccatgagatcatgtgcagccgctgctgtgacaggaagagctgtggcaacagaaatgagacccccagcgaccctgtgatcatcgaccgcttcttcctgaagttcttcctgaagtgcaaccagaactgcctgaagaatgccggcaacccccgggacatgaggcgcttccaggtggtggtgtccaccaccgtgtctgtggatggccacgtgctggccgtgtctgacaacatgtttgtgcacaacaacagcaagcatggaagaagagcccggcggctggaccccagcgaggccgccaccccctgcatcaaggccatcagccctggagagggctggaccactggaggagccaccgtgattgtgattggagacaacttctttgatggcctgcaggtggtgtttggaaatgtgctggtgtggagcgagctgatcaccccccacgccatccgggtgcagaccccacccaggcacatccctggggtggtggaggtgaccctgagctacaagagcaagcagttctgcaagggctgccccggccgctttgtgtacacagccctgaatgagcccaccatcgactatggcttccagaggctgcagaaggtgatccccaggcaccctggggaccctgagcggctgcccaaggaggtgctgctgaagagagctgctgacctggccgaggccctgtatggagtgcccggcagcaaccaggagctgctgctgaagagagctgctgatgtggccgaggccctgtacagcaccccccgggcccctggccccctggcccccctggcccccagccacccccaccctgctgtggtgggcatcaatgccttcagcagccccctggccatcgctgtgggagatgccaccccaggccctgagcccggctacgcccggagctgcagcagcgccagcccccggggctttgcccccagccctggcagccagcagagcggctatggaggcggcctgggcgccggcctgggcggctacggggcccctggggtggccggcctgggcgtgcccggcagccccagcttcctgaatggcagcacagccaccagcccctttgccatcatgcccagcagcccccccctggccgccgccagctccatgagcctgcctgctgctgcccccaccacctctgtgttctccttcagccctgtgaacatgatctctgctgtgaagcagaggtctgcctttgcccctgtgctgcggccccccagcagccccccccaggcctgcccccgggcccacggggagggcctgcctgaccagagctttgaggacagcgacaagttccacagccctgcccggggcctgcagggcctggcctacagctag

SEQ ID NO: 42061 - DNA, 1797 bp, Artificial Sequence
  derived and/or modified sequence
atggatgccctgcccaggagcggcctgaacctgaaggaggagcccctgctgcctgctggcctgggctctgtgcgctcctggatgcagggcgccggcatcctggatgccagcacagctgcccagagcggcgtgggcctggcccgggcccactttgagaagcagccccccagcaacctgaggaagagcaacttcttccactttgtgctggccatgtatgaccggcagggccagcctgtggaggtggagaggacagccttcatcgactttgtggagaaggaccgggagcccggggctgagaagaccaacaacggcatccactaccgcctgcggctggtgtacaacaacggcctgaggacagagcaggacctgtatgtgcggctgattgacagcatgagcaagcaggccatcatctatgagggccaggacaagaaccctgagatgtgccgggtgctgctgacccatgagatcatgtgcagccgctgctgtgacaggaagagctgtggcaacagaaatgagacccccagcgaccctgtgatcatcgaccgcttcttcctgaagttcttcctgaagtgcaaccagaactgcctgaagaatgccggcaacccccgggacatgaggcgcttccaggtggtggtgtccaccaccgtgtctgtggatggccacgtgctggccgtgtctgacaacatgtttgtgcacaacaacagcaagcatggaagaagagcccggcggctggaccccagcgaggccgccaccccctgcatcaaggccatcagccctggagagggctggaccactggaggagccaccgtgattgtgattggagacaacttctttgatggcctgcaggtggtgtttggaaatgtgctggtgtggagcgagctgatcaccccccacgccatccgggtgcagaccccacccaggcacatccctggggtggtggaggtgaccctgagctacaagagcaagcagttctgcaagggctgccccggccgctttgtgtacacagccctgaatgagcccaccatcgactatggcttccagaggctgcagaaggtgatccccaggcaccctggggaccctgagcggctgcccaaggaggtgctgctgaagagagctgctgacctggccgaggccctgtatggagtgcccggcagcaaccaggagctgctgctgaagagagctgctgatgtggccgaggccctgtacagcaccccccgggcccctggccccctggcccccctggcccccagccacccccaccctgctgtggtgggcatcaatgccttcagcagccccctggccatcgctgtgggagatgccaccccaggccctgagcccggctacgcccggagctgcagcagcgccagcccccggggctttgcccccagccctggcagccagcagagcggctatggaggcggcctgggcgccggcctgggcggctacggggcccctggggtggccggcctgggcgtgcccggcagccccagcttcctgaatggcagcacagccaccagcccctttgccatcatgcccagcagcccccccctggccgccgccagctccatgagcctgcctgctgctgcccccaccacctctgtgttctccttcagccctgtgaacatgatctctgctgtgaagcagaggtctgcctttgcccctgtgctgcggccccccagcagccccccccaggcctgcccccgggcccacggggagggcctgcctgaccagagctttgaggacagcgacaagttccacagccctgcccggggcctgcagggcctggcctacagctag

SEQ ID NO: 42062 - DNA, 1809 bp, Artificial Sequence
  derived and/or modified sequence
atgttccccgcccaggacgccctgccccggagcggcctgaacctgaaagaggagccactactacccgccggcttgggcagtgtccgcagttggatgcagggggcggggatcttggacgcaagcaccgctgctcagtcaggggtaggcctcgccagggcacacttcgaaaaacagccacccagtaatctacgaaaatccaacttttttcatttcgtcctcgccatgtatgaccgacaaggccagcccgtggaagtggagaggacagcctttattgactttgtggaaaaggatcgtgagccaggcgcagagaaaaccaataacgggatacactaccgcctacgcttagtgtataacaacggactgcgcactgagcaggatctatatgtgcgccttattgactctatgagcaagcaagccattatttacgagggccaggacaagaatcccgaaatgtgtagagtgttactaactcatgaaattatgtgtagccggtgttgtgaccgaaaatcctgtgggaaccgcaacgaaactccaagcgatcccgtgatcattgataggtttttcctgaagttcttcctgaaatgcaaccaaaattgtttaaagaatgctggcaaccctagagatatgaggcggtttcaggtcgttgtttccaccacggtgtccgtggatggccacgtgcttgcagtatcagacaacatgtttgtgcataataacagcaagcatggtaggagggctcgcagactggaccctagtgaggcggccaccccgtgtatcaaagctatctcccccggggagggctggaccaccggcggcgcaaccgttatcgtcattggagataacttttttgatggactgcaggtggtattcgggaacgtgctggtctggagtgagctgattacacctcacgccatcagagttcagacccctccaaggcacattcctggtgtcgtcgaggtgaccctgtcttacaaaagtaagcaattctgtaagggctgtcccggtagatttgtttataccgctctaaacgagcctaccatagattatggatttcagaggctacaaaaggtcattcctcggcaccctggtgatccagaacggttaccgaaagaagtgttactcaagagagcagcagatctggcagaagcactctacggtgtccctggatcaaaccaggaactgctgttgaaacgtgccgctgatgtggccgaggccttgtatagcaccccgcgggcccccggtcctctggctcccctcgctccttcccacccacatccagccgtggtggggataaacgcatttagctcacccctcgccatcgccgttggagatgctacacccggtcccgagcctgggtacgctagatcatgcagtagtgcaagcccccgcggttttgccccctcacctggatcccagcaatcaggatacggcggagggctgggcgccggactgggaggatatggggctccaggggtggctgggctgggcgttccgggatcgccgtcatttctaaatggaagcactgccacgtcacccttcgccataatgcctagcagtcctccactagctgcggctagcagtatgtctctccctgctgctgctcccacaacatcagtgtttagcttctcccccgttaatatgatttcagctgtcaagcaacggagcgccttcgcgcctgtgcttagacctccgtccagccccccccaggcctgccctcgggcccacggagagggcctgcctgatcaatcgtttgaggacagtgacaagttccattctcccgcacgcggcttacaaggcctcgcttacagctag

SEQ ID NO: 42063 - DNA, 1797 bp, Artificial Sequence
  derived and/or modified sequence
atggacgccctgccccggagcggcctgaacctgaaggaggagcccctattaccggccggcctgggaagtgttcgtagttggatgcagggagctggaatattagacgcgtcgacagccgcgcagtcaggcgtaggcttagccagagctcatttcgagaaacagcctcccagcaatctgcgcaagtcaaacttcttccacttcgtactcgccatgtatgatagacagggccagcctgtggaagtggaaagaaccgcattcattgacttcgtggaaaaggaccgggaacctggcgccgagaagactaataacggcatccactacagactccggttagtttacaacaatggacttcgaacagagcaggatctctacgtcaggctcatcgactctatgagcaagcaggcaatcatctatgagggccaggacaaaaaccctgaaatgtgccgagtgctcctgactcacgagattatgtgctcacgttgttgtgaccgcaagtcctgcggcaacaggaatgaaaccccatcagaccccgtcattatagatcgcttttttcttaaattcttcctcaaatgtaaccagaattgccttaagaatgcagggaatcctcgggatatgaggcgctttcaagtggtcgtgagtacgaccgtttccgtagacggccacgtgcttgcagtgtccgacaatatgttcgttcacaacaatagcaaacatgggagaagggcccgaaggcttgatccaagcgaggcagcgaccccgtgtatcaaggctatctctcctggggaaggctggacaaccggaggagcaactgtgatcgtgatcggcgacaattttttcgacggattgcaggtagtgtttggaaatgtgttagtgtggagcgagctcatcacacctcatgctatccgtgtgcagacaccacctcgacatatacctggcgttgtcgaggttacactctcatacaaatctaagcagttttgtaaaggttgtccaggtcgatttgtttacacagcactcaacgagccaactattgactatggtttccagcgcctgcagaaagtaatccccagacaccccggggatccagagcgcctccctaaggaagtgttactcaaacgagccgcagacctcgcggaagcgctgtatggagtgccgggatccaaccaggagcttctgctcaaacgggcggcggacgtggccgaagcactgtattctacccccagagccccgggacctttggcacccctcgctcccagccatccacacccagctgtagtcggcattaatgccttttcgagccctctcgcaattgctgtcggagacgccacacccggacccgagcccggctatgctcgctcctgcagctccgcaagtccacgcgggtttgcgccttctcccggaagtcagcaatctggttatggcgggggcttgggcgccgggctcggaggttacggagcccccggagtggccggcctcggtgtgcctggctccccttcctttctcaatggttcaacagcgacctccccttttgcaatcatgccctccagtccaccgttggcagctgccagctcaatgtcactgcctgcggctgctccaacgacatccgtgttttcattttcacctgtaaacatgattagcgcggtcaagcagcgctcagcttttgctccagtcctgcgccccccctctagtccgccccaggcatgtcccagggcccacggcgagggcctgcccgaccaatcttttgaggacagtgacaagttccactcccccgccagggggctacaaggattggcatactcgtag

SEQ ID NO: 42064 - DNA, 1809 bp, Artificial Sequence
  derived and/or modified sequence
atgttcccagcgcaagatgctctacccaggtctgggctgaatttaaaggaggaacccctgttgcctgccggattgggctccgtgagatcttggatgcaaggagccggaatcttggacgcttctactgccgcacagtctggagtaggactggccagagctcatttcgagaagcagcccccttcaaatctgcggaagtccaatttcttccacttcgtgcttgccatgtacgacaggcagggccagcccgtggaggtcgaacggactgcctttattgacttcgtggaaaaagaccgcgaacccggagccgaaaagacaaacaacggaatccactatcgccttcgactagtgtacaataatgggctgcggacagaacaggacctatatgtccggcttatagattcaatgtctaagcaggccatcatctacgagggacaggacaaaaacccagaaatgtgccgcgtactgctcacccacgagatcatgtgtagccgctgctgcgaccgcaaaagctgcggcaataggaacgagacgccatcagatcctgtgatcattgacagattcttcctaaaatttttccttaaatgtaatcagaattgtctgaaaaatgccggtaatcccagggacatgcgtcggttccaagtggtcgtctctaccacggttagcgtcgatggacacgtgctggctgtgagcgacaacatgttcgttcataataactccaagcacggaaggagggcacggaggctcgaccccagtgaggcagcgacaccttgtatcaaggcgatttcccccggagagggctggaccacgggaggcgcaaccgtgattgtaattggtgataatttttttgatggccttcaggtcgtgttcggaaacgtgctggtctggtctgaacttataaccccacatgctatcagggtgcaaacgccacctcggcacatccctggggttgttgaagtcactctttcttacaagtctaaacagttctgtaagggctgtccaggaaggttcgtgtatacagcactcaatgagccaaccatcgattatgggtttcagcggctgcaaaaagtaattccgcgacacccaggcgatcccgaacgactgcctaaagaggtgctgctaaagagggctgccgacttagccgaggccctgtacggtgtgccgggttccaaccaggagctgcttctgaaacgagccgctgatgtagcagaagccctgtacagcactcccagagctcctgggcctcttgcccctctggcgccaagtcacccgcacccggcagttgtcggcatcaacgccttctcgtcaccgcttgcaatcgcggtgggcgatgccactcccggtcctgaacctggatacgccaggtcctgttcaagtgcctctcctagggggtttgcacctagtccagggagccagcagtcaggatatgggggaggactgggagctggccttggcggatatggtgcacctggagtggccggattaggcgtgccagggtcccccagctttctaaatggaagcaccgccacaagcccctttgctattatgccatcctcacctccgctggctgctgcctcctcgatgtctctgcccgcagccgctcccaccacctcagtgttctccttctcgccagtgaacatgattagcgccgttaaacaacggtcagcgtttgcccctgtgctgaggccgccaagcagccccccacaggcatgccccagagcccatggagagggcctcccggaccaaagttttgaagattcagacaaattccattcaccagcccgtggcctgcaaggtttggcatattcctag

SEQ ID NO: 42065 - DNA, 1797 bp, Artificial Sequence
  derived and/or modified sequence
atggacgccttaccccgaagtggactgaacctgaaagaggagcctcttctgcctgccggactaggctccgtacgaagctggatgcagggtgctggcattctggatgcttccacagctgcgcaatcgggcgtgggactggcaagagcccacttcgagaaacagccgccatccaatctgcggaaatcaaatttttttcatttcgtactcgcaatgtacgatcgccaaggccagcccgtcgaggtcgaaaggaccgctttcatagacttcgtggaaaaagatagagagcccggagccgaaaagacaaacaacgggattcattataggctgcgcctcgtgtacaataacggactcaggactgaacaagacttgtatgttcgcctcatagactcgatgtctaagcaagcaattatatacgaaggtcaagataaaaaccccgagatgtgtagagtgctgttgactcatgaaatcatgtgcagcaggtgctgcgaccgaaagtcatgcggcaaccggaatgaaacaccctccgaccctgtgataattgataggttcttcctgaagttctttctcaaatgcaaccagaattgcctgaaaaatgcaggcaatcccagagatatgaggcgcttccaggtggtggttagtaccacagtgagtgtggatggccacgttctcgctgtctccgacaacatgtttgtccataataattccaagcatgggagacgagcacgcagactagatccatcggaggccgctaccccgtgcatcaaggcaattagtcccggagaaggttggaccactggcggtgcgactgtcatcgtgatcggggataatttttttgacggcctccaagtggtgttcggcaacgtattggtttggtcagaactcattaccccacacgctattcgtgtgcagaccccccctcggcatatccccggagtagtggaggtcacactctcttacaagagtaagcagttctgtaaaggctgtcctggccgtttcgtttacaccgcgcttaatgagcccactattgattatggcttccagaggcttcagaaggtcattcctcgccaccccggtgatccagaacgactgcctaaggaagttcttttgaaaagagcagccgatctggccgaagcactgtatggagtgcccggaagtaatcaagaacttctgctgaagcgcgctgcggacgtggccgaagctctgtactctactccgagggcccctggacccctggctccactggccccatcccacccacatcctgcagtagtcgggatcaacgcgttctcatcccccctagcgatagccgtaggggatgcgactcctggcccagagcctgggtatgccagatcctgctccagtgcctcaccaagaggtttcgccccttcccctggttcccaacagtcaggttacggcggagggctgggggctgggcttggaggctacggagccccaggcgtggccggactgggggttccaggctcaccctctttcctgaacggtagcactgcaacaagcccttttgccatcatgccttcctctccacctttggcggctgcctcctcaatgtcgttgccagcagccgctccaacgacgagcgtcttttctttttccccggtgaacatgataagcgcagtcaaacagaggtccgcattcgccccagtgctgcgccctcccagctcacctccccaggcgtgtccaagggcacatggagagggtctccccgatcagtccttcgaagatagtgacaaatttcattcaccagcccgtggtctgcaagggctcgcctacagctag

SEQ ID NO: 42066 - DNA, 1809 bp, Artificial Sequence
  derived and/or modified sequence
atgttccccgcccaggacgccctgcccagaagcggcctgaacctgaaggaggagcccctgctgcccgccggcctgggcagcgtgagaagctggatgcagggcgccggcatcctggacgccagcaccgccgcccagagcggcgtgggcctggccagagcccacttcgagaagcagccccccagcaacctgagaaagagcaacttcttccacttcgtgctggccatgtacgacagacagggccagcccgtggaggtggagagaaccgccttcatcgacttcgtggagaaggacagagagcccggcgccgagaagaccaacaacggcatccactacagactgagactggtgtacaacaacggcctgagaaccgagcaggacctgtacgtgagactgatcgacagcatgagcaagcaggccatcatctacgagggccaggacaagaaccccgagatgtgcagagtgctgctgacccacgagatcatgtgcagcagatgctgcgacagaaagagctgcggcaacagaaacgagacccccagcgaccccgtgatcatcgacagattcttcctgaagttcttcctgaagtgcaaccagaactgcctgaagaacgccggcaaccccagagacatgagaagattccaggtggtggtgagcaccaccgtgagcgtggacggccacgtgctggccgtgagcgacaacatgttcgtgcacaacaacagcaagcacggcagaagagccagaagactggaccccagcgaggccgccaccccctgcatcaaggccatcagccccggcgagggctggaccaccggcggcgccaccgtgatcgtgatcggcgacaacttcttcgacggcctgcaggtggtgttcggcaacgtgctggtgtggagcgagctgatcaccccccacgccatcagagtgcagaccccccccagacacatccccggcgtggtggaggtgaccctgagctacaagagcaagcagttctgcaagggctgccccggcagattcgtgtacaccgccctgaacgagcccaccatcgactacggcttccagagactgcagaaggtgatccccagacaccccggcgaccccgagagactgcccaaggaggtgctgctgaagagagccgccgacctggccgaggccctgtacggcgtgcccggcagcaaccaggagctgctgctgaagagagccgccgacgtggccgaggccctgtacagcacccccagagcccccggccccctggcccccctggcccccagccacccccaccccgccgtggtgggcatcaacgccttcagcagccccctggccatcgccgtgggcgacgccacccccggccccgagcccggctacgccagaagctgcagcagcgccagccccagaggcttcgcccccagccccggcagccagcagagcggctacggcggcggcctgggcgccggcctgggcggctacggcgcccccggcgtggccggcctgggcgtgcccggcagccccagcttcctgaacggcagcaccgccaccagccccttcgccatcatgcccagcagcccccccctggccgccgccagcagcatgagcctgcccgccgccgcccccaccaccagcgtgttcagcttcagccccgtgaacatgatcagcgccgtgaagcagagaagcgccttcgcccccgtgctgagaccccccagcagccccccccaggcctgccccagagcccacggcgagggcctgcccgaccagagcttcgaggacagcgacaagttccacagccccgccagaggcctgcagggcctggcctacagctag

SEQ ID NO: 42067 - DNA, 1797 bp, Artificial Sequence
  derived and/or modified sequence
atggacgccctgcccagaagcggcctgaacctgaaggaggagcccctgctgcccgccggcctgggcagcgtgagaagctggatgcagggcgccggcatcctggacgccagcaccgccgcccagagcggcgtgggcctggccagagcccacttcgagaagcagccccccagcaacctgagaaagagcaacttcttccacttcgtgctggccatgtacgacagacagggccagcccgtggaggtggagagaaccgccttcatcgacttcgtggagaaggacagagagcccggcgccgagaagaccaacaacggcatccactacagactgagactggtgtacaacaacggcctgagaaccgagcaggacctgtacgtgagactgatcgacagcatgagcaagcaggccatcatctacgagggccaggacaagaaccccgagatgtgcagagtgctgctgacccacgagatcatgtgcagcagatgctgcgacagaaagagctgcggcaacagaaacgagacccccagcgaccccgtgatcatcgacagattcttcctgaagttcttcctgaagtgcaaccagaactgcctgaagaacgccggcaaccccagagacatgagaagattccaggtggtggtgagcaccaccgtgagcgtggacggccacgtgctggccgtgagcgacaacatgttcgtgcacaacaacagcaagcacggcagaagagccagaagactggaccccagcgaggccgccaccccctgcatcaaggccatcagccccggcgagggctggaccaccggcggcgccaccgtgatcgtgatcggcgacaacttcttcgacggcctgcaggtggtgttcggcaacgtgctggtgtggagcgagctgatcaccccccacgccatcagagtgcagaccccccccagacacatccccggcgtggtggaggtgaccctgagctacaagagcaagcagttctgcaagggctgccccggcagattcgtgtacaccgccctgaacgagcccaccatcgactacggcttccagagactgcagaaggtgatccccagacaccccggcgaccccgagagactgcccaaggaggtgctgctgaagagagccgccgacctggccgaggccctgtacggcgtgcccggcagcaaccaggagctgctgctgaagagagccgccgacgtggccgaggccctgtacagcacccccagagcccccggccccctggcccccctggcccccagccacccccaccccgccgtggtgggcatcaacgccttcagcagccccctggccatcgccgtgggcgacgccacccccggccccgagcccggctacgccagaagctgcagcagcgccagccccagaggcttcgcccccagccccggcagccagcagagcggctacggcggcggcctgggcgccggcctgggcggctacggcgcccccggcgtggccggcctgggcgtgcccggcagccccagcttcctgaacggcagcaccgccaccagccccttcgccatcatgcccagcagcccccccctggccgccgccagcagcatgagcctgcccgccgccgcccccaccaccagcgtgttcagcttcagccccgtgaacatgatcagcgccgtgaagcagagaagcgccttcgcccccgtgctgagaccccccagcagccccccccaggcctgccccagagcccacggcgagggcctgcccgaccagagcttcgaggacagcgacaagttccacagccccgccagaggcctgcagggcctggcctacagctag

SEQ ID NO: 42068 - DNA, 2648 bp, Artificial Sequence
  derived and/or modified sequence
atgttccctgcgcaggacgctctgccccgcagcgggctgaacctgaaggaggagccgctgctgcccgccggcctgggctcagtgcgctcctggatgcagggcgcgggcatcctggacgccagcaccgcggcgcagagtggcgtgggtctggcacgagcacattttgagaagcagcctccctccaacctcaggaaatccaacttcttccacttcgtgctggccatgtacgaccggcaggggcagcccgtggaggtggagcgcacagccttcatcgacttcgtggaaaaggaccgagagcccggggcggaaaagactaacaatgggatccattaccgcctccggctggtgtataacaatggactgcggacagagcaagacctctacgtgcgtctcatcgactccatgtccaaacaggccatcatctatgaggggcaggacaagaaccccgaaatgtgccgagtgctgctcacccatgagatcatgtgcagccggtgctgtgaccggaagagctgtggcaaccggaatgagacgccctcagaccccgtcatcattgacaggttcttcctcaagttcttcctcaaatgcaaccagaactgcctgaagaatgcggggaatcccagagacatgcgccgcttccaggtggtggtgtccacgacggtgagcgtggacggacacgtgctggccgtgtccgacaacatgtttgtgcacaacaactccaagcatggccgcagggcgcgccgcctggacccctccgaagctgccaccccctgcatcaaggccatcagccccggggagggctggaccacgggcggcgccaccgtcattgtcatcggcgacaacttcttcgacgggttgcaggtcgtgttcggaaacgtgctcgtgtggagcgagctcatcacgccccacgccatccgggtgcagacgcccccgcggcacatccccggggtggtggaggtgaccctctcctacaagtccaagcagttttgcaagggatgccccggccgctttgtctacacagctctgaacgagcccaccattgactacggattccagaggctacagaaagtcattcccagacaccccggagaccccgagaggctgcccaaggaagtgctgctgaagcgggcggccgacttggcagaagccctgtacggagtgcccggcagtaaccaggagctgctcctgaagcgcgcggcggacgtggccgaggctctgtacagcaccccccgcgcacccgggccgctcgcacccctggccccgagccacccacaccccgccgtcgtgggcatcaacgccttcagcagcccgctggccatcgccgtcggggacgccaccccggggcccgagccgggctacgcgcgcagctgcagcagcgcgtccccccgcgggttcgcgcccagccccggctcgcagcagagcggctacggcggcggcctcggagctggcctgggcggctacggcgcgccgggcgtggccggcctcggcgtgcctgggtcccccagcttcctcaatggctccaccgccacctcgcccttcgccatcatgccctctagccccccgctggcggctgcctcctccatgtccctcccggccgctgcccccaccaccagcgtgttctccttctcgcctgtcaacatgatctccgccgtcaaacagaggagcgccttcgcccccgtgctgcgccccccaagctccccaccccaggcctgccccagagcccacggagaggggcttccagaccagtcttttgaggattctgacaagtttcactctccagcccgggggcttcagggcctggcatactcctaattacggtctgcagctgttcccatggagcccggactggaggtccctctgggattcacagccacaccccggatggtggcacagacagatgcagggccagggccatgggcggacctcaacccgtgagctgaacggggagaggccttcaccccatgctcaagcctccccgctagcagccccacaggcttctctcgcctccctgtcttggggtagtcagaagccccagcactgtgcagatgctcttggcaggacagcatcgcagggaggtgctgggattctgggcctcactgtctgggtcttggttcctctgaaagagatggatcttgtgcagaccagggttgttgagtgaggggagcgtgggatggggaccgtgggaaagaggacagctcagggagaagtgacctggaaaggtcctgtttgcatctgacccatctcaactggcccagcatcccaacttctctgcagcgaaagggtggcgccccgcagcctcgggaggcctgcccaggctcccgtggagcttccaacagctgcttggccccgcagctgcccccacttcctttgagacctgcactctcatgcttgccgcatcatgcctccctgtgggggctttgggcatggaggaggcagaagagggggtgccaggcctcctgtatttggggtcttcccccagtggatgtctcatggactctggccccacacactcacaatgactctggctggccccacgcagcgggcccagccgccccccaggtggcctcacattctgctctgctaagtttggagaaaacagaacaataaaccagatgcaggtggtgcccgcccggcctctcacctgcctcctt

SEQ ID NO: 42069 - DNA, 2910 bp, Artificial Sequence
  derived and/or modified sequence
gcggccgcggcggggcggcgcgggaaccgggccccggggggagtcggccgggctgctgctgctgctgctccaggtgctgccgcccggggctacggcagggccgggacgccggggcacgcggggcgctggcgctggcggcggcggcgtctgctggcccggcgcggccccagcctttccccgggacgcgcggctgctgctgctcctgccgccgctgccgccactgtcgccgccgccgccgagctccgcgcccgcagcctccgcctcccggatggacgctctgccccgcagcgggctgaacctgaaggaggagccgctgctgcccgccggcctgggctcagtgcgctcctggatgcagggcgcgggcatcctggacgccagcaccgcggcgcagagtggcgtgggtctggcacgagcacattttgagaagcagcctccctccaacctcaggaaatccaacttcttccacttcgtgctggccatgtacgaccggcaggggcagcccgtggaggtggagcgcacagccttcatcgacttcgtggaaaaggaccgagagcccggggcggaaaagactaacaatgggatccattaccgcctccggctggtgtataacaatggactgcggacagagcaagacctctacgtgcgtctcatcgactccatgtccaaacaggccatcatctatgaggggcaggacaagaaccccgaaatgtgccgagtgctgctcacccatgagatcatgtgcagccggtgctgtgaccggaagagctgtggcaaccggaatgagacgccctcagaccccgtcatcattgacaggttcttcctcaagttcttcctcaaatgcaaccagaactgcctgaagaatgcggggaatcccagagacatgcgccgcttccaggtggtggtgtccacgacggtgagcgtggacggacacgtgctggccgtgtccgacaacatgtttgtgcacaacaactccaagcatggccgcagggcgcgccgcctggacccctccgaagctgccaccccctgcatcaaggccatcagccccggggagggctggaccacgggcggcgccaccgtcattgtcatcggcgacaacttcttcgacgggttgcaggtcgtgttcggaaacgtgctcgtgtggagcgagctcatcacgccccacgccatccgggtgcagacgcccccgcggcacatccccggggtggtggaggtgaccctctcctacaagtccaagcagttttgcaagggatgccccggccgctttgtctacacagctctgaacgagcccaccattgactacggattccagaggctacagaaagtcattcccagacaccccggagaccccgagaggctgcccaaggaagtgctgctgaagcgggcggccgacttggcagaagccctgtacggagtgcccggcagtaaccaggagctgctcctgaagcgcgcggcggacgtggccgaggctctgtacagcaccccccgcgcacccgggccgctcgcacccctggccccgagccacccacaccccgccgtcgtgggcatcaacgccttcagcagcccgctggccatcgccgtcggggacgccaccccggggcccgagccgggctacgcgcgcagctgcagcagcgcgtccccccgcgggttcgcgcccagccccggctcgcagcagagcggctacggcggcggcctcggagctggcctgggcggctacggcgcgccgggcgtggccggcctcggcgtgcctgggtcccccagcttcctcaatggctccaccgccacctcgcccttcgccatcatgccctctagccccccgctggcggctgcctcctccatgtccctcccggccgctgcccccaccaccagcgtgttctccttctcgcctgtcaacatgatctccgccgtcaaacagaggagcgccttcgcccccgtgctgcgccccccaagctccccaccccaggcctgccccagagcccacggagaggggcttccagaccagtcttttgaggattctgacaagtttcactctccagcccgggggcttcagggcctggcatactcctaattacggtctgcagctgttcccatggagcccggactggaggtccctctgggattcacagccacaccccggatggtggcacagacagatgcagggccagggccatgggcggacctcaacccgtgagctgaacggggagaggccttcaccccatgctcaagcctccccgctagcagccccacaggcttctctcgcctccctgtcttggggtagtcagaagccccagcactgtgcagatgctcttggcaggacagcatcgcagggaggtgctgggattctgggcctcactgtctgggtcttggttcctctgaaagagatggatcttgtgcagaccagggttgttgagtgaggggagcgtgggatggggaccgtgggaaagaggacagctcagggagaagtgacctggaaaggtcctgtttgcatctgacccatctcaactggcccagcatcccaacttctctgcagcgaaagggtggcgccccgcagcctcgggaggcctgcccaggctcccgtggagcttccaacagctgcttggccccgcagctgcccccacttcctttgagacctgcactctcatgcttgccgcatcatgcctccctgtgggggctttgggcatggaggaggcagaagagggggtgccaggcctcctgtatttggggtcttcccccagtggatgtctcatggactctggccccacacactcacaatgactctggctggccccacgcagcgggcccagccgccccccaggtggcctcacattctgctctgctaagtttggagaaaacagaacaataaaccagatgcaggtggtgcccgcccggcctctcacctgcctccttggtgtg

SEQ ID NO: 42070 - protein, 2647 aa, Artificial Sequence
  derived and/or modified sequence
MSSSHSRAGQSAAGAAPGGGVDTRDAEMPATEKDLAEDAPWKKIQQNTFTRWCNEHLKCVSKRIANLQTDLSDGLRLIALLEVLSQKKMHRKHNQRPTFRQMQLENVSVALEFLDRESIKLVSIDSKAIVDGNLKLILGLIWTLILHYSISMPMWDEEEDEEAKKQTPKQRLLGWIQNKLPQLPITNFSRDWQSGRALGALVDSCAPGLCPDWDSWDASKPVTNAREAMQQADDWLGIPQVITPEEIVDPNVDEHSVMTYLSQFPKAKLKPGAPLRPKLNPKKARAYGPGIEPTGNMVKKRAEFTVETRSAGQGEVLVYVEDPAGHQEEAKVTANNDKNRTFSVWYVPEVTGTHKVTVLFAGQHIAKSPFEVYVDKSQGDASKVTAQGPGLEPSGNIANKTTYFEIFTAGAGTGEVEVVIQDPMGQKGTVEPQLEARGDSTYRCSYQPTMEGVHTVHVTFAGVPIPRSPYTVTVGQACNPSACRAVGRGLQPKGVRVKETADFKVYTKGAGSGELKVTVKGPKGEERVKQKDLGDGVYGFEYYPMVPGTYIVTITWGGQNIGRSPFEVKVGTECGNQKVRAWGPGLEGGVVGKSADFVVEAIGDDVGTLGFSVEGPSQAKIECDDKGDGSCDVRYWPQEAGEYAVHVLCNSEDIRLSPFMADIRDAPQDFHPDRVKARGPGLEKTGVAVNKPAEFTVDAKHGGKAPLRVQVQDNEGCPVEALVKDNGNGTYSCSYVPRKPVKHTAMVSWGGVSIPNSPFRVNVGAGSHPNKVKVYGPGVAKTGLKAHEPTYFTVDCAEAGQGDVSIGIKCAPGVVGPAEADIDFDIIRNDNDTFTVKYTPRGAGSYTIMVLFADQATPTSPIRVKVEPSHDASKVKAEGPGLSRTGVELGKPTHFTVNAKAAGKGKLDVQFSGLTKGDAVRDVDIIDHHDNTYTVKYTPVQQGPVGVNVTYGGDPIPKSPFSVAVSPSLDLSKIKVSGLGEKVDVGKDQEFTVKSKGAGGQGKVASKIVGPSGAAVPCKVEPGLGADNSVVRFLPREEGPYEVEVTYDGVPVPGSPFPLEAVAPTKPSKVKAFGPGLQGGSAGSPARFTIDTKGAGTGGLGLTVEGPCEAQLECLDNGDGTCSVSYVPTEPGDYNINILFADTHIPGSPFKAHVVPCFDASKVKCSGPGLERATAGEVGQFQVDCSSAGSAELTIEICSEAGLPAEVYIQDHGDGTHTITYIPLCPGAYTVTIKYGGQPVPNFPSKLQVEPAVDTSGVQCYGPGIEGQGVFREATTEFSVDARALTQTGGPHVKARVANPSGNLTETYVQDRGDGMYKVEYTPYEEGLHSVDVTYDGSPVPSSPFQVPVTEGCDPSRVRVHGPGIQSGTTNKPNKFTVETRGAGTGGLGLAVEGPSEAKMSCMDNKDGSCSVEYIPYEAGTYSLNVTYGGHQVPGSPFKVPVHDVTDASKVKCSGPGLSPGMVRANLPQSFQVDTSKAGVAPLQVKVQGPKGLVEPVDVVDNADGTQTVNYVPSREGPYSISVLYGDEEVPRSPFKVKVLPTHDASKVKASGPGLNTTGVPASLPVEFTIDAKDAGEGLLAVQITDPEGKPKKTHIQDNHDGTYTVAYVPDVTGRYTILIKYGGDEIPFSPYRVRAVPTGDASKCTVTVSIGGHGLGAGIGPTIQIGEETVITVDTKAAGKGKVTCTVCTPDGSEVDVDVVENEDGTFDIFYTAPQPGKYVICVRFGGEHVPNSPFQVTALAGDQPSVQPPLRSQQLAPQYTYAQGGQQTWAPERPLVGVNGLDVTSLRPFDLVIPFTIKKGEITGEVRMPSGKVAQPTITDNKDGTVTVRYAPSEAGLHEMDIRYDNMHIPGSPLQFYVDYVNCGHVTAYGPGLTHGVVNKPATFTVNTKDAGEGGLSLAIEGPSKAEISCTDNQDGTCSVSYLPVLPGDYSILVKYNEQHVPGSPFTARVTGDDSMRMSHLKVGSAADIPINISETDLSLLTATVVPPSGREEPCLLKRLRNGHVGISFVPKETGEHLVHVKKNGQHVASSPIPVVISQSEIGDASRVRVSGQGLHEGHTFEPAEFIIDTRDAGYGGLSLSIEGPSKVDINTEDLEDGTCRVTYCPTEPGNYIINIKFADQHVPGSPFSVKVTGEGRVKESITRRRRAPSVANVGSHCDLSLKIPEISIQDMTAQVTSPSGKTHEAEIVEGENHTYCIRFVPAEMGTHTVSVKYKGQHVPGSPFQFTVGPLGEGGAHKVRAGGPGLERAEAGVPAEFSIWTREAGAGGLAIAVEGPSKAEISFEDRKDGSCGVAYVVQEPGDYEVSVKFNEEHIPDSPFVVPVASPSGDARRLTVSSLQESGLKVNQPASFAVSLNGAKGAIDAKVHSPSGALEECYVTEIDQDKYAVRFIPRENGVYLIDVKFNGTHIPGSPFKIRVGEPGHGGDPGLVSAYGAGLEGGVTGNPAEFVVNTSNAGAGALSVTIDGPSKVKMDCQECPEGYRVTYTPMAPGSYLISIKYGGPYHIGGSPFKAKVTGPRLVSNHSLHETSSVFVDSLTKATCAPQHGAPGPGPADASKVVAKGLGLSKAYVGQKSSFTVDCSKAGNNMLLVGVHGPRTPCEEILVKHVGSRLYSVSYLLKDKGEYTLVVKWGDEHIPGSPYRVVVP

SEQ ID NO: 42071 - DNA, 8382 bp, Artificial Sequence
  derived and/or modified sequence
gcgcgtcgcgcgcagcggacgccgacagaatccccgaggcgcctggcgcgggcgcgggcgcgaaggcgatccgggcgccaccccgcggtcatcggtcaccggtcgctctcaggaacagcagcgcaacctctgctccctgcctcgcctcccgcgcgcctaggtgcctgcgactttaattaaagggccgtcccctcgccgaggctgcagcaccgcccccccggcttctcgcgcctcaaaatgagtagctcccactctcgggcgggccagagcgcagcaggcgcggctccgggcggcggcgtcgacacgcgggacgccgagatgccggccaccgagaaggacctggcggaggacgcgccgtggaagaagatccagcagaacactttcacgcgctggtgcaacgagcacctgaagtgcgtgagcaagcgcatcgccaacctgcagacggacctgagcgacgggctgcggcttatcgcgctgttggaggtgctcagccagaagaagatgcaccgcaagcacaaccagcggcccactttccgccaaatgcagcttgagaacgtgtcggtggcgctcgagttcctggaccgcgagagcatcaaactggtgtccatcgacagcaaggccatcgtggacgggaacctgaagctgatcctgggcctcatctggaccctgatcctgcactactccatctccatgcccatgtgggacgaggaggaggatgaggaggccaagaagcagacccccaagcagaggctcctgggctggatccagaacaagctgccgcagctgcccatcaccaacttcagccgggactggcagagcggccgggccctgggcgccctggtggacagctgtgccccgggcctgtgtcctgactgggactcttgggacgccagcaagcccgttaccaatgcgcgagaggccatgcagcaggcggatgactggctgggcatcccccaggtgatcacccccgaggagattgtggaccccaacgtggacgagcactctgtcatgacctacctgtcccagttccccaaggccaagctgaagccaggggctcccttgcggcccaaactgaacccgaagaaagcccgtgcctacgggccaggcatcgagcccacaggcaacatggtgaagaagcgggcagagttcactgtggagaccagaagtgctggccagggagaggtgctggtgtacgtggaggacccggccggacaccaggaggaggcaaaagtgaccgccaataacgacaagaaccgcaccttctccgtctggtacgtccccgaggtgacggggactcataaggttactgtgctctttgctggccagcacatcgccaagagccccttcgaggtgtacgtggataagtcacagggtgacgccagcaaagtgacagcccaaggtcccggcctggagcccagtggcaacatcgccaacaagaccacctactttgagatctttacggcaggagctggcacgggcgaggtcgaggttgtgatccaggaccccatgggacagaagggcacggtagagcctcagctggaggcccggggcgacagcacataccgctgcagctaccagcccaccatggagggcgtccacaccgtgcacgtcacgtttgccggcgtgcccatccctcgcagcccctacactgtcactgttggccaagcctgtaacccgagtgcctgccgggcggttggccggggcctccagcccaagggtgtgcgggtgaaggagacagctgacttcaaggtgtacacaaagggcgctggcagtggggagctgaaggtcaccgtgaagggccccaagggagaggagcgcgtgaagcagaaggacctgggggatggcgtgtatggcttcgagtattaccccatggtccctggaacctatatcgtcaccatcacgtggggtggtcagaacatcgggcgcagtcccttcgaagtgaaggtgggcaccgagtgtggcaatcagaaggtacgggcctggggccctgggctggagggcggcgtcgttggcaagtcagcagactttgtggtggaggctatcggggacgacgtgggcacgctgggcttctcggtggaagggccatcgcaggctaagatcgaatgtgacgacaagggcgacggctcctgtgatgtgcgctactggccgcaggaggctggcgagtatgccgttcacgtgctgtgcaacagcgaagacatccgcctcagccccttcatggctgacatccgtgacgcgccccaggacttccacccagacagggtgaaggcacgtgggcctggattggagaagacaggtgtggccgtcaacaagccagcagagttcacagtggatgccaagcacggtggcaaggccccacttcgggtccaagtccaggacaatgaaggctgccctgtggaggcgttggtcaaggacaacggcaatggcacttacagctgctcctacgtgcccaggaagccggtgaagcacacagccatggtgtcctggggaggcgtcagcatccccaacagccccttcagggtgaatgtgggagctggcagccaccccaacaaggtcaaagtatacggccccggagtagccaagacagggctcaaggcccacgagcccacctacttcactgtggactgcgccgaggctggccagggggacgtcagcatcggcatcaagtgtgcccctggagtggtaggccccgccgaagctgacatcgacttcgacatcatccgcaatgacaatgacaccttcacggtcaagtacacgccccggggggctggcagctacaccattatggtcctctttgctgaccaggccacgcccaccagccccatccgagtcaaggtggagccctctcatgacgccagtaaggtgaaggccgagggccctggcctcagtcgcactggtgtcgagcttggcaagcccacccacttcacagtaaatgccaaagctgctggcaaaggcaagctggacgtccagttctcaggactcaccaagggggatgcagtgcgagatgtggacatcatcgaccaccatgacaacacctacacagtcaagtacacgcctgtccagcagggtccagtaggcgtcaatgtcacttatggaggggatcccatccctaagagccctttctcagtggcagtatctccaagcctggacctcagcaagatcaaggtgtctggcctgggagagaaggtggacgttggcaaagaccaggagttcacagtcaaatcaaagggtgctggtggtcaaggcaaagtggcatccaagattgtgggcccctcgggtgcagcggtgccctgcaaggtggagccaggcctgggggctgacaacagtgtggtgcgcttcctgccccgtgaggaagggccctatgaggtggaggtgacctatgacggcgtgcccgtgcctggcagcccctttcctctggaagctgtggcccccaccaagcctagcaaggtgaaggcgtttgggccggggctgcagggaggcagtgcgggctcccccgcccgcttcaccatcgacaccaagggcgccggcacaggtggcctgggcctgacggtggagggcccctgtgaggcgcagctcgagtgcttggacaatggggatggcacatgttccgtgtcctacgtgcccaccgagcccggggactacaacatcaacatcctcttcgctgacacccacatccctggctccccattcaaggcccacgtggttccctgctttgacgcatccaaagtcaagtgctcaggccccgggctggagcgggccaccgctggggaggtgggccaattccaagtggactgctcgagcgcgggcagcgcggagctgaccattgagatctgctcggaggcggggcttccggccgaggtgtacatccaggaccacggtgatggcacgcacaccattacctacattcccctctgccccggggcctacaccgtcaccatcaagtacggcggccagcccgtgcccaacttccccagcaagctgcaggtggaacctgcggtggacacttccggtgtccagtgctatgggcctggtattgagggccagggtgtcttccgtgaggccaccactgagttcagtgtggacgcccgggctctgacacagaccggagggccgcacgtcaaggcccgtgtggccaacccctcaggcaacctgacggagacctacgttcaggaccgtggcgatggcatgtacaaagtggagtacacgccttacgaggagggactgcactccgtggacgtgacctatgacggcagtcccgtgcccagcagccccttccaggtgcccgtgaccgagggctgcgacccctcccgggtgcgtgtccacgggccaggcatccaaagtggcaccaccaacaagcccaacaagttcactgtggagaccaggggagctggcacgggcggcctgggcctggctgtagagggcccctccgaggccaagatgtcctgcatggataacaaggacggcagctgctcggtcgagtacatcccttatgaggctggcacctacagcctcaacgtcacctatggtggccatcaagtgccaggcagtcctttcaaggtccctgtgcatgatgtgacagatgcgtccaaggtcaagtgctctgggcccggcctgagcccaggcatggttcgtgccaacctccctcagtccttccaggtggacacaagcaaggctggtgtggccccattgcaggtcaaagtgcaagggcccaaaggcctggtggagccagtggacgtggtagacaacgctgatggcacccagaccgtcaattatgtgcccagccgagaagggccctacagcatctcagtactgtatggagatgaagaggtaccccggagccccttcaaggtcaaggtgctgcctactcatgatgccagcaaggtgaaggccagtggccccgggctcaacaccactggcgtgcctgccagcctgcccgtggagttcaccatcgatgcaaaggacgccggggagggcctgctggctgtccagatcacggatcccgaaggcaagccgaagaagacacacatccaagacaaccatgacggcacgtatacagtggcctacgtgccagacgtgacaggtcgctacaccatcctcatcaagtacggtggtgacgagatccccttctccccgtaccgcgtgcgtgccgtgcccaccggggacgccagcaagtgcactgtcacagtgtcaatcggaggtcacgggctaggtgctggcatcggccccaccattcagattggggaggagacggtgatcactgtggacactaaggcggcaggcaaaggcaaagtgacgtgcaccgtgtgcacgcctgatggctcagaggtggatgtggacgtggtggagaatgaggacggcactttcgacatcttctacacggccccccagccgggcaaatacgtcatctgtgtgcgctttggtggcgagcacgtgcccaacagccccttccaagtgacggctctggctggggaccagccctcggtgcagccccctctacggtctcagcagctggccccacagtacacctacgcccagggcggccagcagacttgggccccggagaggcccctggtgggtgtcaatgggctggatgtgaccagcctgaggccctttgaccttgtcatccccttcaccatcaagaagggcgagatcacaggggaggttcggatgccctcaggcaaggtggcgcagcccaccatcactgacaacaaagacggcaccgtgaccgtgcggtatgcacccagcgaggctggcctgcacgagatggacatccgctatgacaacatgcacatcccaggaagccccttgcagttctatgtggattacgtcaactgtggccatgtcactgcctatgggcctggcctcacccatggagtagtgaacaagcctgccaccttcaccgtcaacaccaaggatgcaggagaggggggcctgtctctggccattgagggcccgtccaaagcagaaatcagctgcactgacaaccaggatgggacatgcagcgtgtcctacctgcctgtgctgccgggggactacagcattctagtcaagtacaatgaacagcacgtcccaggcagccccttcactgctcgggtcacaggtgacgactccatgcgtatgtcccacctaaaggtcggctctgctgccgacatccccatcaacatctcagagacggatctcagcctgctgacggccactgtggtcccgccctcgggccgggaggagccctgtttgctgaagcggctgcgtaatggccacgtggggatttcattcgtgcccaaggagacgggggagcacctggtgcatgtgaagaaaaatggccagcacgtggccagcagccccatcccggtggtgatcagccagtcggaaattggggatgccagtcgtgttcgggtctctggtcagggccttcacgaaggccacacctttgagcctgcagagtttatcattgatacccgcgatgcaggctatggtgggctcagcctgtccattgagggccccagcaaggtggacatcaacacagaggacctggaggacgggacgtgcagggtcacctactgccccacagagccaggcaactacatcatcaacatcaagtttgccgaccagcacgtgcctggcagccccttctctgtgaaggtgacaggcgagggccgggtgaaagagagcatcacccgcaggcgtcgggctccttcagtggccaacgttggtagtcattgtgacctcagcctgaaaatccctgaaattagcatccaggatatgacagcccaggtgaccagcccatcgggcaagacccatgaggccgagatcgtggaaggggagaaccacacctactgcatccgctttgttcccgctgagatgggcacacacacagtcagcgtgaagtacaagggccagcacgtgcctgggagccccttccagttcaccgtggggcccctaggggaagggggagcccacaaggtccgagctgggggccctggcctggagagagctgaagctggagtgccagccgaattcagtatctggacccgggaagctggtgctggaggcctggccattgctgtcgagggccccagcaaggctgagatctcttttgaggaccgcaaggacggctcctgtggtgtggcttatgtggtccaggagccaggtgactacgaagtctcagtcaagttcaacgaggaacacattcccgacagccccttcgtggtgcctgtggcttctccgtctggcgacgcccgccgcctcactgtttctagccttcaggagtcagggctaaaggtcaaccagccagcctcttttgcagtcagcctgaacggggccaagggggcgatcgatgccaaggtgcacagcccctcaggagccctggaggagtgctatgtcacagaaattgaccaagataagtatgctgtgcgcttcatccctcgggagaatggcgtttacctgattgacgtcaagttcaacggcacccacatccctggaagccccttcaagatccgagttggggagcctgggcatggaggggacccaggcttggtgtctgcttacggagcaggtctggaaggcggtgtcacagggaacccagctgagttcgtcgtgaacacgagcaatgcgggagctggtgccctgtcggtgaccattgacggcccctccaaggtgaagatggattgccaggagtgccctgagggctaccgcgtcacctatacccccatggcacctggcagctacctcatctccatcaagtacggcggcccctaccacattgggggcagccccttcaaggccaaagtcacaggcccccgtctcgtcagcaaccacagcctccacgagacatcatcagtgtttgtagactctctgaccaaggccacctgtgccccccagcatggggccccgggtcctgggcctgctgacgccagcaaggtggtggccaagggcctggggctgagcaaggcctacgtaggccagaagagcagcttcacagtagactgcagcaaagcaggcaacaacatgctgctggtgggggttcatggcccaaggaccccctgcgaggagatcctggtgaagcacgtgggcagccggctctacagcgtgtcctacctgctcaaggacaagggggagtacacactggtggtcaaatggggggacgagcacatcccaggcagcccctaccgcgttgtggtgccctgagtctggggcccgtgccagccggcagcccccaagcctgccccgctacccaagcagccccgccctcttcccctcaaccccggcccaggccgccctggccgcccgcctgtcactgcagccgcccctgccctgtgccgtgctgcgctcacctgcctccccagccagccgctgacctctcggctttcacttgggcagagggagcca

SEQ ID NO: 42072 - DNA, 7319 bp, Artificial Sequence
  derived and/or modified sequence
agagcgcagcaggcgcggctccgggcggcggcgtcgacacgcgggacgccgagatgccggccaccgagaaggacctggcggaggacgcgccgtggaagaagatccagcagaacactttcacgcgctggtgcaacgagcacctgaagtgcgtgagcaagcgcatcgccaacctgcagacggacctgagcgacgggctgcggcttatcgcgctgttggaggtgctcagccagaagaagatgcaccgcaagcacaaccagcggcccactttccgccaaatgcagcttgagaacgtgtcggtggcgctcgagttcctggaccgcgagagcatcaaactggtgtccatcgacagcaaggccatcgtggacgggaacctgaagctgatcctgggcctcatctggaccctgatcctgcactactccatctccatgcccatgtgggacgaggaggaggatgaggaggccaagaagcagacccccaagcagaggctcctgggctggatccagaacaagctgccgcagctgcccatcaccaacttcagccgggactggcagagcggccgggccctgggcgccctggtggacagctgtgccccgggcctgtgtcctgactgggactcttgggacgccagcaagcccgttaccaatgcgcgagaggccatgcagcaggcggatgactggctgggcatcccccaggtgatcacccccgaggagattgtggaccccaacgtggacgagcactctgtcatgacctacctgtcccagttccccaaggccaagctgaagccaggggctcccttgcggcccaaactgaacccgaagaaagcccgtgcctacgggccaggcatcgagcccacaggcaacatggtgaagaagcgggcagagttcactgtggagaccagaagtgctggccagggagaggtgctggtgtacgtggaggacccggccggacaccaggaggaggcaaaagtgaccgccaataacgacaagaaccgcaccttctccgtctggtacgtccccgaggtgacggggactcataaggttactgtgctctttgctggccagcacatcgccaagagccccttcgaggtgtacgtggataagtcacagggtgacgccagcaaagtgacagcccaaggtcccggcctggagcccagtggcaacatcgccaacaagaccacctactttgagatctttacggcaggagctggcacgggcgaggtcgaggttgtgatccaggaccccatgggacagaagggcacggtagagcctcagctggaggcccggggcgacagcacataccgctgcagctaccagcccaccatggagggcgtccacaccgtgcacgtcacgtttgccggcgtgcccatccctcgcagcccctacactgtcactgttggccaagcctgtaacccgagtgcctgccgggcggttggccggggcctccagcccaagggtgtgcgggtgaaggagacagctgacttcaaggtgtacacaaagggcgctggcagtggggagctgaaggtcaccgtgaagggccccaagggagaggagcgcgtgaagcagaaggacctgggggatggcgtgtatggcttcgagtattaccccatggtccctggaacctatatcgtcaccatcacgtggggtggtcagaacatcgggcgcagtcccttcgaagtgaaggtgggcaccgagtgtggcaatcagaaggtacgggcctggggccctgggctggagggcggcgtcgttggcaagtcagcagactttgtggtggaggctatcggggacgacgtgggcacgctgggcttctcggtggaagggccatcgcaggctaagatcgaatgtgacgacaagggcgacggctcctgtgatgtgcgctactggccgcaggaggctggcgagtatgccgttcacgtgctgtgcaacagcgaagacatccgcctcagccccttcatggctgacatccgtgacgcgccccaggacttccacccagacagggtgaaggcacgtgggcctggattggagaagacaggtgtggccgtcaacaagccagcagagttcacagtggatgccaagcacggtggcaaggccccacttcgggtccaagtccaggacaatgaaggctgccctgtggaggcgttggtcaaggacaacggcaatggcacttacagctgctcctacgtgcccaggaagccggtgaagcacacagccatggtgtcctggggaggcgtcagcatccccaacagccccttcagggtgaatgtgggagctggcagccaccccaacaaggtcaaagtatacggccccggagtagccaagacagggctcaaggcccacgagcccacctacttcactgtggactgcgccgaggctggccagggggacgtcagcatcggcatcaagtgtgcccctggagtggtaggccccgccgaagctgacatcgacttcgacatcatccgcaatgacaatgacaccttcacggtcaagtacacgccccggggggctggcagctacaccattatggtcctctttgctgaccaggccacgcccaccagccccatccgagtcaaggtggagccctctcatgacgccagtaaggtgaaggccgagggccctggcctcagtcgcactggtgtcgagcttggcaagcccacccacttcacagtaaatgccaaagctgctggcaaaggcaagctggacgtccagttctcaggactcaccaagggggatgcagtgcgagatgtggacatcatcgaccaccatgacaacacctacacagtcaagtacacgcctgtccagcagggtccagtaggcgtcaatgtcacttatggaggggatcccatccctaagagccctttctcagtggcagtatctccaagcctggacctcagcaagatcaaggtgtctggcctgggagagaaggtggacgttggcaaagaccaggagttcacagtcaaatcaaagggtgctggtggtcaaggcaaagtggcatccaagattgtgggcccctcgggtgcagcggtgccctgcaaggtggagccaggcctgggggctgacaacagtgtggtgcgcttcctgccccgtgaggaagggccctatgaggtggaggtgacctatgacggcgtgcccgtgcctggcagcccctttcctctggaagctgtggcccccaccaagcctagcaaggtgaaggcgtttgggccggggctgcagggaggcagtgcgggctcccccgcccgcttcaccatcgacaccaagggcgccggcacaggtggcctgggcctgacggtggagggcccctgtgaggcgcagctcgagtgcttggacaatggggatggcacatgttccgtgtcctacgtgcccaccgagcccggggactacaacatcaacatcctcttcgctgacacccacatccctggctccccattcaaggcccacgtggttccctgctttgacgcatccaaagtcaagtgctcaggccccgggctggagcgggccaccgctggggaggtgggccaattccaagtggactgctcgagcgcgggcagcgcggagctgaccattgagatctgctcggaggcggggcttccggccgaggtgtacatccaggaccacggtgatggcacgcacaccattacctacattcccctctgccccggggcctacaccgtcaccatcaagtacggcggccagcccgtgcccaacttccccagcaagctgcaggtggaacctgcggtggacacttccggtgtccagtgctatgggcctggtattgagggccagggtgtcttccgtgaggccaccactgagttcagtgtggacgcccgggctctgacacagaccggagggccgcacgtcaaggcccgtgtggccaacccctcaggcaacctgacggagacctacgttcaggaccgtggcgatggcatgtacaaagtggagtacacgccttacgaggagggactgcactccgtggacgtgacctatgacggcagtcccgtgcccagcagccccttccaggtgcccgtgaccgagggctgcgacccctcccgggtgcgtgtccacgggccaggcatccaaagtggcaccaccaacaagcccaacaagttcactgtggagaccaggggagctggcacgggcggcctgggcctggctgtagagggcccctccgaggccaagatgtcctgcatggataacaaggacggcagctgctcggtcgagtacatcccttatgaggctggcacctacagcctcaacgtcacctatggtggccatcaagtgccaggcagtcctttcaaggtccctgtgcatgatgtgacagatgcgtccaaggtcaagtgctctgggcccggcctgagcccaggcatggttcgtgccaacctccctcagtccttccaggtggacacaagcaaggctggtgtggccccattgcaggtcaaagtgcaagggcccaaaggcctggtggagccagtggacgtggtagacaacgctgatggcacccagaccgtcaattatgtgcccagccgagaagggccctacagcatctcagtactgtatggagatgaagaggtaccccggagccccttcaaggtcaaggtgctgcctactcatgatgccagcaaggtgaaggccagtggccccgggctcaacaccactggcgtgcctgccagcctgcccgtggagttcaccatcgatgcaaaggacgccggggagggcctgctggctgtccagatcacggatcccgaaggcaagccgaagaagacacacatccaagacaaccatgacggcacgtatacagtggcctacgtgccagacgtgacaggtcgctacaccatcctcatcaagtacggtggtgacgagatccccttctccccgtaccgcgtgcgtgccgtgcccaccggggacgccagcaagtgcactgtcacagtgtcaatcggaggtcacgggctaggtgctggcatcggccccaccattcagattggggaggagacggtgatcactgtggacactaaggcggcaggcaaaggcaaagtgacgtgcaccgtgtgcacgcctgatggctcagaggtggatgtggacgtggtggagaatgaggacggcactttcgacatcttctacacggccccccagccgggcaaatacgtcatctgtgtgcgctttggtggcgagcacgtgcccaacagccccttccaagtgacggctctggctggggaccagccctcggtgcagccccctctacggtctcagcagctggccccacagtacacctacgcccagggcggccagcagacttgggccccggagaggcccctggtgggtgtcaatgggctggatgtgaccagcctgaggccctttgaccttgtcatccccttcaccatcaagaagggcgagatcacaggggaggttcggatgccctcaggcaaggtggcgcagcccaccatcactgacaacaaagacggcaccgtgaccgtgcggtatgcacccagcgaggctggcctgcacgagatggacatccgctatgacaacatgcacatcccaggaagccccttgcagttctatgtggattacgtcaactgtggccatgtcactgcctatgggcctggcctcacccatggagtagtgaacaagcctgccaccttcaccgtcaacaccaaggatgcaggagaggggggcctgtctctggccattgagggcccgtccaaagcagaaatcagctgcactgacaaccaggatgggacatgcagcgtgtcctacctgcctgtgctgccgggggactacagcattctagtcaagtacaatgaacagcacgtcccaggcagccccttcactgctcgggtcacaggtgacgactccatgcgtatgtcccacctaaaggtcggctctgctgccgacatccccatcaacatctcagagatctcttttgaggaccgcaaggacggctcctgtggtgtggcttatgtggtccaggagccaggtgactacgaagtctcagtcaagttcaacgaggaacacattcccgacagccccttcgtggtgcctgtggcttctccgtctggcgacgcccgccgcctcactgtttctagccttcaggagtcagggctaaaggtcaaccagccagcctcttttgcagtcagcctgaacggggccaagggggcgatcgatgccaaggtgcacagcccctcaggagccctggaggagtgctatgtcacagaaattgaccaagataagtatgctgtgcgcttcatccctcgggagaatggcgtttacctgattgacgtcaagttcaacggcacccacatccctggaagccccttcaagatccgagttggggagcctgggcatggaggggacccaggcttggtgtctgcttacggagcaggtctggaaggcggtgtcacagggaacccagctgagttcgtcgtgaacacgagcaatgcgggagctggtgccctgtcggtgaccattgacggcccctccaaggtgaagatggattgccaggagtgccctgagggctaccgcgtcacctatacccccatggcacctggcagctacctcatctccatcaagtacggcggcccctaccacattgggggcagccccttcaaggccaaagtcacaggcccccgtctcgtcagcaaccacagcctccacgagacatcatcagtgtttgtagactctctgaccaaggccacctgtgccccccagcatggggccccgggtcctgggcctgctgacgccagcaaggtggtggccaagggcctggggctgagcaaggcctacgtaggccagaagagcagcttcacagtagactgcagcaaagcaggcaacaacatgctgctggtgggggttcatggcccaaggaccccctgcgaggagatcctggtgaagcacgtgggcagccggctctacagcgtgtcctacctgctcaaggacaagggggagtacacactggtggtcaaatggggggacgagcacatcccaggcagcccctaccgcgttgtggtgccctgagtctggggcccgtgccagccggcagcccccaagcctgccccgctacccaagcagccccgccctcttcccctcaaccccggcccaggccgccctggccgcccgcctgtcactgcagccgcccctgccctgtgccgtgctgcgctcacctgcctccccagccagccgctgacctctcggctttcacttgggcagagggagccatttggtggcgctgcttgtcttctttggttctgggaggggtgagggatgggggtcctgtacacaaccacccactagttctcttctccagccaagaggaataaagttttgcttccattc

SEQ ID NO: 42073 - DNA, 7944 bp, Artificial Sequence
  derived and/or modified sequence
atgtctagtagccactctagggctggccaatccgcagcaggagccgccccgggtggcggggttgatacccgcgatgccgagatgcctgcaaccgaaaaggaccttgcagaggatgccccatggaaaaagattcagcagaatacatttacgaggtggtgcaatgaacatctcaagtgcgtgtcaaagcgcatagctaacctgcagaccgacctgagtgatgggctgagactcattgccctactcgaagtgttaagtcagaaaaaaatgcataggaagcacaaccagcgcccaactttccgtcagatgcagctggaaaatgtcagcgtcgctctggagttcctggatcgtgaaagtatcaaactggtgagcatcgatagtaaagccatcgtcgatggcaacttgaagctgatcctaggtctcatatggacgttgatcttacactattctatctccatgcccatgtgggacgaagaagaagatgaagaagcaaagaaacagactccaaaacaaaggttgctgggttggatccaaaataagcttcctcagctgccaatcaccaactttagccgggattggcagtctgggcgcgccctgggcgcgctggtggatagctgcgcccctggactctgcccagactgggatagctgggacgcctctaaacccgtgacaaacgctcgtgaggctatgcagcaggctgatgattggctcggaatcccgcaggtgattacgcccgaggaaattgtcgaccctaacgtcgacgaacattccgttatgacttacctgagccaatttcctaaagctaagctgaagccgggcgctcccctgagaccaaagttgaacccgaagaaggcacgggcctacggtcctggcattgaacctactgggaatatggttaagaagcgtgctgagttcacagttgaaacacgcagtgcgggccagggagaagtgctcgtgtatgtggaggatcccgcgggccaccaggaggaggcaaaagtgacggccaacaacgataagaatcgaacattctctgtgtggtatgtgcccgaagtcaccgggactcacaaagtgaccgttctgtttgcaggtcagcatattgctaagtcaccatttgaggtgtatgttgataagagccagggcgacgcatcaaaagtgaccgcacaaggccctggcttggagccatctggcaatatagcaaataagactacctattttgagatattcactgccggagctggcacaggcgaagtcgaagtcgtcatccaggaccccatgggccagaagggtaccgttgagccacaactggaggccaggggcgactccacttacagatgctcttatcaaccaaccatggaaggtgtgcacaccgtccatgtgaccttcgctggtgtccctataccccgaagcccatatactgttaccgtggggcaggcatgcaacccctcagcttgtagggccgtaggcaggggtctgcagccaaaaggggtacgggtgaaagagactgccgactttaaggtgtacactaaaggcgccggcagtggggagttgaaagttactgtaaaggggcccaaaggagaggaacgcgttaagcagaaagacctgggggatggagtctacggattcgagtactacccaatggtaccaggaacctacatagttacaatcacctggggcggccagaacatcggcagatcaccatttgaggtgaaagtggggaccgagtgtggcaaccaaaaagtgcgggcctggggaccgggactggagggaggagtggtgggaaagagcgccgacttcgtggtggaggcaattggggacgatgtcggaacactgggcttttccgtagagggcccaagtcaggcgaagatagagtgtgacgacaaaggtgacggatcctgcgacgtccgctattggccccaggaggcaggggagtacgctgtccacgtcctgtgtaacagtgaggatattagactctcgccctttatggctgacatacgggacgccccccaggactttcacccagaccgagtgaaggcccgaggacccgggctggagaaaaccggcgtggctgtgaacaagccagctgagttcactgtggatgccaagcatggtggcaaggcccccttgagggtgcaggtgcaggataacgaaggttgtcccgttgaggcgctcgtcaaagataatggcaacggaacctactcatgcagctacgtgccaaggaaaccagtgaaacacactgcaatggtctcttggggtggcgtctccatccctaatagtccttttagggtaaatgtgggagccgggagtcatcccaacaaagtcaaagtttacgggccgggtgtcgccaaaacggggctcaaggcccatgaaccaacatatttcaccgtggattgtgcagaggcaggacaaggtgatgtcagcattggcattaaatgtgctccaggcgtcgtggggcctgccgaggctgatattgatttcgacattattagaaatgacaatgatacctttaccgtcaagtacactccccgaggcgctggtagttatactatcatggtactgttcgccgaccaagctacccctacctcccccatccgggttaaggttgaacccagtcatgatgcctccaaggtgaaggctgaaggccctggtctgtcccgaactggcgtggagttagggaagcccacacacttcaccgttaacgcgaaagccgcggggaaggggaaattagatgtacagtttagtggcctcactaaaggggatgcagtcagagacgtggatatcattgatcaccacgacaacacctatactgttaaatataccccagtccagcaagggccggtgggcgtgaatgttacatatgggggtgacccaatccctaagagccccttctctgtggcagtctcgccctcactggatctgtccaagattaaggtgagtggattaggcgaaaaggtcgacgtgggtaaggaccaggagtttactgttaaatccaaaggcgccggaggacaggggaaagtcgcatcaaagatcgtcggcccgagcggcgctgccgtaccctgcaaagtcgagccaggtctaggagctgacaactccgtcgttaggttcctgcctagggaagagggcccctacgaggtggaagtgacctacgatggcgtcccagtccctggcagtccatttccacttgaagccgttgctcctaccaagcctagtaaggtgaaggccttcgggccgggcctgcagggtggatcggctgggtcccctgcccgcttcacaattgataccaagggggcggggaccggcggcttaggtctcactgtggaggggccttgcgaagcacaactagaatgtctggacaacggagacgggacgtgcagcgtgagttatgtacccaccgagcctggcgactataacatcaatatcttgttcgccgatacacatatacccggatctcccttcaaggctcacgtagtaccttgttttgacgcttctaaggtcaagtgcagcggcccgggactcgaacgcgcaaccgcaggagaggtcgggcaatttcaggtggattgcagctccgcaggctccgcggagttgacaatcgaaatctgtagtgaggcaggcttgcctgccgaggtgtatatacaggaccacggcgatggcacacacacaattacctatatacctctctgtccgggcgcatacacagtgaccatcaaatacggaggccagcccgtgccaaattttccctccaagctgcaggtggaacctgccgtagacacctctggagtgcagtgctacgggcctggcatcgaaggccagggcgtttttagagaagcaacaactgagttttccgtcgacgcccgcgctctgacccagacaggcggaccccatgtgaaagctcgcgtcgccaatccaagtggcaatctcaccgaaacttacgtccaggaccggggagatggtatgtacaaagtcgagtatactccttatgaagaggggcttcatagtgtcgatgttacttacgatggttctcccgtgccatcgtcgcctttccaggtgccagtcactgaagggtgcgatcctagtagggtgcgcgtgcacggtcctgggatccagagtggcaccaccaataagcctaacaagtttacggtcgaaacaaggggggctggcactggcggacttgggctggctgttgaagggccgtctgaggcgaagatgagctgtatggacaataaggatgggtcttgttctgtggagtacatcccatacgaggctggaacctatagtctcaatgtaacctatggtgggcatcaggtgcccgggtctccctttaaggtgcccgtgcatgacgttacagacgcaagtaaggtgaagtgttctggacctggcttgtcacctggcatggtgagggcaaacttgcctcagtcctttcaagttgatacgagtaaagcgggagtggcacccctacaagttaaggtacagggaccaaagggcctagtggaacccgtggatgtggttgataatgcggatgggacacagactgtaaactacgttccaagcagagagggcccttattcgatcagtgtgctttacggagatgaagaagtgcctagatctcccttcaaagtgaaggtgctacctacccatgatgccagtaaagtaaaggcatcgggtcccgggctgaacacgactggcgtgcccgcatctctcccagtggaatttacaatcgacgccaaggacgctggtgaggggctgctcgcggtccagataaccgacccggagggtaagcccaaaaagacacacatacaagataatcacgatggaacttatactgtggcctacgtgcctgacgtcaccggacgctataccatcctgatcaaatacgggggcgacgaaattcctttctctccgtaccgggtacgcgccgtacccaccggggatgcatcaaagtgtacagtgaccgtgtcgattggtggccacggtctcggcgccggtatcggacccactatccaaattggggaagagacggtgatcactgtggacacaaaagctgcaggtaagggtaaagttacttgcactgtgtgtacacccgacgggtctgaggtcgacgtggatgtcgtagagaacgaggatggcacattcgacattttctacacggcgccccaacctgggaaatacgtgatttgcgtgcgattcggcggcgagcatgtccctaacagcccttttcaagtaaccgctttagctggtgatcagcccagcgttcagccacctctgcgaagtcagcaactggcccctcagtatacgtacgcccagggaggccagcagacctgggcgcccgaaaggcccctcgtcggtgtcaatggcctggatgtcacatccttgcgcccattcgacctggtaataccgtttacgataaaaaaaggggagataactggagaggtccgcatgccgtctggcaaagttgcgcaaccaaccatcactgacaataaggacggaacagttaccgtgaggtacgccccgtcagaggccggactgcacgagatggatatacgctatgataacatgcatatacctggctctccattgcaattttacgtcgattatgttaattgcggacatgtgacggcgtatggtcctggtctgacacacggcgtggttaataaacccgcaaccttcaccgtcaacacgaaggatgcgggtgaaggaggattatctctggcaatcgagggcccttctaaagctgaaatctcctgcacagacaatcaggatggtacttgcagcgtcagttatctccccgtgttgcccggcgactactccattctggtgaagtacaacgagcagcacgtcccaggttctccttttacagcgcgcgtcactggcgacgattccatgagaatgagccacttaaaagtggggagcgcggcagatattcccataaacatctccgagacagacctatcactccttactgcaacagttgttccgccaagtggaagggaggagccctgcctgttaaagcgcctgaggaatgggcatgttggcatttccttcgtcccaaaggaaacaggagagcatctggtacatgtcaagaagaacgggcagcacgtggccagcagccccatccctgtggtgatcagccagtcagaaatcggcgacgcctcccgagtgcgagtcagcggacagggcctgcacgagggccataccttcgaacctgcggagtttattatcgacacaagagatgcaggctatggaggcctgagcttgtccattgaaggacccagcaaagttgacataaacacagaagatctggaggatggaacatgcagggtaacttactgccctaccgaacctgggaactacattatcaatatcaaattcgccgatcagcatgttccaggcagtccattttcggtaaaggtgactggtgagggtagggtgaaggagtctatcaccaggagaaggagagccccgtcggtcgctaacgtcggctcccattgtgatctgagcctcaaaatccctgagatatctatacaggatatgacagcccaggtcacatctccctccgggaaaacacacgaggccgaaatcgtcgaaggggagaatcacacatactgtatccgtttcgtgccggctgagatgggaacccatacagtctcagtgaagtacaagggccagcacgtccccggctcaccgtttcaattcacagtgggaccattgggggagggaggcgctcacaaagtacgggctggcggtcccggactggaaagggctgaggccggagtacctgcagaatttagcatctggacacgagaagccggcgccggtggattagctattgccgtcgagggaccgtctaaggccgagattagcttcgaggaccgaaaagacggcagttgcggcgtggcctatgtggtgcaggagcctggagactatgaggttagcgtgaaatttaacgaggaacacattccagatagcccattcgtcgtcccagtggcttccccttccggagacgcccgacgcctaacggtgtcttcccttcaggaatcaggtctgaaagtgaaccagcctgcatccttcgctgtctctttgaatggcgcaaaaggagcaatagatgccaaggtacatagcccctccggcgcactcgaggaatgctatgtcactgagattgaccaggataagtatgccgtccgcttcattccaagagagaacggagtctatctgatagacgtaaagttcaatggtacacatattcccggctcaccattcaagatccgggtgggtgaacctggacacgggggcgatcccgggctggtgtcagcatacggggcgggcctcgaaggcggagtgaccgggaaccctgccgagtttgtggtgaataccagtaacgcaggagccggggctctgagtgtcacgatagacgggccttcaaaagtcaaaatggattgtcaagaatgtcctgagggctacagagtgacttatacacccatggctcctggcagctatctcatctcgatcaagtacggcgggccttaccacatcggtgggtcgccctttaaagccaaggttacaggacccaggctcgtttcaaatcactcacttcatgaaacatcgagcgtattcgtcgatagtctgactaaggcaacttgcgcccctcagcatggggcccctggtcctggccccgccgacgcttctaaagttgttgccaagggcctcggactttccaaggcctacgttggtcagaaaagtagctttacagtcgattgctcgaaagccggcaataacatgttgctcgtgggtgtgcatggccccagaaccccctgcgaagagattctggtaaagcacgtcgggagccggctctatagcgtttcataccttctcaaagataagggtgagtataccctagtcgtcaaatggggggacgagcatattcctggctctccctaccgggtcgtagtgccctag

SEQ ID NO: 42074 - DNA, 6948 bp, Artificial Sequence
  derived and/or modified sequence
atgcccgccacagaaaaggatctggccgaagatgctccatggaaaaaaattcaacagaatactttcactcggtggtgcaatgagcatcttaagtgcgtgtccaagaggatagcaaacttgcagaccgatctctccgatggattgcgcctcattgctctcctggaggtcctatctcagaagaagatgcatcggaagcataaccagcggccaactttcagacagatgcaactggagaatgtgtccgtggctctggaattcttggatcgggagtcaatcaagttggtaagcatagactccaaggctatcgtggatggtaacctcaaactgatccttggactcatttggacactgatcctgcattattctattagcatgccaatgtgggatgaggaggaagatgaagaggctaaaaagcagacccctaaacagaggcttctgggctggatacagaataagctgcctcaactgcccattaccaactttagccgcgactggcagagcgggagagcgctgggggccctggtcgacagttgtgctcctggtctctgccccgactgggatagctgggacgcatctaagccagtgacaaacgctcgcgaggctatgcagcaggctgacgattggttgggcatcccccaggtcattacaccagaagagatcgtggaccccaacgtggatgagcattcagtgatgacatacctttctcaatttcccaaagcaaagctgaaacctggggcacctttgaggcctaaactgaatcccaaaaaggcgagggcctatggtcctggcatcgaaccaactgggaacatggtcaaaaagagggccgagttcacagtcgagaccaggtcagccggacagggggaggtgctggtctacgttgaggatccagctggacatcaggaagaggcaaaggttacagccaacaatgataaaaacaggacgttcagcgtctggtatgtaccggaagtcaccggtacccataaggtaaccgtcctgtttgccgggcagcacatagcaaaaagtcctttcgaggtttatgtggacaagtcacagggagacgcaagcaaggtaactgctcaagggcccgggcttgagccctctggtaatattgccaataaaacaacctattttgagatctttaccgccggggccggcacgggtgaagttgaggtcgtgattcaagatccaatggggcagaagggtactgtggaacctcagctggaagcccgcggagactctacttaccgctgttcatatcagccaaccatggaaggcgttcacacagtccacgtcacgtttgctggcgtgccaataccccggtctccatacacagtcacagtcgggcaggcctgtaaccctagcgcctgccgggccgtcgggcgcggtttacagcccaagggggtgcgagtcaaggagacagcggatttcaaagtgtacactaagggcgccggctctggtgagctcaaagtgactgtgaaaggtcccaaaggagaagagcgtgtaaaacaaaaagacctcggagacggggtctatggctttgagtactatccaatggtgccagggacgtatattgtaacaataacctggggaggtcagaacatcggacgctccccattcgaggtcaaggtcggaacagaatgtgggaatcagaaagtgcgagcttggggacccgggctggagggcggagtggtgggaaaatcagctgattttgtagtcgaggcaattggcgacgacgtgggaaccctgggctttagcgtagaaggccctagtcaggctaaaatcgaatgtgacgataagggggatggcagttgcgatgtgcggtattggccccaggaggccggcgagtacgctgtgcacgtgctctgtaacagtgaggacatccgcctgagtccatttatggcggacatccgagacgctcctcaagacttccaccctgacagggtgaaggcgcgagggccaggtctggagaaaactggagttgccgtgaacaagcctgccgaatttactgttgacgcaaaacatggaggcaaggctcccctcagagtgcaggttcaggataacgaggggtgtcctgtcgaggcactggttaaggacaacgggaacggcacatattcatgcagctatgttccccggaaaccagtgaagcatacggcaatggtgtcatggggcggggtgtctatacctaattccccgttccgcgttaacgtcggagccggaagccaccctaacaaggtgaaggtctacggaccgggagtcgctaagaccgggctgaaggcacatgaacctacctactttacagtcgactgtgcagaagctggccaaggggatgtcagcatcggcattaagtgtgcacctggagttgtggggcccgctgaggctgacatcgatttcgatattattaggaatgacaatgacacatttacagtaaagtatacaccaaggggggccgggagctatactattatggttcttttcgcggaccaggctacgccaacgtcaccaatcagggtgaaggtggaaccttcacacgacgcatccaaagtgaaggccgagggtcctggcctctccagaactggagtggaattagggaagccaacacacttcactgttaatgcaaaagccgccggaaaggggaaattggatgtccagttctcgggcctgaccaaaggcgacgccgtgcgggatgttgatattatagaccaccacgacaacacctacactgtgaaatacactccagtgcaacaggggcctgtgggcgtgaacgtgacgtacggaggggaccccattccaaaatccccattttccgtggccgtcagccctagccttgatctatcaaagattaaggtgtcgggactgggcgagaaggtggacgtgggaaaggatcaagaatttaccgtcaaaagcaagggcgccggtggccaagggaaagtagccagcaagatcgtgggcccatctggcgctgccgtgccatgcaaagttgagccgggtttgggcgctgataattctgtggtcagatttctgccacgcgaggaaggcccctatgaagtcgaggtgacctacgatggcgttcctgtaccaggaagcccgttccctctcgaggcggtagcaccaaccaagccttccaaggttaaagccttcggccccggcctccaaggcggttccgccgggagtccagctcgcttcactattgacacgaagggagctgggacaggtggcctcggcctgaccgtagagggaccttgtgaagcccagctcgaatgcttggataatggagacggcacttgctccgtgtcttacgtacccacagagcctggtgactataacattaacattctttttgcagacacccatatcccagggagcccatttaaagcccacgtcgtaccatgttttgacgcctcaaaagtcaagtgctccggtcctggcttggaaagggccaccgcaggcgaggtggggcagttccaggttgattgttctagcgctggaagtgcggagctgaccatcgagatctgctcagaagcggggctgcctgcagaggtgtacatacaggatcacggagacggcacacacacgatcacgtatattccattatgccctggcgcctataccgtgaccattaagtatgggggacagccggttccaaactttccaagcaaattgcaggtcgaacccgctgttgacaccagcggtgttcaatgttatggccccgggatagagggacagggtgtgttccgagaggctacaaccgagttctccgtggatgcaagggcactgacccagactgggggtcctcatgttaaagcacgcgtagccaatcccagtggcaatctgactgagacctacgttcaggaccggggggatggtatgtataaggtggagtataccccatatgaagaaggcctgcattctgtcgacgtgacatatgacggaagtcccgttccttcttccccttttcaggtgcccgttacagaaggctgtgatccatcaagggtacgcgttcacggacctggtatacagagcggaaccactaacaaacctaacaaatttactgtggagacccgaggagctggtacaggaggactgggactggccgtggaaggcccatctgaagctaagatgtcttgtatggacaataaggatgggagctgctccgtggaatacattccctacgaggccggcacatatagcttaaatgttacctacggtggacaccaggtccccggatccccgttcaaggtccccgtccacgacgtaaccgatgcctccaaggtgaaatgctcaggaccaggtctgtcgcccggcatggtgcgcgctaatctgccccaatctttccaggtagacacttccaaggctggtgttgcaccacttcaggttaaggtccagggacccaagggtctggtcgagccagtggacgtcgtagacaatgcagacggcacacagaccgtcaactatgtcccatcaagagaagggccttatagcatctctgtgctgtacggagatgaggaggtgccacgctcgccgttcaaagtgaaggtactgcccacccatgatgcctcaaaagtgaaggcctcaggaccagggttgaacaccactggagttcccgctagtctgccagtggagttcactatcgatgctaaagatgccggtgagggtctgctcgctgtccagatcacagatccagaaggcaaaccaaaaaagacccacattcaggataatcacgatggaacttacaccgtcgcatatgtccccgacgtgactggcagatataccattctgattaaatacggtggcgatgaaattcctttcagtccttatagagtacgcgccgtgcccactggagacgcatccaaatgcacagtgactgtgtctatagggggccacggtctgggtgccggaatagggccaacaatccagattggggaggagaccgtgataacggtagataccaaggccgctggaaagggcaaggtcacgtgtaccgtctgcacacccgacggatcagaggtggatgtggatgtcgtggaaaacgaagatggcacatttgatattttctacacagcccctcagcctggaaaatacgtcatttgcgtacgctttggaggcgagcacgtaccaaacagcccctttcaggtgaccgctttagccggagaccagcccagcgtacagccacctttacgatcccagcaactggcccctcagtatacctacgcgcaaggcggccaacagacttgggccccagaacggcccttggtaggcgtaaatgggttagatgttacctctctcagaccctttgaccttgttatccccttcactataaaaaaaggagagatcactggtgaagtccgtatgcccagcgggaaagtcgctcaacccactattaccgataataaagatggaacagtaaccgtccgttacgctccgtctgaagcgggactgcacgaaatggatattaggtatgacaacatgcatattccaggcagtcccttgcagttctatgtggactatgttaattgcgggcacgttaccgcctatggcccaggcctaacccacggcgtcgtgaacaagccagcgaccttcacggtgaatacaaaggatgcaggagagggtggtctcagtctcgcaatcgaaggcccgagtaaagccgaaatcagttgcactgacaatcaggatggcacctgttctgtgtcctatctcccagtgctgcctggtgattacagcatcctggtaaaatacaacgaacagcacgtccctggctcgccttttactgctcgggttaccggggatgactctatgcgaatgagccacttaaaggtcggctctgcagcggacattcctatcaacatctcggagatttcctttgaagaccgcaaagatggttcctgcggagtggcctatgtggtacaggaacccggagactatgaggtgtccgttaaatttaatgaggaacatattcccgactctccattcgtcgtgcccgttgcaagccccagcggcgatgccagaagacttacagtgtctagcctacaggagagcggcctaaaagtgaatcaacctgctagctttgccgtatctctaaatggggcaaaaggagcaatagatgccaaagtgcactctccaagtggagctctggaggagtgctacgtgacggagatagaccaggataagtatgctgtgagattcatccccagagaaaacggggtgtacttgattgatgtgaagtttaatggaacgcatatccccgggtcacctttcaagatccgagttggggaacctggccatggcggagatcccggcctcgtcagtgcgtatggtgccgggttggagggaggggtgactggcaaccccgccgagtttgtcgtcaacacctcaaacgctggagctggggccttgtcggtcaccattgacggacctagcaaagttaaaatggattgccaggagtgtcctgagggctaccgagtgacatatacgccaatggcacccggctcctatcttatctctatcaagtacggcgggccttatcacattggtggctctccctttaaggccaaggtgactggtccaagattagtcagcaaccactcgcttcatgagaccagttcagtcttcgtcgactcattgactaaagctacatgtgcgccacagcacggagcacccggacctgggcccgccgacgctagcaaagtggtggccaaaggcctagggttaagtaaagcatacgttggtcaaaaatctagtttcacggtggattgctccaaagcaggaaataacatgctcctagtaggcgttcacggacctcgcacaccctgcgaagaaattttggtaaagcatgtgggatcgagactgtacagcgtgtcatatttgctgaaagataagggggagtacacactggttgtaaagtggggggacgaacacattccgggctcaccctatcgagtggttgtcccatag

SEQ ID NO: 42075 - DNA, 7944 bp, Artificial Sequence
  derived and/or modified sequence
atgagcagcagccacagccgggccggccagagcgctgctggagctgcccctgggggcggcgtggacaccagagatgctgagatgcctgccacagagaaggacctggctgaagatgccccctggaagaagatccagcagaacaccttcacccgctggtgcaatgagcacctgaagtgtgtgtccaagagaattgccaacctgcagacagacctgagtgatggcctgcggctcatcgccctgctggaggtgctgagccagaagaagatgcacaggaagcacaaccagaggcccaccttccggcagatgcagctggagaatgtgtctgtggccctggagttcctggaccgggagagcatcaagctggtgtccattgacagcaaggccatcgtggatggcaacctgaagctgatcctgggcctcatctggaccctcatcctgcactacagcatctccatgcccatgtgggatgaggaggaggatgaggaggccaagaagcagacccccaagcagaggctgctgggctggatccagaacaagctgccccagctgcccatcaccaacttcagccgggactggcagagcggccgggccctgggcgccctggtggacagctgtgcccctggcctgtgcccagactgggacagctgggatgccagcaagcctgtgaccaatgcccgggaggccatgcagcaggctgatgactggctgggcatcccccaggtgatcaccccagaggagatcgtggaccccaacgtggatgagcacagcgtgatgacctacctgagccagttccccaaggccaagctgaagccaggggcccccctgcggcccaagctgaaccccaagaaggcccgggcctacggccctggcatcgagcccaccggcaacatggtgaagaagagagctgagttcaccgtggagaccaggtctgctggccagggcgaggtgctggtgtatgtggaggaccctgctggccaccaggaggaggccaaggtgacagccaacaatgacaagaacagaaccttctctgtgtggtacgtgcctgaggtgacaggcacccacaaggtgacagtgctgtttgctggccagcacatcgccaagagcccctttgaggtgtatgtggacaagagccagggagatgccagcaaggtgacagcccagggccctggcctggagcccagcggcaacatcgccaacaagaccacctactttgagatcttcaccgctggagctggcactggagaggtggaggtggtgatccaggaccccatgggccagaagggcaccgtggagccccagctggaggcccggggggacagcacctaccgctgcagctaccagcccaccatggagggcgtgcacacagtgcacgtgacctttgctggggtgcccatccccaggagcccctacacagtgacagtgggccaggcctgcaaccccagcgcctgcagagctgtgggccggggcctgcagcccaagggcgtgcgggtgaaggagacagctgacttcaaggtgtacaccaagggggccggcagcggggagctgaaggtgacagtgaagggccccaagggggaggagcgggtgaagcagaaggacctgggagatggagtgtatggctttgagtactaccccatggtgcccggcacctacatcgtgaccatcacctggggcggccagaacatcggccgcagcccctttgaggtgaaggtgggcacagaatgtggcaaccagaaggtgcgggcctggggccctggcctggagggcggcgtggtgggcaagtctgctgactttgtggtggaggccatcggagatgatgtgggcaccctgggcttctctgtggagggccccagccaggccaagattgaatgtgatgacaagggagatggcagctgtgatgtgcgctactggccccaggaggccggggagtatgctgtgcacgtgctgtgcaacagcgaggacatccggctgagccccttcatggctgacatcagagatgccccccaggacttccacccagacagagtgaaggcccggggccctggcctggagaagacaggagtggccgtgaacaagccagctgagttcaccgtggatgccaagcatggaggcaaggcccccctgcgggtgcaggtgcaggacaatgaaggctgccctgtggaggccctggtgaaggacaatggaaatggcacctacagctgcagctatgtgcccaggaagcctgtgaagcacacagccatggtgtcctggggcggcgtgtccatccccaacagccccttccgggtgaatgtgggcgccggcagccaccccaacaaggtgaaggtgtatggccctggggtggccaagacaggcctgaaggcccacgagcccacctacttcaccgtggactgtgccgaggccggccagggagatgtgtccatcggcatcaagtgtgcccctggggtggtgggccctgctgaggccgacatcgactttgacatcatcagaaatgacaatgacaccttcaccgtgaagtacaccccaagaggagctggcagctacaccatcatggtgctgtttgctgaccaggccacccccaccagccccatccgggtgaaggtggagcccagccatgatgccagcaaggtgaaggccgagggccctggcctgagcaggactggagtggagctgggcaagcccacccacttcaccgtgaatgccaaggccgccggcaagggcaagctggatgtgcagttcagcggcctgaccaagggagatgctgtgagagatgtggacatcatcgaccaccacgacaacacctacacagtgaagtacacccctgtgcagcagggccctgtgggcgtgaatgtgacctatggaggagaccccatccccaagagccccttctctgtggccgtgagccccagcctggacctgagcaagatcaaggtgtctggcctgggggagaaggtggatgtgggcaaggaccaggagttcaccgtgaagagcaagggggccggcggccagggcaaggtggccagcaagatcgtgggccccagcggggctgctgtgccctgcaaggtggagcccggcctgggcgctgacaacagcgtggtgcgcttcctgccccgggaggagggcccctatgaggtggaggtgacctatgatggagtgcctgtgcccggcagccccttccccctggaggccgtggcccccaccaagcccagcaaggtgaaggcctttggacctggcctgcagggcggcagcgctggcagccctgcccgcttcaccatcgacaccaagggagctggcactggaggcctgggcctgactgtggagggcccctgtgaggcccagctggagtgcctggacaatggagatggcacctgcagcgtgtcctatgtgcccacagagcccggggactacaacatcaacatcctgtttgctgacacccacatccctggcagccccttcaaggcccacgtggtgccctgctttgatgccagcaaggtgaagtgcagcggccctggcctggagcgggccacagctggggaggtgggccagttccaggtggactgcagcagcgctggcagcgctgagctgaccatcgagatctgcagcgaggccggcctgcctgctgaggtgtacatccaggaccatggagatggcacccacaccatcacctacatccccctgtgccctggggcctacacagtgaccatcaagtatggaggccagcctgtgcccaacttccccagcaagctgcaggtggagcctgctgtggacaccagcggcgtgcagtgctacggccctggcatcgagggccagggcgtcttccgggaggccaccacagagttctctgtggatgcccgggccctgacccagacaggaggcccccacgtgaaggcccgggtggccaaccccagcggcaacctgacagagacctacgtgcaggacagaggagatggcatgtacaaggtggagtacaccccctatgaggagggcctgcacagcgtggatgtgacctatgatggcagccctgtgcccagcagccccttccaggtgcctgtgacagagggctgtgaccccagccgggtgcgggtgcacggccctggcatccagagcggcaccaccaacaagcccaacaagttcaccgtggagaccagaggagctggcactggaggcctgggcctggccgtggagggccccagcgaggccaagatgagctgcatggacaacaaggatggcagctgcagcgtggagtacatcccctatgaagctggcacctacagcctgaatgtgacctacggcggccaccaggtgcccggcagccccttcaaggtgcctgtgcatgatgtgacagatgccagcaaggtgaagtgcagcggccctggcctgagccctggcatggtgcgggccaacctgccccagagcttccaggtggacaccagcaaggccggcgtggcccccctgcaggtgaaggtgcagggccccaagggcctggtggagcctgtggatgtggtggacaatgctgatggcacccagacagtgaactacgtgcccagccgggagggcccctacagcatctctgtgctgtatggagatgaggaggtgcccaggagccccttcaaggtgaaggtgctgcccacccatgatgccagcaaggtgaaggccagcggccctggcctgaacaccaccggggtgcctgccagcctgcctgtggagttcaccattgatgccaaggatgctggggagggcctgctggccgtgcagatcacagatcctgagggcaagcccaagaagacccacatccaggacaaccatgatggcacctacacagtggcctacgtgcctgatgtgacaggccgctacaccatcctgatcaagtatggaggagatgagatccccttcagcccctacagagtgcgggctgtgcccactggagatgccagcaagtgcaccgtgacagtgtccattggaggccacggcctgggcgccggcatcggccccaccatccagatcggggaggagaccgtcatcaccgtggacaccaaggctgctgggaagggcaaggtgacctgcaccgtgtgcaccccagatggcagcgaggtggatgtggatgtggtggagaatgaagatggcacctttgacatcttctacacagccccccagcccgggaagtatgtgatctgtgtgcgctttggaggagagcacgtgcccaacagccccttccaggtgacagccctggccggggaccagcccagcgtgcagccccccctgcggagccagcagctggccccccagtacacctacgcccagggcggccagcagacctgggcccctgagcggcccctggtgggcgtgaatggcctggatgtgaccagcctgcggccctttgacctggtgatccccttcaccatcaagaagggggagatcactggagaggtgaggatgcccagcggcaaggtggcccagcccaccatcacagacaacaaggatggcaccgtgacagtgcgctatgcccccagcgaggccggcctgcacgagatggacatccgctatgacaacatgcacatccctggcagccccctgcagttctacgtggactatgtgaactgtggccacgtgacagcctacggccctggcctgacccatggagtggtgaacaagccagccaccttcaccgtgaacaccaaggatgctggggagggcggcctgagcctggccatcgagggccccagcaaggccgagatcagctgcacagacaaccaggacggcacctgcagcgtgtcctacctgcctgtgctgcccggggactacagcatcctggtgaagtacaatgagcagcacgtgcccggcagccccttcaccgcccgggtgactggagatgacagcatgaggatgagccacctgaaggtgggcagcgctgctgacatccccatcaacatcagcgagacagacctgagcctgctgacagccaccgtggtgcccccatctggccgggaggagccctgcctgctgaagaggctgagaaatggccacgtgggcatcagctttgtgcccaaggagaccggggagcacctggtgcacgtgaagaagaatggccagcacgtggccagcagccccatccctgtggtgatcagccagagcgagattggagatgccagccgggtgcgggtgtctggccagggcctgcacgagggccacacctttgagcctgctgagttcatcatcgacaccagagatgctggctatggaggcctgagcctgagcattgagggccccagcaaggtggacatcaacacagaggacctggaggatggcacctgccgggtgacctactgccccacagagcccggcaactacatcatcaacatcaagtttgctgaccagcacgtgcccggcagccccttctctgtgaaggtgactggagagggccgggtgaaggagagcatcaccaggagaagaagagcccccagcgtggccaacgtgggcagccactgtgacctgagcctgaagatccctgagatcagcatccaggacatgacagcccaggtgaccagccccagcggcaagacccatgaggccgagatcgtggagggggagaaccacacctactgcatccgctttgtgcctgctgagatgggcacccacacagtgtctgtgaagtacaagggccagcacgtgcccggcagccccttccagttcaccgtgggccccctgggggagggcggggcccacaaggtgcgggccggcggccctggcctggagagagctgaggccggcgtgcctgctgagttcagcatctggacccgggaggccggggccggcggcctggccatcgctgtggagggccccagcaaggccgagatcagctttgaggacaggaaggatggcagctgtggggtggcctacgtggtgcaggagcccggggactatgaggtgtctgtgaagttcaatgaggagcacatcccagacagcccctttgtggtgcctgtggccagccccagcggagatgcccggcggctgactgtgagcagcctgcaggagagcggcctgaaggtgaaccagcctgccagctttgctgtgtccctgaatggagccaagggggccattgatgccaaggtgcacagccccagcggggccctggaggagtgctacgtgacagaaattgaccaggacaagtatgctgtgcgcttcatcccccgggagaatggagtgtacctgattgatgtgaagttcaacggcacccacatccctggcagccccttcaagatccgggtgggggagcccggccatggaggagaccccggcctggtgtctgcctatggagctggcctggagggcggcgtgacaggcaacccagctgagtttgtggtgaacaccagcaatgctggggccggggccctgtctgtgaccattgatggccccagcaaggtgaagatggactgccaggagtgcccagagggctacagagtgacctacacccccatggcccctggcagctacctgatcagcatcaagtatggaggcccctaccacatcggcggcagccccttcaaggccaaggtgacaggcccccggctggtgagcaaccacagcctgcacgagaccagctctgtgtttgtggacagcctgaccaaggccacctgtgccccccagcacggggcccctggccctggccctgcagatgccagcaaggtggtggccaagggcctgggcctgagcaaggcctacgtgggccagaagagcagcttcaccgtggactgcagcaaggccggcaacaacatgctgctggtgggcgtgcacggccccaggaccccctgtgaggagatcctggtgaagcacgtgggcagccggctgtacagcgtgtcctacctgctgaaggacaagggggagtacaccctggtggtgaagtggggagatgagcacatccctggcagcccctacagagtggtggtgccctag

SEQ ID NO: 42076 - DNA, 6948 bp, Artificial Sequence
  derived and/or modified sequence
atgcctgccacagagaaggacctggccgaggatgccccctggaagaagatccagcagaacaccttcacccgctggtgcaatgagcacctgaagtgtgtgtccaagagaattgccaacctgcagacagacctgagtgatggcctgcggctgattgccctgctggaggtgctgagccagaagaagatgcacaggaagcacaaccagaggcccaccttccggcagatgcagctggagaatgtgtctgtggccctggagttcctggaccgggagagcatcaagctggtgtccattgacagcaaggccatcgtggatggcaacctgaagctgatcctgggcctcatctggaccctcatcctgcactacagcatctccatgcccatgtgggatgaggaggaggatgaggaggccaagaagcagacccccaagcagaggctgctgggctggatccagaacaagctgccccagctgcccatcaccaacttcagccgggactggcagagcggccgggccctgggcgccctggtggacagctgtgcccctggcctgtgcccagactgggacagctgggatgccagcaagcctgtgaccaatgcccgggaggccatgcagcaggctgatgactggctgggcatcccccaggtgatcaccccagaggagatcgtggaccccaacgtggatgagcacagcgtgatgacctacctgagccagttccccaaggccaagctgaagccaggggcccccctgcggcccaagctgaaccccaagaaggcccgggcctacggccctggcatcgagcccactggaaacatggtgaagaagagagctgagttcaccgtggagaccaggtctgctggccagggcgaggtgctggtgtatgtggaggaccctgctggccaccaggaggaggccaaggtgacagccaacaatgacaagaacagaaccttctctgtgtggtacgtgcctgaggtgacaggcacccacaaggtgacagtgctgtttgctggccagcacatcgccaagagcccctttgaggtgtatgtggacaagagccagggagatgccagcaaggtgacagcccagggccctggcctggagcccagcggcaacatcgccaacaagaccacctactttgagatcttcaccgctggggccggcaccggggaggtggaggtggtgatccaggaccccatgggccagaagggcaccgtggagccccagctggaggcccggggggacagcacctaccgctgcagctaccagcccaccatggagggcgtgcacacagtgcacgtgacctttgctggggtgcccatccccaggagcccctacacagtgacagtgggccaggcctgcaaccccagcgcctgcagagctgtgggccggggcctgcagcccaagggcgtgcgggtgaaggagacagctgacttcaaggtgtacaccaagggagctggcagcggggagctgaaggtgacagtgaagggccccaagggggaggagcgggtgaagcagaaggacctgggagatggagtgtatggctttgagtactaccccatggtgcccggcacctacatcgtgaccatcacctggggcggccagaacatcggccgcagcccctttgaggtgaaggtgggcacagaatgtggcaaccagaaggtgcgggcctggggccctggcctggagggcggcgtggtgggcaagtctgctgactttgtggtggaggccatcggagatgatgtgggcaccctgggcttctctgtggagggccccagccaggccaagattgaatgtgatgacaagggagatggcagctgtgatgtgcgctactggccccaggaggccggggagtatgctgtgcacgtgctgtgcaacagcgaggacatccggctgagccccttcatggctgacatcagagatgccccccaggacttccacccagacagagtgaaggcccggggccctggcctggagaagacaggagtggccgtgaacaagccagctgagttcaccgtggatgccaagcacggcggcaaggcccccctgcgggtgcaggtgcaggacaatgaaggctgccctgtggaggccctggtgaaggacaatggaaatggcacctacagctgcagctatgtgcccaggaagcctgtgaagcacacagccatggtgtcctggggcggcgtgtccatccccaacagccccttccgggtgaatgtgggcgccggcagccaccccaacaaggtgaaggtgtatggccctggggtggccaagacaggcctgaaggcccacgagcccacctacttcaccgtggactgtgccgaggccggccagggagatgtgtccatcggcatcaagtgtgcccctggggtggtgggccctgctgaggccgacatcgactttgacatcatcagaaatgacaatgacaccttcaccgtgaagtacacccccaggggggccggcagctacaccatcatggtgctgtttgctgaccaggccacccccaccagccccatccgggtgaaggtggagcccagccatgatgccagcaaggtgaaggccgagggccctggcctgagcaggactggagtggagctgggcaagcccacccacttcaccgtgaatgccaaggctgctgggaagggcaagctggatgtgcagttcagcggcctgaccaagggagatgctgtgagagatgtggacatcatcgaccaccacgacaacacctacacagtgaagtacacccctgtgcagcagggccctgtgggcgtgaatgtgacctacggcggggaccccatccccaagagccccttctctgtggccgtgagccccagcctggacctgagcaagatcaaggtgtctggcctgggggagaaggtggatgtgggcaaggaccaggagttcaccgtgaagagcaaaggagctgggggccagggcaaggtggccagcaagatcgtgggccccagcggggctgctgtgccctgcaaggtggagcccggcctgggcgctgacaacagcgtggtgcgcttcctgccccgggaggagggcccctatgaggtggaggtgacctatgatggagtgcctgtgcccggcagccccttccccctggaggccgtggcccccaccaagcccagcaaggtgaaggccttcggccctggcctgcagggcggcagcgctggcagccctgcccgcttcaccatcgacaccaagggggccggcaccggcggcctgggcctgactgtggagggcccctgtgaggcccagctggagtgcctggacaatggagatggcacctgcagcgtgtcctatgtgcccacagagcccggggactacaacatcaacatcctgtttgctgacacccacatccctggcagccccttcaaggcccacgtggtgccctgctttgatgccagcaaggtgaagtgcagcggccctggcctggagcgggccacagctggggaggtgggccagttccaggtggactgcagcagcgctggcagcgctgagctgaccatcgagatctgcagcgaggccggcctgcctgctgaggtgtacatccaggaccatggagatggcacccacaccatcacctacatccccctgtgccctggggcctacacagtgaccatcaagtatggaggccagcctgtgcccaacttccccagcaagctgcaggtggagcctgctgtggacaccagcggcgtgcagtgctacggccctggcatcgagggccagggcgtcttccgggaggccaccacagagttctctgtggatgcccgggccctgacccagacaggaggcccccacgtgaaggcccgggtggccaaccccagcggcaacctgacagagacctacgtgcaggacagaggagatggcatgtacaaggtggagtacaccccctatgaggagggcctgcacagcgtggatgtgacctatgatggcagccctgtgcccagcagccccttccaggtgcctgtgacagagggctgtgaccccagccgggtgcgggtgcacggccctggcatccagagcggcaccaccaacaagcccaacaagttcaccgtggagaccaggggggccggcaccggcggcctgggcctggccgtggagggccccagcgaggccaagatgagctgcatggacaacaaggatggcagctgcagcgtggagtacatcccctatgaggccggcacctacagcctgaatgtgacctatggaggccaccaggtgcccggcagccccttcaaggtgcctgtgcatgatgtgacagatgccagcaaggtgaagtgcagcggccctggcctgagccctggcatggtgcgggccaacctgccccagagcttccaggtggacaccagcaaggccggcgtggcccccctgcaggtgaaggtgcagggccccaagggcctggtggagcctgtggatgtggtggacaatgctgatggcacccagacagtgaactacgtgcccagccgggagggcccctacagcatctctgtgctgtatggagatgaggaggtgcccaggagccccttcaaggtgaaggtgctgcccacccatgatgccagcaaggtgaaggccagcggccctggcctgaacaccactggagtgcctgccagcctgcctgtggagttcaccattgatgccaaggatgctggggagggcctgctggccgtgcagatcacagatcctgagggcaagcccaagaagacccacatccaggacaaccatgatggcacctacacagtggcctacgtgcctgatgtgacaggccgctacaccatcctgatcaagtatggaggagatgagatccccttcagcccctacagagtgcgggctgtgcccactggagatgccagcaaatgtactgtgacagtgtccatcggcggccacggcctgggcgccggcatcggccccaccatccagattggagaggagaccgtcatcaccgtggacaccaaggccgccggcaagggcaaggtgacctgcaccgtgtgcaccccagatggcagcgaggtggatgtggatgtggtggagaatgaagatggcacctttgacatcttctacacagccccccagcccgggaagtatgtgatctgtgtgcgctttggaggagaacatgtgcccaacagccccttccaggtgacagccctggccggggaccagcccagcgtgcagccccccctgcggagccagcagctggccccccagtacacctacgcccagggcggccagcagacctgggcccctgagcggcccctggtgggcgtgaatggcctggatgtgaccagcctgcggccctttgacctggtgatccccttcaccatcaagaagggggagatcaccggggaggtgaggatgcccagcggcaaggtggcccagcccaccatcacagacaacaaggatggcaccgtgacagtgcgctatgcccccagcgaggccggcctgcacgagatggacatccgctatgacaacatgcacatccctggcagccccctgcagttctacgtggactatgtgaactgtggccacgtgacagcctacggccctggcctgacccacggcgtggtgaacaagccagccaccttcaccgtgaacaccaaggatgctggggagggcggcctgagcctggccatcgagggccccagcaaggccgagatcagctgcacagacaaccaggacggcacctgcagcgtgtcctacctgcctgtgctgcccggggactacagcatcctggtgaagtacaatgagcagcacgtgcccggcagccccttcaccgcccgggtgactggagatgacagcatgaggatgagccacctgaaggtgggcagcgctgctgacatccccatcaacatcagcgagatcagctttgaggacaggaaggatggcagctgtggggtggcctacgtggtgcaggagcccggggactatgaggtgtctgtgaagttcaatgaggagcacatcccagacagcccctttgtggtgcctgtggccagccccagcggagatgcccggcggctgactgtgagcagcctgcaggagagcggcctgaaggtgaaccagcctgccagctttgctgtgtccctgaatggagccaagggggccattgatgccaaggtgcacagccccagcggggccctggaggagtgctacgtgacagaaattgaccaggacaagtatgctgtgcgcttcatcccccgggagaatggagtgtacctgattgatgtgaagttcaacggcacccacatccctggcagccccttcaagatccgggtgggggagcccggccatggaggagaccccggcctggtgtctgcctatggagctggcctggagggcggcgtgacaggcaacccagctgagtttgtggtgaacaccagcaatgctggggccggggccctgtctgtgaccattgatggccccagcaaggtgaagatggactgccaggagtgcccagagggctacagagtgacctacacccccatggcccctggcagctacctgatcagcatcaagtatggaggcccctaccacatcggcggcagccccttcaaggccaaggtgacaggcccccggctggtgagcaaccacagcctgcacgagaccagctctgtgtttgtggacagcctgaccaaggccacctgtgccccccagcacggggcccctggccctggccctgcagatgccagcaaggtggtggccaagggcctgggcctgagcaaggcctacgtgggccagaagagcagcttcaccgtggactgcagcaaggccggcaacaacatgctgctggtgggcgtgcacggccccaggaccccctgtgaggagatcctggtgaagcacgtgggcagccggctgtacagcgtgtcctacctgctgaaggacaagggggagtacaccctggtggtgaagtggggagatgagcacatccctggcagcccctacagagtggtggtgccctag

SEQ ID NO: 42077 - DNA, 7944 bp, Artificial Sequence
  derived and/or modified sequence
atgagcagcagccacagccgggccggccagagcgccgccggcgccgcccccggaggtggcgtggacacaagggacgcggagatgcctgccaccgaaaaagatttggctgaagatgccccgtggaagaagatccagcagaacaccttcaccagatggtgcaacgaacatcttaaatgtgtgagcaaaaggatcgctaatttgcaaacagacctatccgatggactgcggctgattgccttactggaagtgctgtcgcagaaaaagatgcacaggaaacacaatcaacggcccacatttaggcaaatgcaactagagaatgtaagtgttgctctggagttcttggatagagagtccattaaactggtgtcaatcgactcaaaggcgattgtagacggtaacctaaagctgatacttggccttatttggacattgatactccattatagcatttcaatgcccatgtgggatgaagaggaagacgaggaggctaagaaacagactccgaaacagcgactcttggggtggatccagaataaattgccgcaacttcccatcaccaatttcagtcgtgattggcagtccggccgggcactcggagctctggtggactcctgtgctcctggcctctgtccagactgggactcatgggatgcttcgaagccagttacgaacgcgagggaagccatgcaacaagccgacgattggcttggaattcctcaggtgatcaccccagaagagattgtggaccctaacgtcgatgagcactctgtgatgacttaccttagccaattccccaaggctaaactgaagcccggtgcacccctgcgtcctaagctcaacccaaaaaaggccagggcttacgggcctgggattgagcccaccggcaatatggttaagaaacgcgccgagttcactgtcgagacgcggtctgctggccagggtgaggtccttgtctatgttgaagatccagctggccatcaagaagaggccaaagtgaccgcgaacaatgacaaaaaccggactttctctgtgtggtacgtgccagaggtgaccgggactcataaagtgactgtcctgtttgcagggcagcatatcgccaagtcccctttcgaggtgtatgttgataaatcacagggtgacgcaagtaaggtcaccgcccaaggcccaggtctggaaccaagcggcaatatcgcaaacaagaccacttactttgagatctttacggcaggcgcgggtacaggggaagtggaagttgtaatccaggaccccatgggtcagaagggcaccgtcgagccgcagctggaagcccgaggagactccacgtaccgctgctcctatcagcctaccatggagggcgttcacacagtccacgtcacattcgctggggtgcccatcccacgctccccctacactgtcactgtgggccaggcatgtaatccttccgcttgtagagcagtggggcgggggctccagccaaaaggcgtcagagtgaaggagacagcagatttcaaggtctatacaaagggggctggttcgggagaactgaaggttaccgttaagggacccaagggcgaggaaagagttaagcagaaagaccttggagatggggtctacgggttcgagtactatcccatggttccaggcacctacatcgtcactataacttgggggggacaaaacattggtcgatcaccctttgaggtaaaggttggcaccgaatgcggtaaccaaaaagtgcgtgcttggggccctggtttagagggcggcgtcgtcggcaaatctgccgacttcgtggtcgaggctatcggcgacgatgtgggcacgttaggattctcagtggagggcccaagccaggcaaaaattgagtgcgatgacaaaggcgacggctcatgtgacgtcaggtactggccgcaggaggccggtgagtatgccgtccacgtactttgcaattcagaagacattagactgtccccattcatggcagatatccgtgacgctccccaagatttccaccccgatcgagtcaaggcccggggtcccggcctcgagaagaccggagttgccgtgaacaaaccggctgaattcaccgtggacgctaaacacggaggcaaagctcccttacgggttcaggtgcaggataatgaaggctgtccagtagaagccctggtcaaagataacggaaacggcacctattcgtgtagctatgtcccacggaaacctgtgaagcacaccgcaatggtttcatggggcggtgtctcaatccctaacagcccttttagagtaaacgttggggcaggatcacaccccaataaggtgaaggtttacgggccaggggtggcaaagactggccttaaagcccatgaacctacctactttaccgtagactgtgcagaggccggccagggagacgtttcaattgggattaagtgtgctcctggagtggtagggccagccgaagcagacattgattttgatatcatccgcaatgataatgatacgttcaccgttaaatacacccccaggggtgccggaagttacacaatcatggtgctgttcgcagatcaagcgactcccacatcacccatccgcgtcaaagtagagccttcgcacgatgccagtaaagttaaggcagaaggtcccggcctgtctcgtaccggtgttgaacttgggaagcccacacacttcaccgtgaacgctaaggccgcaggcaagggcaagttggacgttcaattctctggactcaccaaaggagatgctgtcagggacgtggacattatcgaccaccatgataacacatacaccgtcaagtatacccccgtgcaacagggccccgtcggcgtaaacgtaacctacgggggagatccaattccaaaaagccctttcagtgtagccgtgtctcccagcttggatctgtcaaaaatcaaagtgtccggtctgggggagaaagtagatgtgggcaaggaccaggagtttaccgtaaaatctaaaggcgccggcggacaagggaaagtcgcttcaaaaattgtgggtccaagcggggctgctgtgccctgtaaggtcgagccagggctaggggcggataactcggtggtacggtttctcccacgggaggaaggcccctacgaggttgaggtgacgtacgacggcgtgccagtccctggaagtcccttccctctggaggcagtggccccgactaagccttccaaagtcaaggctttcggaccaggcctccaaggaggctctgctgggtcgcctgcaaggttcacaattgatactaagggggcaggtaccggggggctcggcctgacagttgagggtccctgcgaggcacagctggagtgcctggacaatggagatggcacatgttcagtatcatacgtgccaaccgagccaggggactataacatcaatattttgtttgctgacacgcatatacctgggtcaccatttaaggctcatgtggtgccttgtttcgacgctagcaaagtaaaatgctcaggaccagggttagagcgcgctacagccggggaagtgggtcagttccaagttgattgttcttccgctggctctgcagagttgaccatcgaaatatgttctgaggctggcttgcccgcagaggtgtatattcaggaccacggcgacgggactcacactattacctacatccccctatgccctggagcctatacagtcaccatcaagtacggcggccaacctgtgccaaacttccccagcaaacttcaggtggaacctgcagtcgatacctcaggagtgcaatgctacggtcctggcatagaggggcagggagtcttcagagaggctaccactgagttttcagtggacgcccgtgcactcacgcagaccggggggccccacgttaaagcccgcgtggcaaacccatctggaaatctaaccgaaacatacgtgcaggacaggggagatggcatgtataaagtggagtacaccccatatgaagaaggactacattctgtggacgtaacatacgatggaagccctgttcccagctctccctttcaagtgcccgtgaccgagggctgcgacccatcccgagttagagtccacggcccaggcatccagagcggcaccaccaataaaccaaacaagtttactgtcgagacacgcggggcagggacaggtggtctgggcctcgctgtcgaaggaccttccgaagctaaaatgtcatgtatggataacaaagacggatcttgcagtgtggagtatatcccctacgaagctggaacatatagcctcaacgtaacatatggcggccatcaagtgcctggctcccctttcaaggtgcctgtgcatgacgtgactgatgcttcgaaggtgaagtgttctggtccgggactatcaccaggaatggtgagagccaacctgccgcagagcttccaggtggacacaagtaaggcgggtgttgcacctctccaagttaaggtccaggggcctaaggggctggtcgagcctgtagatgtggtggataatgcggatggcactcaaacagtaaactacgtgccttccagggagggcccctacagcatctcagtcctctatggggacgaggaagtaccgcggagcccgttcaaggtcaaggttctgccgacccacgatgccagcaaggtcaaagcgtcaggcccgggcctaaatactactggagtacccgcaagtctgcctgtggaattcaccatcgacgcaaaagatgcaggtgaagggttgttggcagtgcaaatcacagatccagagggaaaaccgaaaaagactcatattcaggataatcacgatggaacatacaccgttgcatacgtgcccgatgtgacgggcaggtatacaatcttaattaagtatgggggggatgagattccatttagtccctatcgggtgcgtgcagtaccaacgggcgacgcctccaagtgcactgtgaccgtatctatcgggggacacggccttggtgccggtatcggcccaactattcagatcggagaggagacagtcattacggtcgacacaaaagccgcaggcaagggcaaagtcacttgcaccgtgtgtacccccgatgggtcggaggttgacgttgacgtggtcgagaatgaggatggcacttttgatatattttataccgcaccccagccaggtaagtatgtgatttgcgttcggttcggcggtgagcatgtgcctaatagtcccttccaggtgacagctctggccggggaccaacccagtgttcagccgccgctacggtctcagcagcttgcgccgcagtatacatatgcccagggcggccaacagacctgggcacctgaaagaccgcttgttggtgtgaatggccttgacgtgacatccctgcgtcctttcgaccttgtgattccctttacaatcaagaaaggtgaaattacaggcgaagttcgtatgccctccggaaaggtggcgcagccaacgattactgacaataaagacggaacagtcaccgtgcgttatgcgccgtccgaggccggcttgcatgagatggacatcagatacgataacatgcacattcccggaagcccccttcagttttatgttgattatgtgaactgcggacacgtcactgcctatggccccggcctaacacacggcgttgtgaacaagccagcgaccttcactgtgaacaccaaagacgccggcgagggtggtctgtccttagcaattgagggtcccagtaaggccgaaatctcatgtaccgataatcaagatggtacctgctccgtgtcttacttacccgtcctcccgggcgattactccatcctggtgaaatataatgaacagcacgtgcctgggagcccttttacagcaagggtaacgggtgacgattcaatgaggatgagccacttaaaagtagggtctgccgccgacatccccatcaacatatccgagacggacttatcactccttacggctaccgtggttccaccaagtggccgcgaggagccatgcctgcttaagaggctccgcaacggacacgtcgggatttccttcgtccccaaggaaactggtgagcatctagtgcatgtaaaaaagaacggccagcacgtggctagttcccctatcccggtggtgatctcacagtccgaaatcggtgatgcttccagggtgcgcgtatcaggccaaggactgcatgagggccatacctttgagcccgccgaatttataatcgacacccgcgacgccggctacgggggcctgagtctaagcatcgaaggcccttctaaagttgatatcaatactgaggatctggaggatgggacttgccgagtcacctattgcccgactgaaccaggcaactacatcattaatattaagttcgccgatcagcacgtgccgggatctccatttagtgtgaaagttaccggggagggccgcgtgaaggagtctataaccaggagaaggagagcacctagcgtggccaatgtgggctcacactgcgatctctcactgaagatccccgagatctcaattcaagatatgaccgcccaggtcaccagcccgtcgggaaagactcatgaagcggaaattgtggaaggcgagaaccatacctattgtatcagatttgttcctgcagagatgggaacacacacagtctcggttaaatataaggggcagcatgtacctgggagcccgtttcagttcacagttggcccccttggcgagggcggggcccataaggtcagagctggcgggcccggattagaacgagcggaggcaggtgttccagccgagttctcaatatggacccgcgaggccggagcgggggggctggcgatcgcagtcgagggccccagcaaagcggagatttcatttgaagaccggaaagacgggtcttgtggagttgcttatgtcgttcaagaaccaggcgattatgaagtctctgtcaagtttaacgaggaacacattcctgattcaccgttcgtggttcctgtcgcgtctccatcaggggatgctaggaggctgaccgtatcatctctgcaggaatctggcctgaaggttaaccagccggcctcttttgccgtgtctttgaacggggccaagggagctattgatgccaaagtgcatagcccctccggtgcgcttgaagaatgctatgttaccgagatcgatcaggacaaatacgccgtgcggtttattcccagagagaatggcgtgtatctgatcgatgtgaaatttaatggaacccacatacctggttcacccttcaaaatacgcgtgggtgaaccggggcacggaggtgaccctggtttggtgtccgcctatggagctggcctggagggtggcgtgaccgggaatccggctgagttcgtggttaacacttcgaatgcgggggccggtgccctgtccgtgacaatcgacggcccttcaaaagtaaagatggattgccaggagtgtcctgaaggctatagggtcacgtatacgcctatggcaccaggtagctacctgatcagcatcaaatacggcgggccataccacatcgggggatcaccttttaaggctaaggtaacggggcctcggctcgtgtctaaccatagcctccacgaaacgagcagtgtgttcgtggacagtctgacgaaagccacatgcgctcctcagcacggggctcccggccctggcccagctgatgcctccaaagtagtggcaaagggccttggactgtccaaagcatacgtgggtcagaaatctagctttacagtggattgtagtaaagctggtaacaacatgctcttggttggagtgcatggcccccgcactccatgtgaggagatactggtaaagcacgtcggtagtcgtctgtacagcgtatcctaccttcttaaggacaagggggagtacactttggtcgtgaaatggggcgatgagcatattccaggaagtccttatcgtgtcgtggtgccttag

SEQ ID NO: 42078 - DNA, 6948 bp, Artificial Sequence
  derived and/or modified sequence
atgcccgccaccgagaaggacctggccgaggacgccccctggaagaagattcagcaaaacacttttacgcgctggtgcaatgaacacctcaagtgtgtgtctaaacgtatcgccaatctccagacagacttaagtgatggcctgcgattgattgccctgctggaggtcttatcgcagaagaagatgcacagaaagcataatcagcgacctacctttagacagatgcagttagaaaacgtgtcagttgctctggagtttctagatcgtgagtctattaagctcgtctccatcgactccaaggctatcgttgacgggaacttaaaactgattttaggcttaatctggaccctcattctccattatagcatatcaatgcccatgtgggacgaagaggaagatgaagaggctaaaaaacagacccccaaacagaggctcctcggatggatacagaataaactgcctcaacttccgattaccaatttctcccgcgactggcagagcggacgagcgctgggcgccctagtcgattcttgcgccccaggactctgcccggattgggattcttgggacgccagtaaaccggttacaaacgcccgcgaagctatgcagcaagccgacgattggctggggattccccaagtgatcacacccgaggagatcgtagaccccaacgttgatgagcacagtgtcatgacttacctgagccaattccccaaggctaagttaaagcccggtgctccgcttcgcccaaaactgaacccaaagaaagctcgggcctatggcccaggaatcgaaccaacaggtaacatggtgaaaaagagggcagaattcaccgttgaaacgaggtctgcaggacaaggagaggtgctggtctacgttgaagaccctgcaggccaccaagaggaggccaaggtgactgcgaataacgacaaaaacagaactttcagcgtgtggtacgtgcccgaagttaccggcactcacaaggtgacggtcctgtttgctgggcaacacattgccaagagtccatttgaggtctatgttgacaagtcccagggggacgcgagtaaagtgaccgctcagggaccgggtttggagccttccgggaacatagcaaacaagactacttactttgaaatatttaccgcgggtgctggaactggggaagtagaagtcgtgatccaggatccaatggggcagaagggtaccgttgagccacagctagaggcccgtggtgactcgacatatagatgttcctaccagcccaccatggaaggagtgcacacagttcacgtgacttttgccggcgtgcccattcccaggtctccgtacacggtgaccgtgggccaggcctgcaacccctcagcctgtcgtgctgttggccgtggcttacagcccaagggcgtgcgggttaaagagacggccgatttcaaagtttacacgaaaggcgccggcagtggggaactgaaggtgacggttaaagggcctaaaggcgaggaacgggtcaaacagaaggatctgggagatggggtttatggctttgagtattaccctatggtacctggcacctacatcgttaccattacttggggcggccagaacattggaagatctccatttgaagtaaaggtgggcaccgaatgcggcaaccagaaagttagagcttgggggcctggactggagggaggcgtggtgggaaaatccgctgatttcgtcgtcgaggctattggggacgacgtgggcactttaggattctccgttgaggggccctctcaggctaagatcgaatgtgatgataagggcgacggctcttgcgacgtgcggtactggccacaggaagccggcgagtacgccgtgcatgttctctgcaattcagaggatattagactgtccccattcatggcagatatcagagacgcccctcaggattttcaccctgacagagtaaaagcccgggggccaggcttagagaaaactggcgtggcagtgaacaaaccagccgaatttacagttgatgctaagcacggtggtaaagcccctctgcgagtgcaggtgcaggataatgagggctgccccgtggaagccctggtgaaagacaatggcaatggtacttacagctgctcctatgtgccacgcaagccagtgaagcatactgcaatggtatcatggggcggcgtttctatccctaactctcctttcagagtgaacgtcggtgctggctctcaccctaacaaggtgaaagtgtatggcccgggggtggcaaaaaccgggctgaaggcccacgaacccacttactttacagtggactgcgcagaggccgggcaaggagatgtgtccatcggcatcaagtgtgcgcccggagtggtcggtccagcagaggccgacatcgacttcgatatcataagaaacgataatgacactttcacagtgaaatacactcctcgtggggcggggagttacactattatggttctcttcgcagatcaggcaactcccactagccccatccgagtgaaagtagaaccctctcacgacgccagcaaggtaaaggcagaggggccaggtctcagccgcaccggagttgaactgggaaagcccactcatttcactgttaatgccaaggccgctggtaaggggaagctggatgtccagttcagcggtttgaccaagggggacgctgtgcgcgacgtggatattatcgatcatcatgacaatacctataccgttaaatacaccccagtgcagcagggtccagtcggagtgaacgttacatatggcggcgacccaatacctaaaagcccatttagcgtggcagtgtctccaagcttggacttgtctaaaatcaaggtgtcaggtctgggtgagaaagtcgatgttggaaaggaccaggagtttacagtgaagagtaagggcgctggagggcaggggaaagtggcaagtaaaatcgtaggcccgagtggagcggcggtgccatgtaaagttgaacctggcctcggggcagataattccgtggtccgattcctcccacgggaggagggcccatacgaggtggaggtgacttacgatggcgtgccagtgcctggctctccatttcctcttgaggcagtagcacccacgaagccttcgaaggtgaaagcatttggcccaggactgcagggcggatctgccggaagcccagcaaggttcaccattgatacaaagggagctgggactggaggccttggccttacagtggagggtccctgtgaagctcagctggagtgtctcgacaacggggacggcacttgcagcgtgtcctatgttccaacagaacccggcgattataatataaatatcttattcgcagacacacacatccccggctctccattcaaagcccacgtagtcccgtgcttcgatgcttccaaggtgaagtgctcaggcccaggtttggagagggccactgccggagaagttggacaatttcaggtggactgttcttcggcaggatcagccgagctgaccatcgagatttgctcagaagccggtctacccgccgaagtttacatccaggaccacggcgacggcactcacacaataacctacattccactgtgcccaggggcttacacagtcaccatcaagtatgggggccaacctgtgcccaatttcccctcaaagctgcaagtagagcccgccgtggacaccagcggggtccagtgctatggtcccgggatcgaggggcagggtgtgttccgggaagcaaccactgagttttcagttgatgcgcgggcccttacccagaccggcgggccccacgtcaaggcacgcgtggccaatcccagcgggaacctcaccgaaacatacgtgcaggacaggggtgatggtatgtacaaagtggagtatacaccgtacgaggagggcctccatagcgtggatgtgacctacgatggatctcccgtcccaagctcacccttccaggtgccagtgacagaaggttgtgacccttccagggtgcgtgtgcacggaccagggattcagagcgggacaacaaacaagcccaataaattcacagtcgaaactcggggcgccggaacgggcggtctagggcttgctgtagaaggcccatcagaggccaagatgtcatgtatggacaataaagacggaagctgcagtgtagagtacatcccctatgaggctggaacctacagtcttaacgtgacttatggtggacaccaggtaccaggctcgccattcaaggtcccagtccacgacgtgacagatgcatcaaaagtaaaatgctccggacctgggttgagcccgggaatggttcgagccaacttgccacagagtttccaggtggatacctcaaaggctggtgtggccccactgcaggtgaaggtccagggcccaaagggacttgtggaaccagttgacgttgtcgataacgctgatgggacacagactgtgaattacgtgccaagccgagagggtccatactccatctccgttctctacggggatgaggaagtgcctcggagccccttcaaggtgaaggtgctccctacacacgacgctagtaaagtcaaggcgtccggacctggcttgaacaccacaggcgtgcccgcatcactccccgtcgaatttacaatagacgcaaaagacgcaggtgagggactccttgccgtgcagattaccgatcccgaaggtaaacccaaaaagactcatatacaggacaaccatgacgggacatacactgtggcctatgtcccagatgtgactggaaggtacaccattctgatcaaatatggcggagatgaaattcccttcagcccttacagagtgagagctgtccctacaggggatgcaagcaaatgtaccgtgacggtttcaattggcggtcatggcctgggggccgggataggcccgactatacagatcggagaagagacagtcattacagtggacacaaaagcggcagggaaagggaaggtaacttgcacggtgtgtactccagatggctccgaggttgacgtagacgtggtggagaacgaggacggcactttcgacatattctacactgctccgcagccaggcaaatacgtgatctgcgtgcgttttgggggggaacatgtgcctaactcccccttccaggtcacggccctggctggagaccagccctctgttcaacctcccttgcggagccaacagttagccccccagtatacttatgcccagggaggccaacagacctgggcccctgagaggccacttgtgggggtgaatgggctggatgtgacttccctgaggcctttcgacctagtgatcccctttacaattaaaaaaggcgaaatcactggtgaagtgcgaatgccgtcagggaaagttgctcagcccactattaccgacaacaaagacggtacggtgactgtccgctatgctccctctgaggccgggctgcacgaaatggacataaggtacgataacatgcatatcccaggttcccctcttcaattttatgtggactacgtaaattgcggtcacgttaccgcctacggccctgggctgacacacggagtggtaaacaaacctgctacctttaccgtgaacactaaggatgccggagaaggcggcctcagcctcgccatcgaagggccgagcaaagccgagatttcttgcactgataatcaggacgggacctgctccgtgagttacctgccagtgctacccggggattatagcatcttggtcaaatataatgagcagcacgtcccgggatctcccttcacagcccgcgttacgggagacgactccatgcgcatgtcccacctcaaggtgggatctgccgcagatatcccaattaacatttccgaaatctccttcgaggatcgaaaggacggaagctgcggcgtagcgtacgtcgtgcaggagccaggcgactacgaggtatcggtcaagttcaatgaggagcatatccccgattcacctttcgtcgtcccagtggccagcccctctggggatgctcgcagactgactgtgagcagcctgcaggaatcagggctcaaagtgaatcagcccgcctcatttgcagtgagcctgaacggagcgaagggggcgattgacgcaaaagtacactcaccttctggtgctctggaagaatgctatgtgactgaaattgaccaggataagtatgcagtgaggtttattccccgggagaacggcgtgtacctcatcgacgtcaagtttaatggaacccacattcccgggtccccattcaaaatacgcgttggagaaccgggacatggcggtgatcctggactagtgagtgcctacggggccggcttagaaggtggggtgacgggcaatcctgcagagttcgtggtcaacacatctaatgccggcgcaggggccctgagcgtgactatcgacggtccctcaaaggtgaaaatggattgccaggagtgtcctgagggatatagggtgacgtatactccgatggctccagggtcatacctcatttctattaagtacgggggcccataccatatcggcggtagtccttttaaagctaaggtaacgggcccaaggctcgtatctaatcacagtttacacgagacttcttcagtctttgtggattcccttacaaaggccacatgtgcccctcagcatggtgctccagggccagggccggcggatgctagcaaagtggttgcaaaaggactgggtctgtctaaagcctacgtcggccagaaatcctcctttaccgtggattgttctaaggccggaaataatatgctgctcgtcggcgttcatggccctaggacaccctgcgaggagattctcgtgaagcacgtgggctcgcgcctgtatagtgtgtcttaccttttaaaggacaaaggcgagtacacgttggtggtgaagtggggtgacgaacacattcccgggtccccctatagggtagtagtgccctag

SEQ ID NO: 42079 - DNA, 7943 bp, Artificial Sequence
  derived and/or modified sequence
atgagttcctcacactcccgcgcaggccagagcgcagcaggcgcagcgcctggaggaggagttgatactcgggatgctgaaatgcccgctaccgagaaagacctggccgaagacgcgccatggaagaagatccagcagaacaccttcactagatggtgtaacgaacatctgaagtgcgtaagcaaacggatcgccaacctccaaaccgacctgagcgatgggctccgactgatcgcactcctggaagtgttatctcaaaaaaagatgcacagaaaacacaatcaaagacctacgttcaggcagatgcagctggagaatgtcagtgtagcgctggaattcctggaccgcgaatctatcaagctcgtatccatcgattccaaggctattgtggacgggaatctgaagctgatcctggggctgatctggaccctgattcttcactacagcatttctatgccaatgtgggacgaagaggaagacgaagaagctaaaaagcaaacccccaagcagaggctgttagggtggattcaaaataagctgccgcagctgcctatcaccaacttcagtagggactggcagtctggcagggctttaggagcactcgtggatagttgcgctcccggactgtgcccagactgggatagctgggacgccagcaagccagtcacaaacgccagagaggcaatgcaacaggcagatgactggctcgggatcccgcaagtcataaccccagaggagatcgtggatcccaatgttgatgaacactctgtcatgacctacctaagtcagtttcctaaggccaaacttaagcctggggcacctctgcggccaaagctgaatcctaaaaaggccagagcttatggacctggaatcgagcccacaggtaacatggttaagaaacgggctgagttcaccgtggagacgcgcagcgcaggtcaaggcgaagttctcgtgtatgtcgaggatcctgcaggccatcaggaagaggcaaaagttacagctaacaacgacaagaatcgtacattttcagtctggtatgtaccagaggtgaccggcacccacaaagtcacagtcctgttcgctggccaacacattgccaaaagcccattcgaagtttacgtggataaatctcagggggacgcttcaaaagtcaccgcacagggtcccggactcgagcctagcggcaatatcgcgaataagacaacctatttcgagatatttacagcaggagcaggcaccggtgaggtcgaggtagtgatccaggacccgatgggccagaagggcacagtagagccgcaactcgaagccagaggtgattcgacctacagatgctcctaccagcctaccatggaaggcgtgcacactgtgcacgtaaccttcgctggtgtgcctatcccaaggagcccctatacagtgacggtcggtcaggcctgtaacccttctgcttgccgcgcagtgggcaggggtctgcagccgaaaggcgttagggtgaaggagacggctgattttaaagtatatacaaagggagccggaagcggagagttgaaagtgactgtcaagggccctaagggcgaggagcgggtgaaacagaaggacttgggtgacggtgtgtatggcttcgaatattacccaatggtaccaggaacctatatcgtgactattacatggggcggacagaatataggaagaagcccgttcgaggtcaaagttgggaccgaatgcggaaatcagaaggtgagagcatggggcccagggttagagggcggagtggtgggcaagtccgctgactttgtggttgaagccattggcgatgacgtgggtaccctgggcttctcagtcgaagggcctagtcaggctaagattgaatgtgacgacaaaggcgatggatcctgcgacgttagatactggccacaggaagccggagagtatgctgtccatgtgctgtgcaattccgaggatattagactctcaccttttatggctgatatccgcgatgctcctcaggactttcacccagatagggtgaaggctagaggccctggtttggagaagactggtgtggcggtaaataagccggcagagtttaccgttgatgccaaacacggtgggaaagcaccccttcgcgtacaggttcaggataatgaggggtgtcctgtggaggctttggtgaaagataacggtaatggaacatactcatgttcctatgttcccagaaaacccgtgaagcacaccgcgatggtgagttggggcggtgtatctatccctaatagtccgttcagagtgaacgtgggcgcaggctcccatcccaacaaggtcaaggtctatggcccaggtgtcgctaagaccggtctgaaagcacatgaacctacttatttcaccgtggattgtgccgaagcagggcagggagacgtgtcaatcgggatcaagtgtgcaccaggagtcgtaggcccagctgaggctgacattgacttcgacataatcaggaatgataacgatacattcacagttaaatacacaccaaggggcgctgggtcctacaccattatggtcttattcgccgatcaggccacacccaccagccctatcagggtcaaggttgagccgtcccatgacgcctctaaagtgaaagcagaaggaccgggtctttctcgaacaggcgtggaactggggaagcccacccacttcacagtcaatgccaaagccgctggcaaaggtaaactcgatgtgcaattttctggacttaccaagggtgacgctgtccgggacgttgacatcattgaccaccatgataatacctatactgttaaatataccccagtgcagcagggcccagtgggggttaacgtaacctacggcggagaccccataccaaagtcgcccttctccgtcgccgtatcgccaagccttgacttaagtaaaatcaaggtcagtgggttaggcgagaaggtcgatgtcgggaaggaccaagaattcacagtgaagagcaaaggcgcaggcggacagggcaaagtggccagcaagatcgtgggccctagtggcgctgccgtgccatgcaaagtggagccaggactaggcgctgataacagcgtggtccgctttcttccccgagaggaggggccatacgaagtggaggtgacttacgatggggtccctgtgcctggctcaccatttccccttgaggcagtggctccaaccaagccatccaaagtgaaggcctttggtccaggtctacaaggcggttcggccggtagccccgcacgctttaccatagacactaagggtgctgggactggagggctcggcctaaccgtcgagggcccatgcgaggcccagctggaatgcctagacaacggagatggcacttgttcggtgagctatgttcccacagaacccggtgattataacatcaacatattgttcgccgatacccacatccctggctcgccgtttaaagcccacgtggtcccctgtttcgacgccagcaaggtaaagtgctcaggtccaggtttggagagggcgactgctggagaagtgggccagtttcaggtcgattgctcaagcgcgggatccgctgaactcaccatcgaaatatgttcagaagccggactgccagctgaggtatatatccaagatcacggtgacggcactcataccattacttatatccccctgtgtcccggagcatatacggtaacaatcaagtacggaggtcaacccgtgcctaacttcccaagcaagctgcaagtcgaacctgctgttgacacgagcggagtacagtgctacggacccggaattgagggccagggtgttttccgggaggcaacaaccgagttctcagtagatgccagggcactgacccagacagggggtcctcacgtaaaggcgagagtggcgaacccgtctggaaacttaactgagacgtatgttcaggataggggcgacggaatgtacaaggtggagtataccccatatgaggagggcttgcacagtgtcgacgtgacatacgatggcagtccggtgcctagctctccattccaggtcccggtgaccgaaggttgcgacccttcacgcgttagagtccatggccctgggattcagagtgggacaaccaataagcctaataagttcaccgtggagaccagaggtgccggaacaggtggcctgggacttgccgttgagggtccctccgaggctaaaatgtcctgtatggacaataaggatgggtcctgttccgtcgagtatattccctacgaggcagggacatactccctgaatgttacctacgggggacaccaagtgcccggttctccgtttaaagtccctgtccacgacgtgaccgatgcaagcaaggtcaagtgttctggccctggcttgtctcctggcatggtgagggctaatctcccacagtctttccaggtggatacatcaaaagccggagtggctcctctacaggttaaagtgcagggacccaaagggctcgtagagcccgtggatgtggttgataatgctgacgggacccagaccgtgaactatgtgccctctcgcgagggtccctattctatctccgtcctctacggcgacgaggaggttcctaggagtccttttaaggtgaaagtgcttcccacgcatgacgccagtaaagtgaaagcctccggccctggcttaaatacgaccggagtaccggcatcacttccagttgagtttacaattgacgccaaggatgctggggagggtctgcttgctgttcagatcaccgacccagaaggaaagcctaagaagacgcatatccaggacaaccatgatgggacgtataccgtggcctacgtcccagacgtcacaggccgatataccatattgatcaagtatggcggagacgagattccctttagcccataccgtgtacgggctgtgcctaccggggatgcttcaaagtgtacagtgaccgtgtcaattggaggccatggcctgggcgcaggcataggaccaactattcagatcggcgaagaaactgtcataactgtcgacacaaaggccgctgggaaagggaaagtgacctgcactgtgtgcaccccagatggctccgaagtggacgttgatgtggtggaaaacgaggatggaacttttgacatcttctacacagctccccagcctggcaaatatgtgatttgtgtgagattcgggggagagcacgtgcctaatagcccttttcaggtgacagccctggccggtgaccagccgtccgtccaacccccactcagatcccagcagttggccccacagtacacctatgcccagggtggacagcagacttgggcaccggagagacctctggtcggcgttaacggccttgacgttacgagtcttaggcctttcgatctggtcattcctttcactataaagaagggggagatcaccggagaggtgagaatgccctccggaaaggtcgcccagcctaccatcacagacaataaagatggaactgttacagtgcgttatgccccatccgaagcgggactgcacgaaatggatattcggtacgacaatatgcatattccagggtccccacttcagttctatgtcgattacgtcaattgcggccacgtgacggcttatgggcctgggctgacacacggggtggtgaacaaacccgcaacttttaccgtgaacaccaaggatgcaggggagggcggactgtccctcgcaatcgagggccctagtaaagctgaaatatcatgtaccgataatcaggacggcacctgctctgtatcttacctccccgtgctgccaggagattattctatcctggtgaaatacaatgagcagcacgtgccagggtcgccatttactgcacgggttaccggcgacgattcgatgagaatgtcccatctcaaggtggggtctgccgcagacatccctatcaatatctccgagactgacctttccctgctcaccgccaccgtcgtgccacctagtggcagagaggaaccgtgcctgttgaaacgcctgaggaacggacatgtgggaatatcctttgtcccaaaagagacgggtgagcacttagttcacgttaagaagaatggacaacacgtggccagttcacccatccccgtggttatcagtcagagcgagataggagatgcttcgagagtccgagtctccggacagggtttacacgaaggccacacgtttgagccagcggagtttatcattgacactcgggatgccggatatggcggtctgagcctgtcaattgaaggcccaagcaaggtggacattaacaccgaggatctagaagatggcacatgccgcgtaacctattgccctaccgagcccggtaactacattattaatattaaatttgccgatcagcacgttccaggaagccctttcagcgtgaaagtgacaggagaaggaagggtgaaggaatctatcacacggaggcgtagagcaccaagcgtggccaacgtaggcagtcattgtgatctcagcctgaagatccctgagatctctatacaggacatgaccgcccaggtaacctcacccagcggaaaaacacacgaagcagagattgttgagggtgaaaaccacacttattgtatccgatttgtgcctgcagaaatgggaacacacaccgtgtccgttaaatacaaaggccagcatgtccccggaagcccattccagtttaccgtgggccctctgggtgagggaggtgcccacaaagtgcgcgctggcggacccggactcgagagagccgaagccggagtacccgctgagttttccatctggacccgggaggccggtgcagggggactggctatagctgtggagggcccatcaaaggccgagatttcattcgaggacaggaaagatggatcttgtggcgtggcctatgttgtgcaggaaccaggggattatgaggtgtccgtaaaatttaacgaggagcacatccccgattcacctttcgtggttcccgtagcctctccttcaggcgatgccaggcggctgactgttagctccttgcaggagagtggcttgaaggttaatcagccagccagctttgctgtgagcctgaatggtgccaagggagctatagatgctaaagttcactcaccaagcggtgccttagaggaatgctacgtgaccgagatagaccaggataaatatgcggtgagatttatccccagggaaaacggagtgtacctgattgatgtaaagttcaacggaacccacatcccgggatcgccttttaagattcgggtgggggaaccaggacacggaggcgacccaggcctggtctctgcctacggggcagggctggaaggcggtgtgacaggcaatccggcagaattcgtagtgaatacttccaacgccggtgccggagccctgagcgtaaccattgatggtccttctaaagtgaaaatggactgtcaggaatgccctgagggttatagagtcacatatactcccatggccccaggttcctacctgatctcgatcaagtatggcggtccttaccacataggagggagccctttcaaggcgaaggtgactggcccacgcctggtgtcaaaccattctctgcacgaaaccagtagcgttttcgtcgactccttgactaaagccacatgcgccccacagcacggcgcacccggacctggaccagctgacgcctccaaggtcgtcgctaagggccttggcctgagcaaagcgtatgtgggccagaagagctcgttcaccgtggattgtagcaaggccggaaataatatgctgttagtgggggtgcacggacccagaacaccatgcgaagagattctggtcaagcatgtggggagccgtctatacagtgtctcgtacctgttgaaagataagggtgagtacactctcgtcgtaaagtggggggacgaacatattcccggttcgccttaccgcgtcgtggtgcctta

SEQ ID NO: 42080 - DNA, 6947 bp, Artificial Sequence
  derived and/or modified sequence
atgccagccacagagaaggatctggccgaggatgcgccttggaaaaaaatccagcagaatacattcacccgatggtgtaacgagcatctcaaatgtgtgtccaaaagaattgctaatctccagacagacctctccgatggactaagactgatcgctctcctggaagtgctgtctcagaaaaagatgcacagaaagcacaatcagcgtcctaccttccgccagatgcagcttgagaatgtcagtgtggcactggagtttctggaccgcgagtccatcaagttggtatcaattgactctaaagccatcgtggatgggaacctcaaactcatccttggcctgatatggacgctaatcctgcattattctattagcatgcctatgtgggacgaggaggaggacgaagaggccaaaaaacaaacaccaaaacaaaggctcctgggctggattcaaaacaagctacctcagctgcctattacaaatttttcaagggactggcaatccgggagagcgctcggcgcactggtggacagctgtgcccctggactctgccccgactgggattcatgggatgcttctaagccggtgacaaatgctagggaagctatgcagcaggccgatgactggctcggcattccccaggtgatcacccctgaagagattgtcgacccgaatgtggatgagcactccgtcatgacgtatttatcccaattccccaaggccaaactgaagccgggagctcccctgcgccctaagctgaaccctaaaaaagccagggcctatggaccgggaattgagcccaccggaaacatggttaagaagcgggcagagttcactgtagaaacgcgctccgccggtcagggggaagtccttgtgtatgtcgaagacccggctggccatcaggaagaagccaaggttacagcgaacaacgacaagaatcgaacatttagcgtgtggtacgtgcctgaagtgactgggacacacaaggtcactgtgctgtttgccggtcagcatatagcgaagtccccttttgaggtttacgtggacaaaagtcagggtgatgcttcaaaggtgacggcgcagggtcctggtctcgagccatcaggaaatattgccaataaaaccacttactttgaaatcttcacggccggagccggtactggcgaagtcgaagtggttatccaggatcccatgggacagaagggaactgtggaaccccagttagaggcgagaggcgattctacttacaggtgctcctaccaacccaccatggaaggagtgcacacggtgcacgtgacattcgccggagtacccatcccaagaagcccctacaccgtcaccgttggccaagcctgcaatccttccgcctgtagggcagttggcagggggctccagcctaaaggcgtgcgcgtaaaagaaacagccgatttcaaggtgtacactaaaggggctggcagtggcgagcttaaggtcacagtaaaagggcctaagggcgaagagcgcgtaaaacaaaaggatctcggggacggcgtttacgggttcgaatactatcctatggtccccggtacctacatcgttacgatcacatggggcggtcagaacatcggcaggtcccccttcgaggtgaaagtgggaacagagtgcgggaaccaaaaggttcgcgcttggggtccgggtctggaaggcggagtggtcgggaaaagtgcagacttcgtcgtagaggccatcggcgacgatgtggggactctgggcttctctgtggaaggtccaagccaggcaaaaattgagtgcgatgataagggagatggcagttgtgatgttcgctactggccccaggaggccggagaatatgctgtgcacgtcctctgcaattccgaggatattcgcctgtccccattcatggccgatatccgagacgccccacaggatttccacccagaccgtgtgaaggccagaggcccaggactggaaaaaaccggcgttgccgtgaacaaaccggctgagttcacagtggacgcgaagcatggagggaaagcacccttgcgtgtacaggtgcaggataacgaggggtgccctgtcgaggccttagtcaaagacaacggtaatggcacatactcctgctcatacgtccctagaaaacctgtgaaacacactgctatggtctcttggggcggagtgagtatacctaacagcccattcagggtgaatgtgggggcaggatcccatcccaataaagttaaggtgtacggtcctggggtggcaaaaaccggcctcaaggcacacgaaccgacatactttacagtggactgcgccgaggctggccagggcgacgtgagcataggcatcaaatgtgcaccaggcgtcgtcggtccggctgaggctgacatagatttcgacattattaggaacgacaacgacacatttaccgtgaagtacacaccccgaggcgctggatcatacacaattatggttttattcgccgatcaagcaaccccaacctcacctattagagtgaaagtggaaccctcgcacgacgcatcaaaggtgaaggccgaaggacccggactttcaaggactggggtggagctgggcaaacccacgcacttcacggttaatgccaaagctgccggaaagggcaaattagatgtacaatttagtggtttgaccaaaggagacgccgttcgtgatgtggacatcatagatcatcatgacaacacttacaccgtcaaatacacccctgtacagcagggccctgtaggagtgaatgtgacatacggtggtgacccaatccccaaaagcccattttcggtggccgtgagccctagtctcgacttaagcaagattaaggtttccggccttggtgagaaggtggacgtgggaaaggatcaagagtttaccgttaagagtaagggtgctgggggacagggtaaggtcgcgagcaaaattgtgggcccatctggagctgctgtcccatgcaaagtggaaccagggttaggcgctgataatagcgtcgtgcgctttctgcctagggaggagggaccctatgaagtggaagttacatatgacggcgtgcccgtcccgggaagtccctttccacttgaagcggtggctcctaccaagccaagtaaggttaaagcctttggtccaggtctgcagggtggctctgctggcagtcctgcgaggttcactattgacactaagggcgctggcaccggcggtctgggcctgacagtcgaggggccatgtgaggctcagctggagtgtctggataatggtgacggtacctgcagcgtcagctatgtgcctacggaaccgggtgattataacatcaacattctgttcgcagacacccatatcccgggttccccctttaaggcgcatgtggtaccatgtttcgatgcctctaaagtgaaatgttcaggaccagggctagaacgcgcaacagccggagaggtgggccaattccaagtggattgctcttccgcaggatcagctgagttgaccattgagatatgctcagaggcaggcctgcccgcagaagtgtacattcaagatcatggcgacggcacccacaccatcacctatattcctctctgtccaggcgcttacaccgttaccattaaatacggcggtcagcctgtcccgaattttccatcaaagctacaggtggagcccgctgtggacacttccggagtccagtgttacggcccaggtatcgaaggacagggcgtgttcagggaagctacaacggaattctcggtggacgcccgtgcgctgacacagaccggcggtccacatgtcaaagccagagtcgccaatccatctgggaacctgactgagacttatgtgcaggaccgtggcgacggaatgtataaagtcgaatacacaccttatgaggagggcctgcacagtgttgacgtgacttatgatggcagcccggtcccatcttccccctttcaggtgcccgtgaccgagggttgcgatccaagccgcgtaagagtacacggacccggaatacagtctgggacaacgaataagcccaataagttcaccgtcgagacgcgtggggcaggtactgggggactgggattagccgtggagggtccctccgaggccaagatgtcctgcatggataataaggacggatcgtgcagtgttgagtacataccctacgaggctggcacatacagccttaacgtgacatacggcggacaccaggtccccggttccccctttaaggtaccagtccacgatgtcacggatgcctcaaaagtcaaatgttctggacccggactgtcaccaggcatggtgagagctaaccttccccagtcttttcaggtcgacaccagcaaggcaggcgttgccccactgcaggtgaaggtgcagggaccaaagggcctggtggagcccgtcgatgtggtcgataatgccgacggaacacagactgttaactatgtacctagtagggaaggaccgtacagtatctcagtcctttatggcgacgaagaggtcccacggtctccgttcaaggtaaaagtgcttcctacacacgacgcgtcaaaggttaaggcctccggccctgggctgaacacaaccggcgttccggcttcactacccgtcgagtttaccatcgacgctaaagacgctggcgagggcctcttggctgtgcagatcaccgatcccgagggaaagcccaaaaaaactcacattcaggacaaccacgacggtacatacaccgtggcttatgtgcccgacgtgaccgggagatacaccatccttattaagtatggtggcgacgaaatccccttttccccttatcgggtcagagcagtgcccacaggagatgcctcaaaatgcacagtgacagtttccatcggtggacacggactgggggcagggattggcccaactatccagattggagaggaaactgtgattactgtggacaccaaagccgcaggaaaagggaaagtgacatgcacagtgtgtacccctgacggctctgaggtggatgtagatgtggtggagaacgaagatggcaccttcgacattttttacacagctcctcaacccggaaagtacgtgatatgtgtacgttttggcggtgagcacgttcccaatagtcccttccaggtgacagctcttgcaggcgatcagccctccgtgcaacctccactccgctcccaacagctcgcaccccagtatacctatgcccagggcggtcagcagacctgggcccctgaacggccactggttggcgtgaacggtcttgacgtgacctcactgcggccatttgaccttgtgatcccattcacaattaagaagggtgaaatcacaggtgaggtccggatgccatccggtaaagttgcccagcccacaataacagataacaaggatggtaccgtgactgttcgctacgcgccatccgaagctggccttcacgaaatggacatccgatatgacaatatgcacattcctggctcaccactccagttctacgtcgactacgtgaattgtggacacgtgaccgcctacggcccagggcttacgcacggcgttgtaaataagcccgcaacatttactgtgaacactaaggacgcaggggaaggaggattgagcctggccatcgaaggacctagcaaagcagagataagttgtactgataaccaggacggcacctgctctgtgtcttacctgccagtgttaccaggggactactctattctggtcaaatacaacgagcaacacgtacctggttcccctttcacagcacgcgtgacgggggacgattccatgagaatgagccatctcaaagtcggtagtgccgctgatatccctataaacataagcgaaatatctttcgaggaccggaaagacggtagctgcggagtggcatacgtggtccaggaacctggagactatgaagtgagcgtaaagttcaatgaggaacacatccccgatagccctttcgttgtaccggttgcatcacccagtggagatgccagacgcctcactgtgagctccctgcaggagtcgggattgaaagtgaaccagccagccagcttcgctgtgagtctcaacggcgctaagggcgctattgacgccaaagtacattctccgtctggggctctcgaagaatgctacgttactgaaatcgatcaggacaagtatgccgtgagattcatcccaagagaaaatggtgtgtacctgatcgacgtgaaattcaacgggacccacatccccggatcaccttttaaaattcgggtgggagagccaggccacggaggagaccctggcctggtctctgcatacggagcaggcctcgaagggggtgtgaccgggaaccctgccgagtttgtggtgaatactagtaacgcaggagctggtgcactcagtgtgaccatcgatggtccctcaaaagttaaaatggattgtcaggagtgcccggaggggtaccgggtgacgtacacacccatggcccctggcagctatctcatctctattaaatatggcggaccctaccacattgggggaagccctttcaaggcaaaagtcacaggtccgcgtctcgtatctaaccacagcctccacgagaccagctccgtgttcgtggactctctgactaaagcaacctgtgcaccccaacatggggctccaggaccaggcccagctgatgccagtaaagtggttgcgaaggggcttggcctgagtaaggcgtacgtgggacagaagtcttccttcactgttgattgttcaaaggctggaaataatatgctcttggtaggcgtgcatggtccaaggaccccctgcgaggaaatcctggtgaagcacgtggggtctagactttatagtgtctcttacctcttaaaggataaaggcgaatacacattagtggtgaaatggggcgatgagcatattccagggtctccttatagagtggtggtgcccta

SEQ ID NO: 42081 - DNA, 7944 bp, Artificial Sequence
  derived and/or modified sequence
atgagcagcagccacagcagagccggccagagcgccgccggcgccgcccccggcggcggcgtggacaccagagacgccgagatgcccgccaccgagaaggacctggccgaggacgccccctggaagaagatccagcagaacaccttcaccagatggtgcaacgagcacctgaagtgcgtgagcaagagaatcgccaacctgcagaccgacctgagcgacggcctgagactgatcgccctgctggaggtgctgagccagaagaagatgcacagaaagcacaaccagagacccaccttcagacagatgcagctggagaacgtgagcgtggccctggagttcctggacagagagagcatcaagctggtgagcatcgacagcaaggccatcgtggacggcaacctgaagctgatcctgggcctgatctggaccctgatcctgcactacagcatcagcatgcccatgtgggacgaggaggaggacgaggaggccaagaagcagacccccaagcagagactgctgggctggatccagaacaagctgccccagctgcccatcaccaacttcagcagagactggcagagcggcagagccctgggcgccctggtggacagctgcgcccccggcctgtgccccgactgggacagctgggacgccagcaagcccgtgaccaacgccagagaggccatgcagcaggccgacgactggctgggcatcccccaggtgatcacccccgaggagatcgtggaccccaacgtggacgagcacagcgtgatgacctacctgagccagttccccaaggccaagctgaagcccggcgcccccctgagacccaagctgaaccccaagaaggccagagcctacggccccggcatcgagcccaccggcaacatggtgaagaagagagccgagttcaccgtggagaccagaagcgccggccagggcgaggtgctggtgtacgtggaggaccccgccggccaccaggaggaggccaaggtgaccgccaacaacgacaagaacagaaccttcagcgtgtggtacgtgcccgaggtgaccggcacccacaaggtgaccgtgctgttcgccggccagcacatcgccaagagccccttcgaggtgtacgtggacaagagccagggcgacgccagcaaggtgaccgcccagggccccggcctggagcccagcggcaacatcgccaacaagaccacctacttcgagatcttcaccgccggcgccggcaccggcgaggtggaggtggtgatccaggaccccatgggccagaagggcaccgtggagccccagctggaggccagaggcgacagcacctacagatgcagctaccagcccaccatggagggcgtgcacaccgtgcacgtgaccttcgccggcgtgcccatccccagaagcccctacaccgtgaccgtgggccaggcctgcaaccccagcgcctgcagagccgtgggcagaggcctgcagcccaagggcgtgagagtgaaggagaccgccgacttcaaggtgtacaccaagggcgccggcagcggcgagctgaaggtgaccgtgaagggccccaagggcgaggagagagtgaagcagaaggacctgggcgacggcgtgtacggcttcgagtactaccccatggtgcccggcacctacatcgtgaccatcacctggggcggccagaacatcggcagaagccccttcgaggtgaaggtgggcaccgagtgcggcaaccagaaggtgagagcctggggccccggcctggagggcggcgtggtgggcaagagcgccgacttcgtggtggaggccatcggcgacgacgtgggcaccctgggcttcagcgtggagggccccagccaggccaagatcgagtgcgacgacaagggcgacggcagctgcgacgtgagatactggccccaggaggccggcgagtacgccgtgcacgtgctgtgcaacagcgaggacatcagactgagccccttcatggccgacatcagagacgccccccaggacttccaccccgacagagtgaaggccagaggccccggcctggagaagaccggcgtggccgtgaacaagcccgccgagttcaccgtggacgccaagcacggcggcaaggcccccctgagagtgcaggtgcaggacaacgagggctgccccgtggaggccctggtgaaggacaacggcaacggcacctacagctgcagctacgtgcccagaaagcccgtgaagcacaccgccatggtgagctggggcggcgtgagcatccccaacagccccttcagagtgaacgtgggcgccggcagccaccccaacaaggtgaaggtgtacggccccggcgtggccaagaccggcctgaaggcccacgagcccacctacttcaccgtggactgcgccgaggccggccagggcgacgtgagcatcggcatcaagtgcgcccccggcgtggtgggccccgccgaggccgacatcgacttcgacatcatcagaaacgacaacgacaccttcaccgtgaagtacacccccagaggcgccggcagctacaccatcatggtgctgttcgccgaccaggccacccccaccagccccatcagagtgaaggtggagcccagccacgacgccagcaaggtgaaggccgagggccccggcctgagcagaaccggcgtggagctgggcaagcccacccacttcaccgtgaacgccaaggccgccggcaagggcaagctggacgtgcagttcagcggcctgaccaagggcgacgccgtgagagacgtggacatcatcgaccaccacgacaacacctacaccgtgaagtacacccccgtgcagcagggccccgtgggcgtgaacgtgacctacggcggcgaccccatccccaagagccccttcagcgtggccgtgagccccagcctggacctgagcaagatcaaggtgagcggcctgggcgagaaggtggacgtgggcaaggaccaggagttcaccgtgaagagcaagggcgccggcggccagggcaaggtggccagcaagatcgtgggccccagcggcgccgccgtgccctgcaaggtggagcccggcctgggcgccgacaacagcgtggtgagattcctgcccagagaggagggcccctacgaggtggaggtgacctacgacggcgtgcccgtgcccggcagccccttccccctggaggccgtggcccccaccaagcccagcaaggtgaaggccttcggccccggcctgcagggcggcagcgccggcagccccgccagattcaccatcgacaccaagggcgccggcaccggcggcctgggcctgaccgtggagggcccctgcgaggcccagctggagtgcctggacaacggcgacggcacctgcagcgtgagctacgtgcccaccgagcccggcgactacaacatcaacatcctgttcgccgacacccacatccccggcagccccttcaaggcccacgtggtgccctgcttcgacgccagcaaggtgaagtgcagcggccccggcctggagagagccaccgccggcgaggtgggccagttccaggtggactgcagcagcgccggcagcgccgagctgaccatcgagatctgcagcgaggccggcctgcccgccgaggtgtacatccaggaccacggcgacggcacccacaccatcacctacatccccctgtgccccggcgcctacaccgtgaccatcaagtacggcggccagcccgtgcccaacttccccagcaagctgcaggtggagcccgccgtggacaccagcggcgtgcagtgctacggccccggcatcgagggccagggcgtgttcagagaggccaccaccgagttcagcgtggacgccagagccctgacccagaccggcggcccccacgtgaaggccagagtggccaaccccagcggcaacctgaccgagacctacgtgcaggacagaggcgacggcatgtacaaggtggagtacaccccctacgaggagggcctgcacagcgtggacgtgacctacgacggcagccccgtgcccagcagccccttccaggtgcccgtgaccgagggctgcgaccccagcagagtgagagtgcacggccccggcatccagagcggcaccaccaacaagcccaacaagttcaccgtggagaccagaggcgccggcaccggcggcctgggcctggccgtggagggccccagcgaggccaagatgagctgcatggacaacaaggacggcagctgcagcgtggagtacatcccctacgaggccggcacctacagcctgaacgtgacctacggcggccaccaggtgcccggcagccccttcaaggtgcccgtgcacgacgtgaccgacgccagcaaggtgaagtgcagcggccccggcctgagccccggcatggtgagagccaacctgccccagagcttccaggtggacaccagcaaggccggcgtggcccccctgcaggtgaaggtgcagggccccaagggcctggtggagcccgtggacgtggtggacaacgccgacggcacccagaccgtgaactacgtgcccagcagagagggcccctacagcatcagcgtgctgtacggcgacgaggaggtgcccagaagccccttcaaggtgaaggtgctgcccacccacgacgccagcaaggtgaaggccagcggccccggcctgaacaccaccggcgtgcccgccagcctgcccgtggagttcaccatcgacgccaaggacgccggcgagggcctgctggccgtgcagatcaccgaccccgagggcaagcccaagaagacccacatccaggacaaccacgacggcacctacaccgtggcctacgtgcccgacgtgaccggcagatacaccatcctgatcaagtacggcggcgacgagatccccttcagcccctacagagtgagagccgtgcccaccggcgacgccagcaagtgcaccgtgaccgtgagcatcggcggccacggcctgggcgccggcatcggccccaccatccagatcggcgaggagaccgtgatcaccgtggacaccaaggccgccggcaagggcaaggtgacctgcaccgtgtgcacccccgacggcagcgaggtggacgtggacgtggtggagaacgaggacggcaccttcgacatcttctacaccgccccccagcccggcaagtacgtgatctgcgtgagattcggcggcgagcacgtgcccaacagccccttccaggtgaccgccctggccggcgaccagcccagcgtgcagccccccctgagaagccagcagctggccccccagtacacctacgcccagggcggccagcagacctgggcccccgagagacccctggtgggcgtgaacggcctggacgtgaccagcctgagacccttcgacctggtgatccccttcaccatcaagaagggcgagatcaccggcgaggtgagaatgcccagcggcaaggtggcccagcccaccatcaccgacaacaaggacggcaccgtgaccgtgagatacgcccccagcgaggccggcctgcacgagatggacatcagatacgacaacatgcacatccccggcagccccctgcagttctacgtggactacgtgaactgcggccacgtgaccgcctacggccccggcctgacccacggcgtggtgaacaagcccgccaccttcaccgtgaacaccaaggacgccggcgagggcggcctgagcctggccatcgagggccccagcaaggccgagatcagctgcaccgacaaccaggacggcacctgcagcgtgagctacctgcccgtgctgcccggcgactacagcatcctggtgaagtacaacgagcagcacgtgcccggcagccccttcaccgccagagtgaccggcgacgacagcatgagaatgagccacctgaaggtgggcagcgccgccgacatccccatcaacatcagcgagaccgacctgagcctgctgaccgccaccgtggtgccccccagcggcagagaggagccctgcctgctgaagagactgagaaacggccacgtgggcatcagcttcgtgcccaaggagaccggcgagcacctggtgcacgtgaagaagaacggccagcacgtggccagcagccccatccccgtggtgatcagccagagcgagatcggcgacgccagcagagtgagagtgagcggccagggcctgcacgagggccacaccttcgagcccgccgagttcatcatcgacaccagagacgccggctacggcggcctgagcctgagcatcgagggccccagcaaggtggacatcaacaccgaggacctggaggacggcacctgcagagtgacctactgccccaccgagcccggcaactacatcatcaacatcaagttcgccgaccagcacgtgcccggcagccccttcagcgtgaaggtgaccggcgagggcagagtgaaggagagcatcaccagaagaagaagagcccccagcgtggccaacgtgggcagccactgcgacctgagcctgaagatccccgagatcagcatccaggacatgaccgcccaggtgaccagccccagcggcaagacccacgaggccgagatcgtggagggcgagaaccacacctactgcatcagattcgtgcccgccgagatgggcacccacaccgtgagcgtgaagtacaagggccagcacgtgcccggcagccccttccagttcaccgtgggccccctgggcgagggcggcgcccacaaggtgagagccggcggccccggcctggagagagccgaggccggcgtgcccgccgagttcagcatctggaccagagaggccggcgccggcggcctggccatcgccgtggagggccccagcaaggccgagatcagcttcgaggacagaaaggacggcagctgcggcgtggcctacgtggtgcaggagcccggcgactacgaggtgagcgtgaagttcaacgaggagcacatccccgacagccccttcgtggtgcccgtggccagccccagcggcgacgccagaagactgaccgtgagcagcctgcaggagagcggcctgaaggtgaaccagcccgccagcttcgccgtgagcctgaacggcgccaagggcgccatcgacgccaaggtgcacagccccagcggcgccctggaggagtgctacgtgaccgagatcgaccaggacaagtacgccgtgagattcatccccagagagaacggcgtgtacctgatcgacgtgaagttcaacggcacccacatccccggcagccccttcaagatcagagtgggcgagcccggccacggcggcgaccccggcctggtgagcgcctacggcgccggcctggagggcggcgtgaccggcaaccccgccgagttcgtggtgaacaccagcaacgccggcgccggcgccctgagcgtgaccatcgacggccccagcaaggtgaagatggactgccaggagtgccccgagggctacagagtgacctacacccccatggcccccggcagctacctgatcagcatcaagtacggcggcccctaccacatcggcggcagccccttcaaggccaaggtgaccggccccagactggtgagcaaccacagcctgcacgagaccagcagcgtgttcgtggacagcctgaccaaggccacctgcgccccccagcacggcgcccccggccccggccccgccgacgccagcaaggtggtggccaagggcctgggcctgagcaaggcctacgtgggccagaagagcagcttcaccgtggactgcagcaaggccggcaacaacatgctgctggtgggcgtgcacggccccagaaccccctgcgaggagatcctggtgaagcacgtgggcagcagactgtacagcgtgagctacctgctgaaggacaagggcgagtacaccctggtggtgaagtggggcgacgagcacatccccggcagcccctacagagtggtggtgccctag

SEQ ID NO: 42082 - DNA, 6948 bp, Artificial Sequence
  derived and/or modified sequence
atgcccgccaccgagaaggacctggccgaggacgccccctggaagaagatccagcagaacaccttcaccagatggtgcaacgagcacctgaagtgcgtgagcaagagaatcgccaacctgcagaccgacctgagcgacggcctgagactgatcgccctgctggaggtgctgagccagaagaagatgcacagaaagcacaaccagagacccaccttcagacagatgcagctggagaacgtgagcgtggccctggagttcctggacagagagagcatcaagctggtgagcatcgacagcaaggccatcgtggacggcaacctgaagctgatcctgggcctgatctggaccctgatcctgcactacagcatcagcatgcccatgtgggacgaggaggaggacgaggaggccaagaagcagacccccaagcagagactgctgggctggatccagaacaagctgccccagctgcccatcaccaacttcagcagagactggcagagcggcagagccctgggcgccctggtggacagctgcgcccccggcctgtgccccgactgggacagctgggacgccagcaagcccgtgaccaacgccagagaggccatgcagcaggccgacgactggctgggcatcccccaggtgatcacccccgaggagatcgtggaccccaacgtggacgagcacagcgtgatgacctacctgagccagttccccaaggccaagctgaagcccggcgcccccctgagacccaagctgaaccccaagaaggccagagcctacggccccggcatcgagcccaccggcaacatggtgaagaagagagccgagttcaccgtggagaccagaagcgccggccagggcgaggtgctggtgtacgtggaggaccccgccggccaccaggaggaggccaaggtgaccgccaacaacgacaagaacagaaccttcagcgtgtggtacgtgcccgaggtgaccggcacccacaaggtgaccgtgctgttcgccggccagcacatcgccaagagccccttcgaggtgtacgtggacaagagccagggcgacgccagcaaggtgaccgcccagggccccggcctggagcccagcggcaacatcgccaacaagaccacctacttcgagatcttcaccgccggcgccggcaccggcgaggtggaggtggtgatccaggaccccatgggccagaagggcaccgtggagccccagctggaggccagaggcgacagcacctacagatgcagctaccagcccaccatggagggcgtgcacaccgtgcacgtgaccttcgccggcgtgcccatccccagaagcccctacaccgtgaccgtgggccaggcctgcaaccccagcgcctgcagagccgtgggcagaggcctgcagcccaagggcgtgagagtgaaggagaccgccgacttcaaggtgtacaccaagggcgccggcagcggcgagctgaaggtgaccgtgaagggccccaagggcgaggagagagtgaagcagaaggacctgggcgacggcgtgtacggcttcgagtactaccccatggtgcccggcacctacatcgtgaccatcacctggggcggccagaacatcggcagaagccccttcgaggtgaaggtgggcaccgagtgcggcaaccagaaggtgagagcctggggccccggcctggagggcggcgtggtgggcaagagcgccgacttcgtggtggaggccatcggcgacgacgtgggcaccctgggcttcagcgtggagggccccagccaggccaagatcgagtgcgacgacaagggcgacggcagctgcgacgtgagatactggccccaggaggccggcgagtacgccgtgcacgtgctgtgcaacagcgaggacatcagactgagccccttcatggccgacatcagagacgccccccaggacttccaccccgacagagtgaaggccagaggccccggcctggagaagaccggcgtggccgtgaacaagcccgccgagttcaccgtggacgccaagcacggcggcaaggcccccctgagagtgcaggtgcaggacaacgagggctgccccgtggaggccctggtgaaggacaacggcaacggcacctacagctgcagctacgtgcccagaaagcccgtgaagcacaccgccatggtgagctggggcggcgtgagcatccccaacagccccttcagagtgaacgtgggcgccggcagccaccccaacaaggtgaaggtgtacggccccggcgtggccaagaccggcctgaaggcccacgagcccacctacttcaccgtggactgcgccgaggccggccagggcgacgtgagcatcggcatcaagtgcgcccccggcgtggtgggccccgccgaggccgacatcgacttcgacatcatcagaaacgacaacgacaccttcaccgtgaagtacacccccagaggcgccggcagctacaccatcatggtgctgttcgccgaccaggccacccccaccagccccatcagagtgaaggtggagcccagccacgacgccagcaaggtgaaggccgagggccccggcctgagcagaaccggcgtggagctgggcaagcccacccacttcaccgtgaacgccaaggccgccggcaagggcaagctggacgtgcagttcagcggcctgaccaagggcgacgccgtgagagacgtggacatcatcgaccaccacgacaacacctacaccgtgaagtacacccccgtgcagcagggccccgtgggcgtgaacgtgacctacggcggcgaccccatccccaagagccccttcagcgtggccgtgagccccagcctggacctgagcaagatcaaggtgagcggcctgggcgagaaggtggacgtgggcaaggaccaggagttcaccgtgaagagcaagggcgccggcggccagggcaaggtggccagcaagatcgtgggccccagcggcgccgccgtgccctgcaaggtggagcccggcctgggcgccgacaacagcgtggtgagattcctgcccagagaggagggcccctacgaggtggaggtgacctacgacggcgtgcccgtgcccggcagccccttccccctggaggccgtggcccccaccaagcccagcaaggtgaaggccttcggccccggcctgcagggcggcagcgccggcagccccgccagattcaccatcgacaccaagggcgccggcaccggcggcctgggcctgaccgtggagggcccctgcgaggcccagctggagtgcctggacaacggcgacggcacctgcagcgtgagctacgtgcccaccgagcccggcgactacaacatcaacatcctgttcgccgacacccacatccccggcagccccttcaaggcccacgtggtgccctgcttcgacgccagcaaggtgaagtgcagcggccccggcctggagagagccaccgccggcgaggtgggccagttccaggtggactgcagcagcgccggcagcgccgagctgaccatcgagatctgcagcgaggccggcctgcccgccgaggtgtacatccaggaccacggcgacggcacccacaccatcacctacatccccctgtgccccggcgcctacaccgtgaccatcaagtacggcggccagcccgtgcccaacttccccagcaagctgcaggtggagcccgccgtggacaccagcggcgtgcagtgctacggccccggcatcgagggccagggcgtgttcagagaggccaccaccgagttcagcgtggacgccagagccctgacccagaccggcggcccccacgtgaaggccagagtggccaaccccagcggcaacctgaccgagacctacgtgcaggacagaggcgacggcatgtacaaggtggagtacaccccctacgaggagggcctgcacagcgtggacgtgacctacgacggcagccccgtgcccagcagccccttccaggtgcccgtgaccgagggctgcgaccccagcagagtgagagtgcacggccccggcatccagagcggcaccaccaacaagcccaacaagttcaccgtggagaccagaggcgccggcaccggcggcctgggcctggccgtggagggccccagcgaggccaagatgagctgcatggacaacaaggacggcagctgcagcgtggagtacatcccctacgaggccggcacctacagcctgaacgtgacctacggcggccaccaggtgcccggcagccccttcaaggtgcccgtgcacgacgtgaccgacgccagcaaggtgaagtgcagcggccccggcctgagccccggcatggtgagagccaacctgccccagagcttccaggtggacaccagcaaggccggcgtggcccccctgcaggtgaaggtgcagggccccaagggcctggtggagcccgtggacgtggtggacaacgccgacggcacccagaccgtgaactacgtgcccagcagagagggcccctacagcatcagcgtgctgtacggcgacgaggaggtgcccagaagccccttcaaggtgaaggtgctgcccacccacgacgccagcaaggtgaaggccagcggccccggcctgaacaccaccggcgtgcccgccagcctgcccgtggagttcaccatcgacgccaaggacgccggcgagggcctgctggccgtgcagatcaccgaccccgagggcaagcccaagaagacccacatccaggacaaccacgacggcacctacaccgtggcctacgtgcccgacgtgaccggcagatacaccatcctgatcaagtacggcggcgacgagatccccttcagcccctacagagtgagagccgtgcccaccggcgacgccagcaagtgcaccgtgaccgtgagcatcggcggccacggcctgggcgccggcatcggccccaccatccagatcggcgaggagaccgtgatcaccgtggacaccaaggccgccggcaagggcaaggtgacctgcaccgtgtgcacccccgacggcagcgaggtggacgtggacgtggtggagaacgaggacggcaccttcgacatcttctacaccgccccccagcccggcaagtacgtgatctgcgtgagattcggcggcgagcacgtgcccaacagccccttccaggtgaccgccctggccggcgaccagcccagcgtgcagccccccctgagaagccagcagctggccccccagtacacctacgcccagggcggccagcagacctgggcccccgagagacccctggtgggcgtgaacggcctggacgtgaccagcctgagacccttcgacctggtgatccccttcaccatcaagaagggcgagatcaccggcgaggtgagaatgcccagcggcaaggtggcccagcccaccatcaccgacaacaaggacggcaccgtgaccgtgagatacgcccccagcgaggccggcctgcacgagatggacatcagatacgacaacatgcacatccccggcagccccctgcagttctacgtggactacgtgaactgcggccacgtgaccgcctacggccccggcctgacccacggcgtggtgaacaagcccgccaccttcaccgtgaacaccaaggacgccggcgagggcggcctgagcctggccatcgagggccccagcaaggccgagatcagctgcaccgacaaccaggacggcacctgcagcgtgagctacctgcccgtgctgcccggcgactacagcatcctggtgaagtacaacgagcagcacgtgcccggcagccccttcaccgccagagtgaccggcgacgacagcatgagaatgagccacctgaaggtgggcagcgccgccgacatccccatcaacatcagcgagatcagcttcgaggacagaaaggacggcagctgcggcgtggcctacgtggtgcaggagcccggcgactacgaggtgagcgtgaagttcaacgaggagcacatccccgacagccccttcgtggtgcccgtggccagccccagcggcgacgccagaagactgaccgtgagcagcctgcaggagagcggcctgaaggtgaaccagcccgccagcttcgccgtgagcctgaacggcgccaagggcgccatcgacgccaaggtgcacagccccagcggcgccctggaggagtgctacgtgaccgagatcgaccaggacaagtacgccgtgagattcatccccagagagaacggcgtgtacctgatcgacgtgaagttcaacggcacccacatccccggcagccccttcaagatcagagtgggcgagcccggccacggcggcgaccccggcctggtgagcgcctacggcgccggcctggagggcggcgtgaccggcaaccccgccgagttcgtggtgaacaccagcaacgccggcgccggcgccctgagcgtgaccatcgacggccccagcaaggtgaagatggactgccaggagtgccccgagggctacagagtgacctacacccccatggcccccggcagctacctgatcagcatcaagtacggcggcccctaccacatcggcggcagccccttcaaggccaaggtgaccggccccagactggtgagcaaccacagcctgcacgagaccagcagcgtgttcgtggacagcctgaccaaggccacctgcgccccccagcacggcgcccccggccccggccccgccgacgccagcaaggtggtggccaagggcctgggcctgagcaaggcctacgtgggccagaagagcagcttcaccgtggactgcagcaaggccggcaacaacatgctgctggtgggcgtgcacggccccagaaccccctgcgaggagatcctggtgaagcacgtgggcagcagactgtacagcgtgagctacctgctgaaggacaagggcgagtacaccctggtggtgaagtggggcgacgagcacatccccggcagcccctacagagtggtggtgccctag

SEQ ID NO: 42083 - protein, 498 aa, Artificial Sequence [sequence omitted]

SEQ ID NO: 42084 - DNA, 1497 bp, Artificial Sequence
  derived and/or modified sequence
atggcagccgctgcagccgctgcaccgagtggcgggggcgggggcggagaggaagaaaggctcgaagagaagtcagaggaccaagaccttcaagggctgaaggacaagccactgaaattcaaaaaggtaaagaaggataaaaaggaggaaaaggaaggcaaacatgagcctgtccaacctagcgcccaccattccgccgaacccgctgaggctggaaaggcagaaacctcagaaggatcaggtagtgcaccggcagtgcccgaagcctcagcaagccctaagcagaggaggtctataatcagagatcgaggccccatgtacgacgaccccacactgccggagggatggacacgaaagctgaagcagcgcaagtccggtagaagcgctgggaagtatgacgtgtacctgattaaccctcagggtaaagccttcagatctaaagtggaactcattgcctactttgaaaaggtaggagatacctccctcgaccctaatgactttgactttaccgtgacaggaaggggctcacctagccgtcgcgaacaaaaaccacccaaaaaacctaagtcacccaaggccccgggtaccggtagagggcgtggccgccctaaaggatcagggacaacgagacccaaagccgcgacatcagaaggcgtgcaggtgaagagggtcctagaaaagtctccggggaaactgctagtcaagatgcccttccagaccagcccaggggggaaggctgagggtggcggtgcaacaaccagcacacaggtgatggtcatcaagagaccaggtagaaagcggaaggccgaggctgaccctcaggccatccctaagaagagaggacgaaagccggggtctgtcgtggctgcagctgccgctgaggcaaaaaagaaagccgttaaggaatctagcattagatcagtccaagaaactgtgctccccataaagaagcgaaagacacgggagaccgtttctatcgaagttaaagaggtcgtgaagccgctgctggtgagtacactcggcgaaaagtctgggaaaggtcttaagacctgtaagagcccggggcgtaagtcaaaagaatccagccccaaagggagatcatcatcagcaagtagccccccaaaaaaggagcaccaccaccaccatcaccactccgagtctccgaaggcccctgtgcctctgttgcctccgttaccgccacccccaccagaacccgagagttctgaggatcccacttcacctcccgagccacaggatctatccagcagcgtgtgtaaagaagaaaagatgccaagaggcggaagcttagaatcggacgggtgccctaaggagccggcaaaaacccagcccgcagttgctacggccgccaccgccgcagagaaatataaacaccgcggagaaggtgaacggaaggacatagtgtcatcatctatgccccgacccaatcgagaggaaccagtggatagccgaacacctgtgacggagcgtgtgtcctag

SEQ ID NO: 42085 - DNA, 1497 bp, Artificial Sequence
  derived and/or modified sequence
atggctgctgctgctgctgctgcccccagcggcggcggcggcggcggggaggaggagcggctggaggagaagtctgaggaccaggacctgcagggcctgaaggacaagcccctgaagttcaagaaggtgaagaaggacaagaaggaggagaaggagggcaagcatgagcctgtgcagcccagcgcccaccacagcgctgagcctgctgaggccggcaaggccgagaccagcgagggcagcggcagcgccccagctgtgcctgaggccagcgccagccccaagcagaggaggagcatcatccgggaccggggccccatgtatgatgaccccaccctgcctgagggctggaccaggaagctgaagcagaggaagagcggccgctctgctgggaagtatgatgtgtacctgatcaacccccagggcaaggccttccgcagcaaggtggagctgattgcctactttgagaaggtgggggacaccagcctggaccccaatgactttgacttcaccgtgacaggccggggcagccccagcagaagagagcagaagccacccaagaagcccaagagccccaaggcccctggcaccggccggggccggggccggcccaagggcagcggcaccacccggcccaaggccgccaccagcgagggcgtgcaggtgaagagggtgctggagaagagccctgggaagctgctggtgaagatgcccttccagaccagccctgggggcaaggccgagggcggcggggccaccaccagcacccaggtgatggtgatcaagaggcctggcaggaagaggaaggccgaggccgacccccaggccatccccaagaagaggggcaggaagccaggctctgtggtggccgctgctgctgctgaggccaagaagaaggctgtgaaggagagcagcatccgctctgtgcaggagaccgtgctgcccatcaagaagaggaagacccgggagaccgtgtccattgaggtgaaggaggtggtgaagcccctgctggtgtccaccctgggggagaagagcggcaagggcctgaagacctgcaagagccctggcaggaagagcaaggagagcagccccaagggccgcagcagcagcgccagcagcccccccaagaaggagcaccaccaccaccaccaccacagcgagagccccaaggcccctgtgcccctgctgccccccctgcccccacctcctcctgagcctgagagcagcgaggaccccaccagccccccagagccccaggacctgagcagctctgtgtgcaaggaggagaagatgccccggggcggcagcctggagagtgatggctgccccaaggagcccgccaagacccagcctgctgtggccacagctgccacagctgctgagaagtacaagcacagaggagagggggagaggaaggacatcgtgagcagctccatgccccggcccaaccgggaggagcctgtggacagcaggacccctgtgacagagcgggtgtcctag

SEQ ID NO: 42086 - DNA, 1497 bp, Artificial Sequence
  derived and/or modified sequence
atggccgccgccgccgccgccgcccccagcggcggcggcggcggcggggaagaggagcgcttagaggagaaaagcgaggatcaggacttacagggtctgaaggacaaacccctgaaatttaaaaaggtcaaaaaagacaagaaggaggagaaagagggcaagcatgagcctgtgcagccatctgcacaccattcggcggaacctgcagaagcaggaaaggccgagacaagcgaaggatccggatccgcccctgcagtcccagaggcttctgcaagcccaaaacagcgtcgaagcatcattagggacaggggccccatgtatgatgatcctaccctacccgagggctggaccagaaagctgaaacaacggaaatctggacgatcggctgggaaatacgatgtatacctcatcaatcctcaaggcaaagcctttcggtccaaggttgaattgatcgcctacttcgagaaagttggggacacaagccttgaccccaatgacttcgattttaccgtgactggacggggcagcccaagtcgcagggagcagaagcccccgaaaaaacccaaatcccccaaggccccgggtactggcaggggtagagggcgccctaaagggtccggtactaccagacctaaggcagcaacctctgaaggcgtgcaggtgaaaagagtgctggagaagtcccccggtaaacttctcgtgaagatgccctttcaaacaagtccaggcgggaaggccgaggggggtggagccacgacctcaactcaggttatggtgattaaacgacccggtagaaagagaaaggctgaggccgaccctcaggccatccccaagaaaagaggccgaaagcccggcagtgttgtggcagcggccgcggctgaagccaaaaagaaagccgtgaaagagtccagtatccgttccgtccaggagactgttcttccaattaaaaaacgaaaaactcgggaaactgtaagtatagaagtgaaagaggtggtaaagcccttattagtgagtaccctgggtgaaaagagcggcaagggactcaaaacttgcaaatcacccggccggaaaagcaaggagagtagcccaaaaggacgatcaagcagcgcttccagccctccaaagaaagagcaccaccatcatcaccatcatagtgagtcaccgaaggccccagtacccttactgccccccctacctccgcccccgccagaacctgaaagctcagaggatcccacatcccctccggagcctcaggacttgagctccagcgtgtgtaaggaagagaaaatgccacgcggaggatcccttgaatctgatggatgccctaaagaacccgccaagactcagcccgctgtcgccacagcggcaaccgctgccgagaagtacaaacacagaggagaaggggagcgcaaggacatcgtgtcttcatccatgccccgtccaaatcgcgaggagccggtagacagtagaacccccgtgaccgagagggtttcgtag

SEQ ID NO: 42087 - DNA, 1497 bp, Artificial Sequence
  derived and/or modified sequence
atggccgctgctgccgctgctgcaccttcaggaggaggcggaggtggggaagaagaaaggctcgaagagaaatctgaagaccaggacttgcagggcctgaaagacaagccgctgaaattcaagaaggtgaagaaggacaaaaaggaggaaaaagaaggcaagcatgagccggtccagccaagcgcacatcactcagccgagccggctgaagctggcaaggcggagacctccgaggggtccgggagcgccccagcggtgccggaggcctccgcctcgcccaaacagagacggagcataattagagataggggcccaatgtacgatgatcctaccctgcccgaagggtggactaggaagctcaagcagagaaagtctggcagatcagcgggaaagtatgacgtttaccttatcaaccctcagggaaaggcatttcggagcaaagttgaattgattgcttatttcgagaaggttggcgacaccagccttgatccaaatgatttcgactttacggtgactgggcgaggaagccctagcaggcgcgaacaaaaacctcctaaaaaaccaaagtctcctaaggcacctggtacaggtagggggagaggtcgcccaaagggatcgggcaccacccggccaaaggctgctaccagtgaaggagtgcaggtgaaacgcgtgcttgaaaaaagccctggcaagctgctagtaaagatgcctttccagaccagcccgggagggaaggcggaaggcggtggagcaaccacctcaacacaggtgatggtcataaaacggccaggacgtaagcggaaggccgaggccgacccccaggccatcccaaagaagaggggacgcaagccaggctccgtcgtggcagcggcagccgcagaggcaaaaaaaaaggccgtcaaggagtctagtattaggagtgttcaagaaacggttcttcctataaagaaaagaaaaaccagggagacggtgtcaattgaagtcaaagaagttgttaaacccctgcttgtcagtacacttggggagaaatcaggcaaggggctcaagacctgcaaaagtcctggacgcaaaagcaaggaatcctcaccaaaaggcaggtcgtcctccgcatcctcccctcctaagaaggagcatcatcatcaccatcaccactccgaatccccgaaagccccagttcctttactgccgccattgcctccaccacccccagagcccgagtcatcagaagatcccacgagccccccagagccgcaggatctttcctcctctgtttgcaaagaggaaaaaatgccacgcggtggctctttggagtctgatggttgtcccaaagagcccgcaaaaacacaaccagccgtggccacagccgcaacggcagccgaaaaatataagcatcgcggagagggtgaaagaaaggacatcgtctcctcatcaatgcccaggccaaatcgggaagaacctgtagacagccgcacgcccgtcaccgagcgggtgtcatag

SEQ ID NO: 42088 - DNA, 1497 bp, Artificial Sequence
  derived and/or modified sequence
atggccgccgccgccgccgccgcccccagcggcggcggcggcggcggcgaggaggagagactggaggagaagagcgaggaccaggacctgcagggcctgaaggacaagcccctgaagttcaagaaggtgaagaaggacaagaaggaggagaaggagggcaagcacgagcccgtgcagcccagcgcccaccacagcgccgagcccgccgaggccggcaaggccgagaccagcgagggcagcggcagcgcccccgccgtgcccgaggccagcgccagccccaagcagagaagaagcatcatcagagacagaggccccatgtacgacgaccccaccctgcccgagggctggaccagaaagctgaagcagagaaagagcggcagaagcgccggcaagtacgacgtgtacctgatcaacccccagggcaaggccttcagaagcaaggtggagctgatcgcctacttcgagaaggtgggcgacaccagcctggaccccaacgacttcgacttcaccgtgaccggcagaggcagccccagcagaagagagcagaagccccccaagaagcccaagagccccaaggcccccggcaccggcagaggcagaggcagacccaagggcagcggcaccaccagacccaaggccgccaccagcgagggcgtgcaggtgaagagagtgctggagaagagccccggcaagctgctggtgaagatgcccttccagaccagccccggcggcaaggccgagggcggcggcgccaccaccagcacccaggtgatggtgatcaagagacccggcagaaagagaaaggccgaggccgacccccaggccatccccaagaagagaggcagaaagcccggcagcgtggtggccgccgccgccgccgaggccaagaagaaggccgtgaaggagagcagcatcagaagcgtgcaggagaccgtgctgcccatcaagaagagaaagaccagagagaccgtgagcatcgaggtgaaggaggtggtgaagcccctgctggtgagcaccctgggcgagaagagcggcaagggcctgaagacctgcaagagccccggcagaaagagcaaggagagcagccccaagggcagaagcagcagcgccagcagcccccccaagaaggagcaccaccaccaccaccaccacagcgagagccccaaggcccccgtgcccctgctgccccccctgcccccccccccccccgagcccgagagcagcgaggaccccaccagcccccccgagccccaggacctgagcagcagcgtgtgcaaggaggagaagatgcccagaggcggcagcctggagagcgacggctgccccaaggagcccgccaagacccagcccgccgtggccaccgccgccaccgccgccgagaagtacaagcacagaggcgagggcgagagaaaggacatcgtgagcagcagcatgcccagacccaacagagaggagcccgtggacagcagaacccccgtgaccgagagagtgagctag

SEQ ID NO: 42089 - protein, 429 aa, Artificial Sequence
  derived and/or modified sequence
MPNVLLPPKESNLFKRILKCYEQKQYKNGLKFCKMILSNPKFAEHGETLAMKGLTLNCLGKKEEAYEFVRKGLRNDVKSHVCWHVYGLLQRSDKKYDEAIKCYRNALKLDKDNLQILRDLSLLQIQMRDLEGYRETRYQLLQLRPTQRASWIGYAIAYHLLKDYDMALKLLEEFRQTQQVPPNKIDYEYSELILYQNQVMREADLLQESLEHIEMYEKQICDKLLVEEIKGEILLKLGRLKEASEVFKNLIDRNAENWCYYEGLEKALQISTLEERLQIYEEISKQHPKAITPRRLPLTLVPGERFRELMDKFLRVNFSKGCPPLFTTLKSLYYNTEKVSIIQELVTNYEASLKTCDFFSPYENGEKEPPTTLLWVQYFLAQHFDKLGQYSLALDYINAAIASTPTLIELFYMKAKIYKVKSESCFLSS

SEQ ID NO: 42090 - DNA, 1290 bp, Artificial Sequence
  derived and/or modified sequence
atgcccaacgtgctgctgccccccaaggagagcaacctgttcaagagaatcctgaagtgctacgagcagaagcagtacaagaacggcctgaagttctgcaagatgatcctgagcaaccccaagttcgccgagcacggcgagaccctggccatgaagggcctgaccctgaactgcctgggcaagaaggaggaggcctacgagttcgtgagaaagggcctgagaaacgacgtgaagagccacgtgtgctggcacgtgtacggcctgctgcagagaagcgacaagaagtacgacgaggccatcaagtgctacagaaacgccctgaagctggacaaggacaacctgcagatcctgagagacctgagcctgctgcagatccagatgagagacctggagggctacagagagaccagataccagctgctgcagctgagacccacccagagagccagctggatcggctacgccatcgcctaccacctgctgaaggactacgacatggccctgaagctgctggaggagttcagacagacccagcaggtgccccccaacaagatcgactacgagtacagcgagctgatcctgtaccagaaccaggtgatgagagaggccgacctgctgcaggagagcctggagcacatcgagatgtacgagaagcagatctgcgacaagctgctggtggaggagatcaagggcgagatcctgctgaagctgggcagactgaaggaggccagcgaggtgttcaagaacctgatcgacagaaacgccgagaactggtgctactacgagggcctggagaaggccctgcagatcagcaccctggaggagagactgcagatctacgaggagatcagcaagcagcaccccaaggccatcacccccagaagactgcccctgaccctggtgcccggcgagagattcagagagctgatggacaagttcctgagagtgaacttcagcaagggctgcccccccctgttcaccaccctgaagagcctgtactacaacaccgagaaggtgagcatcatccaggagctggtgaccaactacgaggccagcctgaagacctgcgacttcttcagcccctacgagaacggcgagaaggagccccccaccaccctgctgtgggtgcagtacttcctggcccagcacttcgacaagctgggccagtacagcctggccctggactacatcaacgccgccatcgccagcacccccaccctgatcgagctgttctacatgaaggccaagatctacaaggtgaagagcgagagctgcttcctgagcagctag

SEQ ID NO: 42091 - DNA, 1290 bp, Artificial Sequence
  derived and/or modified sequence
atgcccaatgtactattaccaccaaaggagtcaaaccttttcaagagaatactcaagtgttacgagcagaaacagtataaaaatggcctgaaattttgcaagatgattttaagcaatcctaagtttgcggagcatggcgagaccctggccatgaaggggctgaccttgaactgccttggtaaaaaggaggaagcctatgagttcgtgaggaaaggcctcaggaatgatgtgaagagtcacgtgtgttggcacgtgtatgggttactccagaggtctgataaaaaatacgatgaggccattaagtgctatcggaatgcactgaaactcgacaaagacaatttacagatattaagggaccttagcctccttcaaattcagatgagggacctcgaagggtacagggagacccgatatcagttactacagttgcggcccactcaaagagctagctggatcgggtatgccatcgcctaccacctcctaaaggattacgacatggcactgaaactgttagaggaatttagacaaacacagcaggtgcctcccaacaaaatagactatgagtattcggaactgatcctgtatcagaaccaggtaatgcgagaggccgatcttctgcaggaatcattggaacatatcgaaatgtatgagaagcaaatttgtgataagctgctagtggaggagatcaagggcgaaattctactcaaactgggacgcttaaaagaggcctccgaggtctttaaaaatctgattgatcgaaacgccgagaattggtgttactatgaaggactggagaaagctcttcagatcagtacactagaggagcgactgcaaatttacgaagaaatctcgaagcagcaccctaaagctattacccctcggcggctaccattgacactggtgcccggtgagcggttcagagagttgatggataagtttctgcgcgtgaatttctccaaaggatgccctccgctgtttacaactttaaaaagcctctattacaataccgagaaagttagcattatccaagagttagtcaccaattacgaggcctctttgaagacttgtgactttttttcaccatacgagaacggggagaaagaacctcccactaccctgctgtgggtgcagtattttctggcccagcacttcgacaaactgggccagtatagccttgccctggactacatcaatgccgcaatcgctagcacgcctacgcttattgagttgttctatatgaaggccaagatctacaaggtgaagagtgagtcttgctttctaagcagttag

SEQ ID NO: 42092 - DNA, 1290 bp, Artificial Sequence
  derived and/or modified sequence
atgcccaacgtgctgctgccccccaaggagagcaacctcttcaagaggatcctgaagtgctatgagcagaagcagtacaagaatggcctgaagttctgcaagatgatcctgagcaaccccaagtttgctgagcacggggagaccctggccatgaagggcctgaccctgaactgcctgggcaagaaggaggaggcctatgaatttgtgaggaagggcctgagaaatgatgtgaagagccacgtgtgctggcacgtgtatggcctgctgcagaggagtgacaagaagtatgatgaggccatcaagtgctacagaaatgccctgaagctggacaaggacaacctgcagatcctgcgggacctgagcctgctgcagatccagatgagggacctggagggctaccgggagacccgctaccagctgctgcagctgcggcccacccagagggcctcctggattggctacgccatcgcctaccacctgctgaaggactatgacatggccctgaagctgctggaggagttccggcagacccagcaggtgccccccaacaagattgattatgagtacagcgagctgatcctgtaccagaaccaggtgatgagggaggccgacctgctgcaggagagcctggagcacatcgagatgtatgagaagcagatctgtgacaagctgctggtggaggagatcaagggggagatcctgctgaagctgggccgcctgaaggaggccagcgaggtgttcaagaacctgattgacagaaatgctgagaactggtgctactatgagggcctggagaaggccctgcagatcagcaccctggaggagcggctgcagatctatgaggagatcagcaagcagcaccccaaggccatcaccccccggcggctgcccctgaccctggtgcctggagagcgcttccgggagctgatggacaagttcctgcgggtgaacttcagcaagggctgccccccactcttcaccaccctgaagagcctgtactacaacacagagaaggtgtccatcatccaggagctggtgaccaactatgaggccagcctgaagacctgtgacttcttcagcccctatgaaaatggagagaaggagccccccaccaccctgctgtgggtgcagtacttcctggcccagcactttgacaagctgggccagtacagcctggccctggactacatcaatgctgccatcgccagcacccccaccctcatcgagctgttctacatgaaggccaagatctacaaggtgaagtctgagagctgcttcctgagcagctag

SEQ ID NO: 42093 - DNA, 1290 bp, Artificial Sequence
  derived and/or modified sequence
atgcccaacgtgctgctgccccccaaggagagcaacctgttcaagcgaattctaaagtgctacgagcaaaaacagtataagaacggtctgaagttctgcaaaatgattctctcgaatcccaagttcgccgagcatggggaaactctggccatgaagggcctgactcttaactgtctgggaaagaaagaagaggcttatgaatttgtgcgcaagggcctcagaaacgacgttaaatcccacgtgtgttggcatgtttacggactgctccagcggagtgacaaaaaatatgacgaagccatcaaatgttatcgcaatgctctgaaactggataaagacaacctccaaattctgagagacctgtctttgctacagattcagatgcgtgatcttgagggctatagagagactagataccagctcctacagctacgtccaacacagcgcgctagctggatcgggtatgccattgcctaccaccttctcaaggattatgacatggccctcaaattgctggaggagttcaggcaaacccagcaggtaccaccaaacaaaatcgattacgagtattctgaactaatcctctaccagaatcaggtaatgcgcgaggcggatttactgcaggagagcttagagcacatcgaaatgtatgagaagcagatatgtgataagctgttggttgaagaaataaagggagaaattctgttgaaattgggcagacttaaagaggcctctgaagtattcaaaaatctaattgatcgaaatgcagaaaactggtgttactatgagggtcttgaaaaggctttacagatcagcacgcttgaggaacggctgcagatatacgaggaaatcagtaaacagcatcctaaggctattactcctcgcaggttgccgcttaccctggtcccaggagaacgatttcgcgagttaatggataagttcctgcgggtcaatttctcaaagggttgcccaccactgtttacaactctgaagtcattgtattacaacaccgagaaggttagcatcattcaggagctggtgaccaattatgaagccagtctcaagacctgtgacttcttctcaccatatgagaacggcgaaaaagagccccccaccacactactgtgggtgcagtacttccttgcccagcattttgacaaactggggcagtattctcttgcccttgactatattaacgccgcgatcgccagtactcccactctgatagaacttttttacatgaaagccaagatatataaggttaagagtgaatcttgtttcttgtcttcttag

SEQ ID NO: 42094 - DNA, 1751 bp, Artificial Sequence
  derived and/or modified sequence
accgccgccgccgccgctggccaaaaagcggagcccaggggaagcgtgtcctgctcagaccgccttccttctccattgccacccgtgccgaacagccaggctgcccaattgcaactgtagaccaatgaactaatccatcgcccgcagcccgactctcagcagcggttcgtcccggtgcccacccccgcgaagcggagcgcccgggcacctagcctccctgccggccacctagcctccctgccggccacgatgccgaacgtgctgctgccgcccaaggagagcaacctcttcaaacgcatcttgaaatgttatgaacagaagcagtacaaaaatggcctcaagttttgcaagatgattctgtcgaacccaaaatttgctgaacatggagagactttggctatgaaaggattaacactgaactgtttaggaaaaaaagaagaagcttatgagtttgttcgtaaaggacttcgtaatgatgtcaagagtcatgtctgttggcatgtatatggactcttgcagcgttctgataaaaaatatgatgaagctataaaatgttaccgaaatgccctcaaattagataaagataacctgcaaattttgagggatctctcactgttgcagatccaaatgagagaccttgaaggttaccgagagacaagataccagcttcttcagttgcgccccacacagcgtgcctcctggattggatatgctattgcataccatttgctgaaagattatgatatggccctaaaactgttggaagaatttagacaaactcagcaagttcctccaaacaaaatagattatgaatatagtgaattgatattataccagaatcaagtgatgagagaggcagatctgttgcaggaatctttggaacatatagaaatgtatgagaaacaaatatgtgataaacttttggtggaagaaattaaaggggaaatactgttgaaattgggaagattaaaagaagccagtgaagtgttcaaaaacttgattgatcgaaatgcagaaaattggtgttattatgaaggcttggaaaaagctctacaaattagcactttagaagagaggcttcaaatttatgaagaaattagtaagcagcaccccaaagcaattacacccagaagattacctttgactcttgtcccaggtgaaagatttagagaactaatggataagttcctgagggttaacttcagtaaaggctgcccacccttgtttactactttgaaatctttatattacaatacagaaaaggtttctataatccaggaacttgttactaattatgaagcctctcttaaaacgtgtgacttttttagcccatatgagaatggggagaaggaacccccgacaacactactctgggttcagtatttcctggcacagcactttgataaacttggacagtattctttggctttggattatattaatgctgcaattgctagtactccaactctaatagaattattctatatgaaagcaaaaatttacaaggtaaaatctgaatcctgttttttgagtagttgaagaattcagctactttaagaatccttggagttttttctttgtggaaacaagttctagggcaccctgataatctttttctaataatcctgtgtagtttcatgttatattaattgtataatcaatgtgtaattagatgtgtaatcatttgagctcttagtaaatgtgaactgtaattttgatttctaaataaatttgacagaaatggtgacaga

SEQ ID NO: 42095 - DNA, 1290 bp, Artificial Sequence
  derived and/or modified sequence
atgccgaacgtcctgctgccaccaaaggaaagcaacttgttcaagcgtatcctgaagtgctacgagcagaagcagtacaagaatggcctcaaattctgtaaaatgatcctcagcaacccgaaatttgctgaacatggggagacgctcgccatgaaagggctaacactgaactgcctggggaagaaggaagaggcttatgagttcgtgaggaaaggcttgcgcaacgacgtcaagagccatgtatgctggcacgtctacggcctgttgcagcgctcggataaaaagtacgacgaggccatcaaatgttaccgtaacgctttgaaactggataaggataacctgcagattctaagggatctttcgttgctgcaaatccagatgagagacctggagggttaccgcgaaacccgctaccaactactgcagctccggccaacccagcgggcaagttggattggctatgctatagcttatcacctgctcaaagactacgatatggcactgaagttgctggaagagttccgccagacacaacaggtgccaccaaacaagattgattacgagtactccgaactcatcttataccaaaaccaggttatgcgggaagccgatctgttacaggagtctctggaacacattgagatgtacgagaaacaaatctgcgataagctgttggttgaagagattaagggggagattctccttaagctcggtcggctgaaggaggcaagtgaggtgttcaaaaatttgattgaccgtaacgctgagaactggtgttattatgaaggactggagaaagctctgcagatcagtactctggaggaaaggcttcagatatacgaggaaatttccaaacagcacccaaaggcgatcacaccccgacgactccctctgacactggtccctggcgaaagattccgggagctcatggacaagttcctgcgggtgaatttctctaaaggttgccccccactgttcacaacactcaagagtctgtactacaacacggagaaggtgtcaattattcaggagctagtgacaaactacgaggcctccctgaagacatgcgatttcttcagcccttacgaaaatggtgagaaagaaccacctactactcttctgtgggtgcagtactttcttgcccagcatttcgacaaactggggcagtacagcctggccctcgactacatcaatgccgctatcgcgtcaacgcctactctcatcgagttattttacatgaaagctaaaatttataaggtgaaatcagagtcctgttttctctcgtcatag

SEQ ID NO: 42096 - protein, 2365 aa, Artificial Sequence
  derived and/or modified sequence
MESVSESSQQQKRKPVIHGLEDQKRIYTDWANHYLAKSGHKRLIRDLQQDVTDGVLLAQIIQVVANEKIEDINGCPKNRSQMIENIDACLNFLAAKGINIQGLSAEEIRNGNLKAILGLFFSLSRYKQQQQQPQKQHLSSPLPPAVSQVAGAPSQCQAGTPQQQVPVTPQAPCQPHQPAPHQQSKAQAEMQSRLPGPTARVSAAGSEAKTRGGSTTANNRRSQSFNNYDKSKPVTSPPPPPSSHEKEPLASSASSHPGMSDNAPASLESGSSSTPTNCSTSSAIPQPGAATKPWRSKSLSVKHSATVSMLSVKPPGPEAPRPTPEAMKPAPNNQKSMLEKLKLFNSKGGSKAGEGPGSRDTSCERLETLPSFEESEELEAASRMLTTVGPASSSPKIALKGIAQRTFSRALTNKKSSLKGNEKEKEKQQREKDKEKSKDLAKRASVTERLDLKEEPKEDPSGAAVPEMPKKSSKIASFIPKGGKLNSAKKEPMAPSHSGIPKPGMKSMPGKSPSAPAPSKEGERSRSGKLSSGLPQQKPQLDGRHSSSSSSLASSEGKGPGGTTLNHSISSQTVSGSVGTTQTTGSNTVSVQLPQPQQQYNHPNTATVAPFLYRSQTDTEGNVTAESSSTGVSVEPSHFTKTGQPALEELTGEDPEARRLRTVKNIADLRQNLEETMSSLRGTQVTHSTLETTFDTNVTTEMSGRSILSLTGRPTPLSWRLGQSSPRLQAGDAPSMGNGYPPRANASRFINTESGRYVYSAPLRRQLASRGSSVCHVDVSDKAGDEMDLEGISMDAPGYMSDGDVLSKNIRTDDITSGYMTDGGLGLYTRRLNRLPDGMAVVRETLQRNTSLGLGDADSWDDSSSVSSGISDTIDNLSTDDINTSSSISSYANTPASSRKNLDVQTDAEKHSQVERNSLWSGDDVKKSDGGSDSGIKMEPGSKWRRNPSDVSDESDKSTSGKKNPVISQTGSWRRGMTAQVGITMPRTKPSAPAGALKTPGTGKTDDAKVSEKGRLSPKASQVKRSPSDAGRSSGDESKKPLPSSSRTPTANANSFGFKKQSGSAAGLAMITASGVTVTSRSATLGKIPKSSALVSRSAGRKSSMDGAQNQDDGYLALSSRTNLQYRSLPRPSKSNSRNGAGNRSSTSSIDSNISSKSAGLPVPKLREPSKTALGSSLPGLVNQTDKEKGISSDNESVASCNSVKVNPAAQPVSSPAQTSLQPGAKYPDVASPTLRRLFGGKPTKQVPIATAENMKNSVVISNPHATMTQQGNLDSPSGSGVLSSGSSSPLYSKNVDLNQSPLASSPSSAHSAPSNSLTWGTNASSSSAVSKDGLGFQSVSSLHTSCESIDISLSSGGVPSHNSSTGLIASSKDDSLTPFVRTNSVKTTLSESPLSSPAASPKFCRSTLPRKQDSDPHLDRNTLPKKGLRYTPTSQLRTQEDAKEWLRSHSAGGLQDTAANSPFSSGSSVTSPSGTRFNFSQLASPTTVTQMSLSNPTMLRTHSLSNADGQYDPYTDSRFRNSSMSLDEKSRTMSRSGSFRDGFEEVHGSSLSLVSSTSSVYSTPEEKCQSEIRKLRRELDASQEKVSALTTQLTANAHLVAAFEQSLGNMTIRLQSLTMTAEQKDSELNELRKTIELLKKQNAAAQAAINGVINTPELNCKGNGTAQSADLRIRRQHSSDSVSSINSATSHSSVGSNIESDSKKKKRKNWLRSSFKQAFGKKKSPKSASSHSDIEEMTDSSLPSSPKLPHNGSTGSTPLLRNSHSNSLISECMDSEAETVMQLRNELRDKEMKLTDIRLEALSSAHQLDQLREAMNRMQSEIEKLKAENDRLKSESQGSGCSRAPSQVSISASPRQSMGLSQHSLNLTESTSLDMLLDDTGECSARKEGGRHVKIVVSFQEEMKWKEDSRPHLFLIGCIGVSGKTKWDVLDGVVRRLFKEYIIHVDPVSQLGLNSDSVLGYSIGEIKRSNTSETPELLPCGYLVGENTTISVTVKGLAENSLDSLVFESLIPKPILQRYVSLLIEHRRIILSGPSGTGKTYLANRLSEYIVLREGRELTDGVIATFNVDHKSSKELRQYLSNLADQCNSENNAVDMPLVIILDNLHHVSSLGEIFNGLLNCKYHKCPYIIGTMNQATSSTPNLQLHHNFRWVLCANHTEPVKGFLGRFLRRKLMETEISGRVRNMELVKIIDWIPKVWHHLNRFLEAHSSSDVTIGPRLFLSCPIDVDGSRVWFTDLWNYSIIPYLLEAVREGLQLYGRRAPWEDPAKWVMDTYPWAASPQQHEWPPLLQLRPEDVGFDGYSMPREGSTSKQMPPSDAEGDPLMNMLMRLQEAANYSSPQSYDSDSNSNSHHDDILDSSLESTL

SEQ ID NO: 42097 - DNA, 7098 bp, Artificial Sequence
  derived and/or modified sequence
atggagagcgtgagtgaaagtagccagcagcagaagcgaaaaccggtgattcacggcctggaggatcaaaagcggatatataccgactgggctaatcactatctagccaagtcgggacacaagagattgattcgtgacctacaacaggatgtgacagatggcgtcctcttagcgcagatcattcaagtcgtcgccaatgagaaaattgaggatataaatggctgccccaaaaaccgaagccaaatgattgaaaacatcgacgcttgtctcaactttctggcagcaaagggaataaacatacaagggcttagcgctgaagaaattaggaacggcaaccttaaagccattctggggttattcttctcactctcaaggtacaaacagcagcagcagcagcctcagaagcagcatctaagtagcccactcccaccagccgtatcccaggtggcaggcgctccatctcaatgccaggcagggaccccccagcagcaggttcccgttaccccacaagccccttgtcagcctcaccagcctgctcctcatcagcagtctaaagcccaggccgaaatgcagagtcggctgccaggccctacggcccgggttagcgccgctgggtcagaggccaagacacgaggcggctctacaaccgccaacaacagacgttcccagagcttcaacaactacgacaaatcaaagccggtgacaagccctcctccccccccttctagccacgaaaaggagcctctggcatcttccgccagttctcatccgggaatgtcagataatgcccctgctagcctggagtctggctcatccagcacacccacaaattgtagcacctccagcgctatcccacagcctggagcagccaccaaaccgtggcgctctaagtccttaagtgtaaagcattctgcgaccgtcagtatgctttctgttaaaccccctggccctgaggcaccaagaccgacgccagaggcgatgaaacccgccccgaataaccaaaagtccatgctggaaaagctcaagctttttaattcgaagggtggctccaaggccggagaagggcccggcagcagggatacatcctgtgagcgtctggagaccctgccttcgtttgaagaaagcgaggagcttgaggccgcttcccggatgcttactactgtgggacctgccagctcaagtcctaaaattgcccttaaagggatagcacagagaaccttcagccgcgctcttaccaacaagaagagcagcctcaaaggaaacgagaaggaaaaagagaagcaacaacgggaaaaggacaaagaaaagagcaaggacctcgcaaagcgcgcctctgtgacagagagattggatcttaaggaggagcccaaggaagacccatccggagccgcagtgccagagatgccaaagaaatcaagcaaaattgctagcttcattcccaaaggtggcaagttgaatagcgccaagaaagaaccaatggcgccctctcatagtggaatccccaagccaggaatgaaatccatgcctgggaaatcacccagcgcccccgccccgtccaaagaaggtgagagaagtaggtcgggcaagttatcttctggtctgcctcagcagaaaccacagctggacggacgtcatagtagctcctcgtcatctctggcctccagtgaggggaagggcccaggcgggactaccctcaaccattctattagttctcaaactgtcagcgggtcagttggaaccacccagacaacagggagcaacaccgtcagcgtgcaattaccacagcctcagcagcaatacaatcaccccaatacagcgacagtggccccatttctctatcggtcccagaccgataccgagggaaatgtcaccgccgaaagcagttcaacaggcgtttcggttgagccaagtcacttcacgaaaaccggtcagccagctctggaagaacttacgggagaagaccccgaggcgcggcgtctgcggacagtcaagaatattgcagacctgaggcagaatctggaagaaacaatgagctctcttcggggcacacaggtgacacattcaaccctagagacaacattcgatactaatgtcactacagaaatgtctgggcggtctatactgtccctgaccggccggcccacaccattgtcgtggaggctgggacagagtagccccagactccaggccggggacgccccgtcaatgggaaatggttaccctcctagggcaaatgccagccgattcattaatacggagagcggcaggtatgtgtatagcgctccactgcgccggcagctcgcatcccgaggtagttccgtctgccatgtggatgtttcagataaagccggtgacgaaatggatctggaagggattagtatggacgccccggggtatatgtctgacggagacgtgctctctaaaaacatccggacagacgacataacctccggctatatgacagatgggggcttggggctttacacacggcgcctgaatagactgcccgatggtatggccgtcgtgagagaaaccctgcaaagaaatacatctctagggctaggcgatgctgatagctgggacgattcctcaagcgtctcttccggaattagcgatacaatagacaatctgagtaccgacgacatcaatacctcatctagtattagctcctatgcgaacacccccgctagctcaagaaagaatctggacgtccagacagatgccgaaaagcactcccaggttgagcgtaattccttatggagcggggacgatgtcaagaaatccgacggtgggtctgattccggcatcaaaatggaaccaggatctaagtggaggagaaaccctagcgacgtctccgatgagtctgataagtctacttccggtaagaaaaatcctgtgataagccagaccgggtcatggaggagaggaatgactgcacaagtcggaataacgatgccacgcactaagccaagcgctcctgccggagctttaaagactcctggcaccggaaagactgacgacgccaaggtgtccgaaaaaggaaggctgagtccgaaggcttcccaggtgaagcgatcaccttccgatgccggtagatcatctggggacgaaagcaaaaagcccttgccaagttcttcaaggacccctactgcaaacgccaatagcttcggcttcaaaaagcagagcggcagtgctgctggattagccatgattactgccagtggcgtgacagtgacatctcggtctgccacactgggtaaaatcccaaaaagtagtgcattggtctctaggtcagctggccggaaaagtagcatggacggagcccagaatcaggatgacggatatctggcgctgagctctcgaaccaatctgcagtatcggtcgctgcccaggccctccaaatcaaattcacggaatggggccggtaatcgttcttccacttctagcatagacagcaacatatccagtaagtccgccggtcttcctgtccctaagctgagagaaccaagtaagactgcactggggagcagcctacctgggctggtgaaccagacagacaaggagaagggcattagcagcgacaacgaaagtgtggcaagctgcaattcggtgaaagtcaacccggcagcccagccagtgtcaagcccagcgcaaacttcgctgcagccgggtgccaagtaccccgacgtggcttcacctacccttcgcagactatttggtggaaaacccaccaaacaggtccccatcgctactgcggaaaacatgaaaaactcagtggttatcagcaaccctcatgctaccatgacacaacaaggaaaccttgattctccctctggcagcggagtgttgagtagcgggtcttcttcaccactatattccaagaacgttgatctgaatcagtcccccctagccagctccccctccagtgcacattcagccccctccaattctctcacatggggaactaatgcaagttcaagttctgccgtctctaaggacggcttggggtttcagtccgtgtccagcctacacacctcttgtgagtcaatcgatatctccctatcctctgggggagtgcccagccacaattcttctacgggcttaatcgcctccagcaaagacgacagtctgaccccgtttgttaggacgaattctgttaaaactacgctgagcgagagcccgctttcctctcccgcagccagccccaagttctgccgaagtacactccctcgaaagcaggattctgacccacacttagatcgcaacactcttcctaaaaagggtcttcgctacacacctacttcccagctgcgtacccaagaagatgccaaggaatggttgagaagtcacagcgcaggtggactgcaagatactgccgccaattcccccttctcctctggtagtagcgtgacaagcccaagcggaactcgcttcaactttagtcagcttgcaagccccaccacagtcacacagatgtcactcagcaatccgaccatgctcaggacccacagcctgtcaaatgcagacggtcagtatgatccatataccgactcccgttttcgaaacagcagcatgtctctagacgaaaagtcgcgtactatgtctaggagcggtagctttagagacgggtttgaagaggtgcatggcagcagtctcagcctcgtgtcttccacatccagcgtttactcaacgcccgaggaaaaatgccaaagcgagattcgcaaactcagaagagaactggatgccagccaggagaaagtgtccgcactgacgacacagttaacagcaaatgcacaccttgtggccgctttcgaacagagtttgggaaatatgacaatacgattacaatctctgactatgacagctgaacagaaagacagtgagctgaatgaacttagaaagactatcgaactgttgaagaagcaaaacgcagcagcgcaagccgctatcaatggagttatcaacaccccagagctgaattgcaaaggaaacggaaccgctcagtcggcagatttacggatccgcagacagcattccagcgatagtgtgtcatccattaactccgcaacttcacacagtagtgtaggatctaatatcgagagcgattctaaaaaaaaaaagaggaaaaactggctaagatcctcttttaagcaggcatttggcaagaaaaaatcaccaaagagtgccagctcacacagcgatattgaagagatgactgattcttccttacccagctcccccaagctccctcataatggcagtactgggtctaccccgttactaagaaacagtcatagtaactccttaatcagcgagtgtatggattccgaagctgaaaccgttatgcaactgcgtaacgaactgagggacaaggagatgaaactgaccgacatcaggctggaggcactgtctagtgctcaccagttagatcaactgcgtgaggccatgaacagaatgcagagcgaaatcgaaaagttgaaggcagagaatgaccgcctcaagtcagagtctcaggggtcaggctgttcacgtgcaccttcccaggtctccatcagtgccagcccccgccagtccatgggactgagccagcatagcctgaatctaaccgaatccacaagcctcgacatgttacttgacgatactggtgaatgtagcgccaggaaagagggaggaaggcatgtgaaaatcgtggtgtccttccaggaagagatgaagtggaaagaggacagccgcccacacctgttcctaattgggtgcattggtgtatctggaaaaacaaagtgggacgtattagatggagttgtgcggcgcttgtttaaggaatacattatccatgtggaccccgtgagtcagttgggattaaattcagactctgtcctgggctactctataggagagatcaaacgctcaaacacttccgaaaccccagaactgcttccttgcggttacttggtgggcgaaaacaccactataagtgttaccgtgaaagggcttgcagagaactctttggactccctggtgtttgagtccctgatccctaagcccattctgcagcgctatgtgtcgctgctgattgagcataggcgaatcatcctaagtggtccgagtggaactggtaagacatacctggcaaatcgccttagcgagtacatcgtgttacgggaaggtcgcgaactaactgatggtgtcatagccacatttaacgttgaccacaaaagctcaaaggagttgaggcaatatctctcaaacctagcagatcagtgtaactcggagaacaatgcagttgacatgcctctggtgataatactggataatctacaccatgttagttctctcggcgaaattttcaacgggctgctgaattgtaagtaccacaagtgcccatacatcatcgggacaatgaatcaggcgacgtcaagcacccccaatctacagctgcaccataatttccggtgggtgctgtgtgcaaaccacaccgagcccgtcaaggggtttctgggacgatttcttagacggaaactgatggaaacagaaattagcggccgagtccgcaacatggagctggtcaaaatcatcgattggatccccaaggtgtggcatcaccttaatagattcctggaagctcatagcagctctgacgtgacgattgggccccgactgttcttgtcctgccccattgacgtagatggcagtcgggtgtggttcactgatctgtggaactactcaatcattccctatctgctcgaggctgtgcgcgagggcctgcagttatatggcaggcgggccccttgggaggaccctgcgaagtgggtgatggacacatacccctgggccgctagccctcagcagcatgaatggcctccccttctgcaactgagaccagaagacgtcggcttcgacgggtacagcatgccgcgcgagggtagtacaagcaagcagatgcccccatcagacgcagaaggcgatcccctcatgaatatgttgatgcgcttgcaagaggctgcaaattatagcagccctcaatcatacgacagcgatagtaactctaactcacaccacgatgacatcctggattcgtcactcgagtctacattgtag

SEQ ID NO: 42098 - DNA, 7098 bp, Artificial Sequence
  derived and/or modified sequence
atggagagcgtgtctgagagcagccagcagcagaagaggaagcctgtgatccacggcctggaggaccagaagaggatctacacagactgggccaaccactacctggccaagagcggccacaagaggctcatccgggacctgcagcaggatgtgacagatggagtgctgctggcccagatcatccaggtggtggccaatgagaagattgaggacatcaatggctgccccaagaacagaagccagatgattgagaacattgatgcctgcctgaacttcctggccgccaagggcatcaacatccagggcctgtctgctgaggagatcagaaatggaaacctgaaggccatcctgggcctcttcttcagcctgagccgctacaagcagcagcagcagcagccccagaagcagcacctgagcagccccctgcccccagctgtgtcccaggtggccggggcccccagccagtgccaggccggcaccccccagcagcaggtgcctgtgaccccccaggccccctgccagccccaccagcctgccccccaccagcagagcaaggcccaggccgagatgcagagccggctgcccggccccacagcccgggtgtctgctgctggcagcgaggccaagacccggggcggcagcaccacagccaacaacagaagaagccagagcttcaacaactatgacaagagcaagcctgtgaccagccccccacctccacccagcagccatgagaaggagcccctggccagcagcgccagcagccaccctggcatgtctgacaatgccccagccagcctggagagcggcagcagcagcacccccaccaactgcagcaccagcagcgccatcccccagcctggagctgccaccaagccctggaggagcaagagcctgtctgtgaagcacagcgccaccgtgtccatgctgtctgtgaagcccccaggccctgaggccccccggcccaccccagaggccatgaagccagcccccaacaaccagaagtccatgctggagaagctgaagctgttcaacagcaaaggaggcagcaaggccggggagggccctggcagccgggacaccagctgtgagcggctggagaccctgcccagctttgaggagagcgaggagctggaggccgccagcaggatgctgaccaccgtgggccctgccagcagcagccccaagatcgccctgaagggcatcgcccagaggaccttcagccgggccctgaccaacaagaagagcagcctgaagggaaatgagaaggagaaggagaagcagcagcgggagaaggacaaggagaagagcaaggacctggccaagagggcctctgtgacagagcggctggacctgaaggaggagcccaaggaggaccccagcggggctgctgtgcctgagatgcccaagaagagcagcaagatcgccagcttcatccccaagggcggcaagctgaacagcgccaagaaggagcccatggcccccagccacagcggcatccccaagccaggcatgaagtccatgcctgggaagagccccagcgccccagcccccagcaaggagggggagaggagccgcagcggcaagctgagcagcggcctgccccagcagaagccccagctggatggccgccacagcagcagcagcagcagcctggccagcagcgagggcaagggccctgggggcaccaccctgaaccacagcatcagcagccagacagtgtctggctctgtgggcaccacccagaccaccggcagcaacacagtgtctgtgcagctgccccagccccagcagcagtacaaccaccccaacacagccaccgtggcccccttcctgtaccgcagccagacagacacagagggcaatgtgacagctgagagcagcagcactggagtgtctgtggagcccagccacttcaccaagacaggccagcctgccctggaggagctgactggagaagatcctgaggcccggcggctgaggacagtgaagaacattgctgacctgcggcagaacctggaggagaccatgagcagcctgcggggcacccaggtgacccacagcaccctggagaccacctttgacaccaacgtgaccacagagatgagcggccgcagcatcctgagcctgaccggccggcccacccccctgtcctggaggctgggccagagcagcccccggctgcaggccggagatgcccccagcatgggaaatggctacccaccccgggccaatgccagccgcttcatcaacacagagagcggccgctacgtgtacagcgcccccctgcggcggcagctggccagccggggcagctctgtgtgccacgtggatgtgtctgacaaggctggagatgagatggacctggagggcatctccatggatgcccctggctacatgtctgatggagatgtgctgagcaagaacatcagaacagatgacatcaccagcggctacatgacagatggcggcctgggcctgtacacccggcggctgaaccggctgcctgatggcatggctgtggtgcgggagaccctgcagaggaacaccagcctgggcctgggagatgctgacagctgggatgacagcagctctgtgagcagcggcatcagtgacaccatcgacaacctgagcacagatgacatcaacaccagcagcagcatcagcagctatgccaacaccccagccagcagcaggaagaacctggatgtgcagacagatgctgagaagcacagccaggtggagaggaacagcctgtggagcggagatgatgtgaagaagagtgatggcggcagtgacagcggcatcaagatggagcccggcagcaagtggaggaggaaccccagtgatgtgtctgatgaaagtgacaagagcaccagcggcaagaagaaccctgtgatcagccagacaggctcctggaggcggggcatgacagcccaggtgggcatcaccatgcccaggaccaagcccagcgccccagctggggccctgaagaccccaggcaccgggaagacagatgatgccaaggtgtctgagaagggccgcctgagccccaaggccagccaggtgaagaggagccccagtgatgctggccgcagcagtggagatgagagcaagaagcccctgcccagcagcagcaggacccccacagccaatgccaacagctttggcttcaagaagcagagcggcagcgctgctggcctggccatgatcacagccagcggcgtgacagtgaccagccgcagcgccaccctgggcaagatccccaagagcagcgccctggtgagccgctctgctggcaggaagagctccatggatggagcccagaaccaggatgatggctacctggccctgagcagcaggaccaacctgcagtaccgcagcctgccccggcccagcaagagcaacagcagaaatggagctggcaacagaagcagcaccagcagcattgacagcaacatcagcagcaagtctgctggcctgcctgtgcccaagctgcgggagcccagcaagacagccctgggcagcagcctgcccggcctggtgaaccagacagacaaggagaagggcatcagcagtgacaatgaatctgtggccagctgcaacagcgtgaaggtgaacccagctgcccagcctgtgagcagccctgcccagaccagcctgcagcccggggccaagtacccagatgtggccagccccaccctgcggcggctgtttggaggcaagcccaccaagcaggtgcccatcgccacagctgagaacatgaagaacagcgtggtgatcagcaacccccacgccaccatgacccagcagggcaacctggacagccccagcggcagcggcgtgctgagcagcggcagcagcagccccctgtacagcaagaatgtggacctgaaccagagccccctggccagcagccccagcagcgcccacagcgcccccagcaacagcctgacctggggcaccaatgccagcagcagcagcgctgtgtccaaggatggcctgggcttccagagcgtgagcagcctgcacaccagctgtgagagcattgacatcagcctgagcagcggcggcgtgcccagccacaacagcagcacaggcctgattgccagcagcaaggatgacagcctgaccccatttgtgaggaccaacagcgtgaagaccaccctgtctgagagccccctgagcagccctgctgccagccccaagttctgccgcagcaccctgcccaggaagcaggacagcgacccccacctggacaggaacaccctgcccaagaagggcctgcgctacacccccaccagccagctgcggacccaggaggatgccaaggagtggctgcggagccacagcgctgggggcctgcaggacacagctgccaacagccccttcagcagcggcagctctgtgaccagccccagcggcacccgcttcaacttcagccagctggccagccccaccaccgtgacccagatgagcctgagcaaccccaccatgctgcggacccacagcctgagcaatgctgatggccagtatgacccctacacagacagccgcttcaggaacagctccatgagcctggatgagaagagcaggaccatgagccgcagcggcagcttcagagatggctttgaggaggtgcacggcagcagcctgagcctggtgagcagcaccagctctgtgtacagcaccccagaggagaagtgccagagcgagatcaggaagctgcggcgggagctggatgccagccaggagaaggtgtctgccctgaccacccagctgacagccaatgcccacctggtggccgcctttgagcagagcctgggcaacatgaccatccggctgcagagcctgaccatgacagctgagcagaaggacagcgagctgaatgagctgaggaagaccatcgagctgctgaagaagcagaatgctgctgcccaggccgccatcaatggagtcatcaacaccccagagctgaactgcaagggaaatggaacagcccagagcgctgacctgcgcatccggcggcagcacagcagtgacagcgtgagcagcatcaacagcgccaccagccacagctctgtgggcagcaacattgaaagtgacagcaagaagaagaagaggaagaactggctgcggagcagcttcaagcaggccttcggcaagaagaagagccccaagagcgccagcagccacagcgacatcgaggagatgacagacagcagcctgcccagcagccccaagctgccccacaacggcagcacaggcagcacccccctgctgaggaacagccacagcaacagcctcatcagcgagtgcatggacagcgaggccgagaccgtgatgcagctgagaaatgagctgcgggacaaggagatgaagctgacagacatccggctggaggccctgagcagcgcccaccagctggaccagctgcgggaggccatgaacaggatgcagagcgagattgagaagctgaaggcagaaaatgaccggctgaagtctgagagccagggcagcggctgcagccgggcccccagccaggtgtccatcagcgccagcccccggcagagcatgggcctgagccagcacagcctgaacctgacagagagcaccagcctggacatgctgctggatgacacaggagaatgttctgccaggaaggagggcggcagacatgtgaagatcgtggtgtccttccaggaggagatgaagtggaaggaggacagccggccccacctgttcctgattggctgcatcggcgtgtctgggaagaccaagtgggatgtgctggatggagtggtgcggcggctcttcaaggagtacatcatccacgtggaccctgtgtcccagctgggcctgaacagcgacagcgtgctgggctacagcatcggggagatcaagaggagcaacaccagcgagaccccagagctgctgccctgtggctacctggtgggggagaacaccaccatctctgtgacagtgaagggcctggccgagaacagcctggacagcctggtgtttgagagcctcatccccaagcccatcctgcagcgctacgtgtccctgctgattgagcaccggcgcatcatcctgagcggccccagcggcaccgggaagacctacctggccaaccggctgtctgagtacatcgtgctgcgggagggccgggagctgacagatggagtcatcgccaccttcaacgtggaccacaagagcagcaaggagctgcggcagtacctgagcaacctggccgaccagtgcaacagtgaaaataatgctgtggacatgcccctggtgatcatcctggacaacctgcaccacgtgagcagcctgggggagatcttcaacggcctgctgaactgcaagtaccacaagtgcccctacatcatcggcaccatgaaccaggccaccagcagcacccccaacctgcagctgcaccacaacttccgctgggtgctgtgtgccaaccacacagagcctgtgaagggcttcctgggccgcttcctgcggaggaagctgatggagacagagatcagcggccgggtgaggaacatggagctggtgaagatcatcgactggatccccaaggtgtggcaccacctgaaccgcttcctggaggcccacagcagcagtgatgtgaccatcggccccaggctcttcctgagctgccccattgatgtggatggcagccgggtgtggttcacagacctgtggaactacagcatcatcccctacctgctggaggccgtgcgggagggcctgcagctgtatggccggcgggccccctgggaggaccctgccaagtgggtgatggacacctacccctgggccgccagcccccagcagcacgagtggccacccctgctgcagctgcggccagaagatgtgggctttgatggctacagcatgccccgggagggcagcaccagcaagcagatgcccccatctgatgctgagggggaccccctgatgaacatgctgatgaggctgcaggaggccgccaactacagcagcccccagagctatgacagcgacagcaacagcaacagccaccatgatgacatcctggacagcagcctggagagcaccctgtag

SEQ ID NO: 42099 - DNA, 7098 bp, Artificial Sequence
  derived and/or modified sequence
atggagagcgtgagcgagagcagccagcagcagaagcggaagcccgtgatacatggcttagaagaccaaaagcggatctacactgattgggctaaccactatctggcgaaatccggccataagcgactgattcgcgatctgcaacaagatgtgaccgacggagttctgttagctcagataatccaagtcgttgcaaacgagaaaattgaagacatcaacggctgccctaagaatagatctcagatgatcgagaatatcgatgcttgcctgaactttctggctgcaaaaggcatcaacatccagggtctatccgcagaggagattcgtaacggaaacctgaaggcaatactggggctgtttttttctctatccagatacaagcaacagcagcagcagcctcaaaagcagcacctgagttcgcctctaccccccgcagtgtctcaggttgctggggccccttcccagtgtcaggccgggaccccacagcagcaggttcccgtaacacctcaggccccttgccaacctcaccagcctgcgcctcatcaacagagcaaggcacaggctgagatgcagagccggctgccaggacccaccgcccgggtatccgccgctggaagcgaggctaagacacggggcggaagcaccactgcgaacaatcgaaggtctcaatcgtttaataattatgacaagtccaaacccgtgaccagccccccacccccaccatctagccatgagaaagagccacttgcgagctcagcgagctcccaccccggtatgtcagataatgcccctgcatcattggagtcaggcagttcaagcactcctaccaattgcagcacatctagcgccataccccagcccggggccgcaacaaagccatggaggagcaagtctctgagtgttaagcactccgctaccgtcagtatgctgagcgtcaagcccccggggcctgaggctccccggccgactcctgaagcaatgaagcctgcccccaataaccagaagtcaatgctggagaagttgaagctgttcaactccaagggcgggtcgaaggctggcgagggccctgggtcccgcgataccagctgcgagaggctggagactctccccagttttgaggaatcagaggagctggaagccgcttcacggatgctgactacagtgggccccgcctctagctcaccaaagattgcactgaagggcattgcacagagaaccttctctcgagcccttaccaacaagaagagctcccttaaaggtaatgaaaaagagaaagaaaaacagcagcgcgaaaaagacaaggaaaaatccaaggacctcgcgaagagggcgtctgtgacggagagactggacttgaaggaggagcccaaagaggacccatccggggccgccgtccccgagatgcccaaaaaatcctcaaagatcgcgtccttcattcccaaagggggaaagctcaatagcgccaaaaaggaacctatggccccgagccacagtgggattcccaaacccggaatgaagtccatgcctggaaagtcaccttcagctccagcccccagcaaggaaggtgagaggtctcggtcggggaagctttcctccgggctgcctcaacaaaaaccccaattggatgggcgacactcatccagcagctcaagtctggcgtcttcagagggaaaagggcctgggggtacaaccttgaatcacagtattagttcacagactgtgtcaggaagtgtgggaacaactcagacaacagggtctaataccgtgagcgttcagctcccacaaccccagcaacagtacaaccacccgaacacagctacagtggctcctttcctctaccggtcacagactgacaccgagggaaacgtgaccgccgaaagctcctccactggggtgagcgtggagccaagccatttcacgaaaacgggacaaccagcgctggaggagcttacaggcgaggatccagaggcccgacggctgaggaccgtcaaaaatatcgccgatcttagacagaaccttgaagaaaccatgtcttccctccggggaacacaagtaacacacagcactctggagactacattcgatacgaatgttacaaccgagatgtcaggccgcagcattctgtctctgactgggcggcctacacctctctcatggcggcttggtcaatcgagccccaggctgcaggcgggcgatgctccctcgatgggaaatggctatcccccacgggcaaacgcgagccgttttatcaacaccgagagcggacgctacgtttattccgcacctctgcggcggcaattggcttctcgtggttcaagcgtctgccacgtcgacgtctctgataaggcgggggatgagatggacctcgagggtatttctatggatgccccaggttatatgtctgacggagacgttcttagcaaaaatattagaactgacgatataacttctggatacatgacagatgggggcctgggactctatacaaggcggttaaataggctgcctgatgggatggctgtggtcagggaaactctccagcggaataccagcctcggactgggagacgctgatagctgggatgatagcagttccgtatcctcaggtattagcgatactatcgacaacttatcaaccgacgacatcaacactagctcgagcatctcaagctatgccaatacacctgcttcttctcggaagaacctagatgtgcagactgatgccgagaaacattcccaggttgaaaggaacagcctttggagtggagacgatgttaagaaatccgacgggggcagtgattccgggataaaaatggaaccaggatcgaagtggcgcaggaaccctagcgatgtgagcgacgaaagtgataaaagcaccagtggaaaaaagaacccagtgatctctcagaccggctcgtggcggagaggcatgaccgctcaagttggtattacgatgccacggaccaagcctagcgcaccagcaggagcattgaagacccctggaactggaaagacagatgacgctaaggtgtcagaaaaaggccgtctctcaccaaaggcatctcaagttaagcgctctccaagcgacgctggacgctctagtggcgatgaatcaaaaaagcctctcccttcgagcagccggacgccaaccgccaatgctaacagcttcggattcaagaagcagtcaggcagcgccgccggcctggccatgatcactgcctctggagtcactgtgaccagccgctctgctactctcggaaagatccccaaaagcagcgcattagtgtcccgcagcgccggccgcaaatcctctatggacggcgcgcagaaccaggacgatggatacctggccctcagttccaggactaacctccaatatagatcattacccaggccttccaagtcaaacagccggaacggcgctggtaatcggtcctctacctcgtctatcgactcaaacataagctcaaagagcgcaggattgcccgtcccaaaactgagggagccgagcaagactgccctggggtcatcgctgcctggtttggtgaaccagacggacaaagagaaaggtatctccagtgacaatgagagtgttgcaagctgtaactcagtaaaagtgaatccagctgctcagccagtcagctccccggcgcagacttccctccagcctggggcgaaatacccggatgtggcatctccaacattacgtaggttgtttggaggtaaacctaccaagcaagtccccattgccacagccgaaaacatgaaaaattcagtggttatctcgaatccacacgcaaccatgacccagcaaggaaaccttgactcacctagcggctccggggtcctgagctctggcagtagctcacctctgtactccaagaacgtggacctgaatcaaagtcccctagccagcagcccctctagcgcacatagtgcgccaagtaattccctaacctggggcaccaatgcctctagctcaagcgctgtttctaaggatggactcggttttcaaagtgtcagcagtcttcacacgagttgcgaaagcattgacatttcactaagcagcggcggtgtgccaagtcacaacagttcaacaggtctcatagccagttcaaaggatgattctctgacacccttcgtgcgtactaactctgtaaagacaacactgagcgagtcaccactgtcttcacccgccgcctctccaaaattctgtcgcagcacactacctcggaaacaggattcggaccctcacttagaccgcaacacccttccaaagaaaggcttacggtatactcctacctcacagttgcgtacccaggaggacgctaaagaatggctgcgcagccactctgccggcggcttgcaggatactgctgcaaattcccccttttcttcaggatcgtccgtgacttctccttccggcactcgctttaatttttctcagctggcctcacctactactgtcacccagatgtccctatctaacccaactatgttgcgcacacactctctcagcaacgctgatggacaatacgacccatacacagactcgcgcttccgcaattcgagcatgagcctcgatgaaaaatcacgcaccatgtcccggagtggtagtttcagagatggttttgaggaagtgcatggttcctctctaagcttggtgtctagcacatcgtcagtgtattcaactcctgaagaaaaatgtcagagtgagattaggaagttaagaagagagctggatgcctctcaggaaaaggtcagtgccctaacaacacagctgacagctaacgcccatctcgtggctgcgtttgagcaatctctggggaatatgacaattaggttacagtctctcaccatgactgccgagcaaaaggactccgagctcaacgaactcaggaagactatcgagttgctcaagaagcagaacgctgccgcccaggccgccatcaatggggtgattaatacaccagagctgaactgcaagggcaatggcacagcacagtctgccgacctaagaatacgacgccaacacagcagcgattccgtctcctccattaacagcgccacatcccactcctctgttgggtcaaacatcgaaagtgattctaaaaaaaagaagcgcaagaactggctgcgaagcagcttcaagcaggcttttgggaagaaaaaatcccctaaatcagcttctagccactccgatatagaagagatgactgattcatcattgccaagcagtccaaaactcccacataacggctcaacaggcagcactcccctgctacgcaactcccactctaactcacttatctctgaatgcatggacagtgaagcggagacagttatgcagttacggaatgagctacgggacaaggagatgaagttgacagatatccgattggaggctctatctagcgctcaccagttggaccagctgcgtgaagccatgaataggatgcagagtgaaattgagaaactgaaagcggaaaatgatcgcctcaagagcgagagtcaaggttctggttgttccagagccccaagtcaggtatcaatctccgctagccctcgccagtcaatgggcttatcacaacactcactcaatctcactgagtcgacaagcttggatatgctgcttgatgacactggcgagtgttcagcccggaaagagggcggtcgccacgtgaagatcgtggtaagcttccaggaagagatgaagtggaaagaagacagccggcctcacctttttcttatcggctgcatcggggtcagtgggaagacaaaatgggatgttctagatggcgtggtccgccggctgttcaaggagtatattattcatgtggatcccgtgtcacagctgggactgaacagcgatagcgtgcttggctactctataggtgagataaaaagatccaatacgtccgaaacccctgaacttctgccctgcggctacttggtcggagaaaacacaacgattagcgtcacagtgaaaggcttagctgaaaactccctggattccctcgtcttcgagtcgttgatacctaagcccattctccagagatacgtgagccttctgatagagcaccgtagaatcattttatcgggacctagtggaacaggcaaaacttacctcgctaatcgactgagcgaatacatcgtgctgcgggagggacgcgagctgactgacggggttatagcaactttcaacgtagatcataagagctccaaagagctgcgccagtatctatccaacctggctgatcagtgcaactccgagaacaacgcagtcgacatgcccctggtaattatcctggataatctgcatcacgtgtccagtctgggcgagatcttcaacgggctgctgaactgcaaataccacaagtgcccatacatcattggcacaatgaaccaggccacatcaagcaccccaaacctccagctacatcacaactttagatgggttctttgtgcaaatcacactgagccagtgaaaggattcctcggaaggttcctgaggaggaaattgatggaaaccgagatcagtgggcgcgtgaggaacatggaacttgtcaaaatcattgattggattcctaaagtgtggcatcacctcaaccgcttcctcgaagctcactcatcttcggatgtcacaatcggcccacggcttttcctgtcatgccctattgacgtagacggtagccgcgtgtggtttactgatctgtggaattactccatcatcccatacctgctcgaagccgtgcgtgaggggctccagctgtacggccgacgcgcgccatgggaggacccagctaagtgggtgatggatacctatccttgggcagcatcccctcaacagcatgaatggccccctcttctgcaattgcggccagaggacgtaggctttgatggttactccatgccacgcgaaggcagtaccagtaagcaaatgccaccaagcgacgcagaaggggaccctctgatgaatatgcttatgcgtctgcaggaagccgccaactattcatctccccagtcatacgactctgactcaaactccaactcccaccatgatgacatcttggactcaagcctagagagtacattgtag

SEQ ID NO: 42100 - DNA, 10667 bp, Artificial Sequence
  derived and/or modified sequence
tctcatgatgccggcagcagtcaccctcattgcaaaggcagtggtgccgagtgaggttcccgagtggattttaagaagacaggaagacctttgaagaggtggtgctgatttccttggctggcgggaactctgtctggctgttgcatgcatcacttttgtgtgggttattttgttcctctgtggatttggaagcatcgctgaaggagagagaggattttatttctgggaaatggaatcggtttctgagtccagccaacagcagaagagaaagccagttatccacggactggaagatcaaaagaggatctacacagactgggccaatcattacctagccaaatccggccacaagcgtctcatcagggatctccagcaagatgtgacagatggcgtcctcctggcccagattatccaggttgtggcaaatgaaaagattgaagacatcaatggctgtccgaagaacagatcccaaatgattgaaaacatagatgcctgcttgaatttcctggcagctaagggaataaacatccaggggctgtctgcagaagagatcaggaatggaaacctcaaggccattctaggcctcttcttcagcctctcccgatacaagcagcagcagcagcagccccagaagcagcacctctcctcacctctgccgcccgccgtatcccaggtggccggggccccctcccagtgccaggctggcacccctcagcagcaggtgccagtcactccccaagccccgtgccagcctcaccagccagcgccacatcagcagtcaaaagcacaagctgaaatgcagtccagacttccaggtcctaccgcgagggtatccgctgcaggcagcgaggccaaaacacgcggagggtcaactactgctaacaaccgacgcagccagagctttaacaactatgataaatccaaaccagtcacctccccacccccaccgccaagcagccacgagaaagagcctttggcaagttcagcctcctcccaccccggaatgagtgacaatgcacctgcttccttggagagcggcagcagctccacccctactaattgcagtacctcctcggccatcccgcagcccggtgcagccaccaagccttggcgcagcaaatccctcagcgtgaagcacagtgccacggtatccatgctctcggtcaagcctcctgggcctgaggcccccaggcccacacctgaagccatgaagccggcccccaacaatcagaagtccatgctggaaaagctgaaacttttcaacagtaaagggggctcaaaggcaggtgaggggccggggtcccgggacacaagctgtgagcggctggagactctgcccagcttcgaagagagcgaggagctggaggccgccagtcgcatgctcaccaccgtgggccctgcttccagcagccccaagattgcactcaagggcattgcccagaggacttttagccgggcactgaccaacaagaagagttctctgaaaggcaatgagaaagagaaggagaaacaacagcgggagaaggataaggagaaaagcaaggaccttgccaagagagcctctgtgacggagaggctggacctcaaggaggagccaaaagaagaccccagtggagcagctgtgcccgagatgccaaaaaagtcctccaagattgccagcttcatccccaaaggggggaagctcaacagtgccaagaaggagcccatggccccttcccacagtggaataccaaaaccaggaatgaaaagcatgcccgggaaatccccaagtgccccagcgccttccaaggaaggggagcggagccggagtgggaagctgagctcaggactcccccagcagaagccccagctggacggcagacactccagttcctcttccagcctggcgtcctcagaaggaaaaggcccaggagggaccaccctgaaccacagcatcagcagccagactgtcagtgggtctgtcgggaccacccagaccacaggaagcaataccgtcagtgttcagctacctcagccccagcagcaatacaaccatcccaacactgccacggttgcacctttcctgtacaggtctcagacggacactgaagggaatgttactgccgagtcaagctcaacaggtgtgagcgtggagcccagccacttcaccaagactggacagcctgctctggaagaactcactggggaagatcctgaggctcggcggctgcggacagtgaagaacatcgctgatctgcggcagaatttggaggaaaccatgtccagtttaaggggaactcaggttacacacagcacattggaaaccacgtttgacaccaatgtcaccacggagatgagtggccgtagcatactcagcttgacagggaggcccacacctctgtcctggagactgggccagtccagccctcggctccaagcaggagacgccccctcaatgggcaatgggtatccccctcgagccaacgccagcaggttcatcaacactgagtcaggtcgctatgtgtactccgcccctctgagaaggcagctggcctcccggggcagtagtgtctgccatgtggacgtctcagacaaggcaggagatgagatggacctggaaggcatcagcatggatgcccccggctacatgagcgacggggatgttctgagcaagaacatccggaccgatgacattacaagcggatacatgactgatggtggacttggcctctatacccgtcgcctgaaccggctccctgatgggatggctgtggtacgggagaccctgcaacgaaatacctccctgggcctcggagacgctgacagctgggacgacagcagctccgtcagcagcggcatcagcgacaccatagacaacctcagcactgatgacatcaacaccagctcctccatcagctcttatgccaacacacctgcctcctctcgaaaaaacctggatgtgcagactgatgctgagaagcactcacaggtggagaggaattccctgtggtctggtgatgatgtcaagaaatcagacggaggctcagacagcggcataaaaatggagccaggttccaagtggaggcggaatccttctgatgtgtctgacgagtccgacaaaagcacgtcgggcaagaagaatcctgtcatctcccagacaggctcatggcggcgaggcatgacagctcaggtgggcatcaccatgccaaggacgaagccttcagccccggcaggcgcactgaagaccccaggaactggaaaaacagacgacgcaaaggtgtctgagaaaggaaggctttctcctaaagcctcccaggtgaagcgctccccatcagatgcaggccggagcagtggtgacgaatccaaaaagcccctccccagcagctctaggacacctactgccaatgccaacagctttgggttcaagaagcagagtggttccgccgccggcctggccatgatcacagccagcggggtgactgtcaccagcaggtcagccacactgggcaaaatcccaaagtcatctgcactcgtcagtcggtctgctggtcggaagtcaagtatggatggggctcagaatcaggatgacgggtatctagccctaagctcccggacaaaccttcagtaccggagtttgccgaggcccagtaagtccaacagccggaacggggctgggaacaggtctagcaccagcagcatagattccaacattagcagcaagtccgcaggcctgccagtgcccaaactgagggagccttccaaaacagccctaggcagctctctaccaggtctggtcaaccaaacagacaaggagaaaggcatctcatcagacaacgagagtgtggcttcctgtaactcggtgaaagtgaatccggcagcccagcctgtgtccagtccggctcagaccagtctccagcctggagccaagtacccagatgtggcctctcccacactccgcagactctttggtgggaagcctaccaagcaagtgcccatcgccacagctgaaaacatgaaaaattcggtggtcatctccaatcctcatgccaccatgactcagcaaggtaacctagactccccgtcaggcagtggcgtcctgagcagtgggagcagcagtcctctctacagcaagaatgtggacctcaaccagtctccgctagcctccagccccagctcagcccactcggccccttccaacagcctcacctggggcaccaacgccagcagctcctccgcagttagcaaggatggcctgggctttcagtctgtcagcagcctccacaccagctgtgagtccatcgacatctccctcagcagtggaggggtccccagccacaattcttccactggcctcatcgcctcctccaaggacgactccttgactccctttgtcagaactaacagtgtgaagaccacactgtcagaaagccctctctcttcccctgctgctagccctaagttctgcagaagtactctgcccaggaaacaggacagtgacccgcaccttgataggaacactttgcctaagaaaggactcaggtatactcccacctcccagcttcgcacgcaagaagatgcaaaagaatggttacggtcccattctgcaggaggccttcaggacaccgctgccaattcccccttttcctctggctccagcgtgacttctccctccggaacaagattcaacttttcccagcttgcgagtcccaccactgtcacccagatgagcttgtccaacccgaccatgctgaggactcacagcctctccaatgctgatgggcagtatgatccatacactgacagccgcttccggaatagctccatgtccctggatgagaagagcagaaccatgagccgttcaggctcattccgggatgggtttgaagaagttcatggatcctcactctccttggtttccagcacatcgtcagtttattctacaccagaagaaaaatgccagtcagagattcgcaagctgcggcgggaactggatgcctcccaggagaaagtttcagctttgaccacccagctgacagcaaatgctcaccttgtggcagcctttgaacagagtcttggtaacatgacaatcaggctccagagtctgaccatgacagctgagcagaaggactcagaactgaatgagttaagaaaaaccattgagctgctaaagaaacagaacgcagctgcccaggctgccattaatggagtaattaacacacctgagctcaactgcaaaggaaacggcactgcccagtctgcagacctccgcatccgcaggcagcactcctcagacagcgtctccagcatcaacagtgccaccagccactccagcgtgggcagcaacatagagagtgactcaaagaagaagaagcggaagaactggttacgcagctccttcaagcaagctttcgggaagaagaagtccccaaaatctgcgtcctctcattcagatattgaggagatgacggattcttctttgccttcctcaccaaagttaccgcacaatgggtccacaggttccaccccactgctgaggaattctcactccaactctctaatttcagaatgcatggatagtgaagctgagaccgtcatgcagctccgaaatgagttaagagacaaggagatgaagctgacggatatccgcttagaagctctcagttctgcccaccagctggaccagctccgggaggccatgaacaggatgcagagtgaaatagagaagctgaaagctgagaatgatcggctgaagtcagagtctcaaggcagtggctgcagccgggctccttcccaagtgtccatctctgcctccccgaggcagtccatgggcctctcccagcacagcttgaacctcactgagtcaaccagcctggacatgttgctggatgacactggtgaatgctcggctcggaaggaaggaggcaggcatgttaagatagttgtcagctttcaggaggaaatgaagtggaaggaggattccagaccacatctctttcttattggctgcattggagttagtggcaagacgaagtgggatgtgctcgatggggtggttagacggctgttcaaagaatacatcattcatgtcgacccagtgagtcagctagggctgaattcagacagcgttcttggctacagcattggagaaatcaagcgcagcaacacttccgaaacaccggagctgcttccttgtggctatctggttggagagaacacgaccatctcagtgactgtgaaagggctcgcagaaaacagcctggactcactggtgtttgagtccttgattcccaagcccatcctgcagcgctacgtctccctcctgatagagcaccgtcggatcattctctctggccccagcggcactgggaaaacctacctggccaaccggctgtctgagtatatagtgcttcgagagggacgggagttgacagacggggttatcgccacctttaacgtggaccataagtccagcaaggaattgcgccagtacctgtccaaccttgctgaccagtgcaacagtgagaacaatgctgtggacatgcccctcgtcatcatcctggacaacctacaccacgtgagctctctgggagagatcttcaatgggctgctcaactgcaagtaccacaaatgcccttacataattggcacaatgaaccaggctacctcttcgactcccaacctgcagcttcaccataacttcagatgggtgctttgtgccaaccacacggagcctgtgaagggtttccttggccgattcctgaggaggaagctcatggaaacagagatcagtgggcgggtgcgcaatatggagctggtaaaaatcattgactggattcccaaggtctggcatcacctcaaccgcttcctggaggctcacagttcctcggacgtcaccatcggcccccggctcttcctgtcatgccccatcgatgtggacggctcgagagtgtggttcaccgacttgtggaactattccattatcccctatctcctggaagccgtcagagaaggactccagctctatggaaggcgcgccccctgggaggatcctgccaagtgggtgatggacacatatccatgggcagccagcccacaacagcacgagtggcctcccctgctgcagttacggcctgaggatgtcggcttcgacggctactccatgcctcgggagggatcgacaagcaagcagatgccccccagtgatgctgaaggtgacccgctgatgaacatgctgatgaggctgcaggaggcagccaactactccagcccccagagctatgacagcgactccaacagcaacagccatcacgatgacatcttggactcctctttggagtccactctgtgacaggggcccggagcccagcgccctcctcttctcctcaccgcattccacctgcatcccccacatcaccctgaagatgacttcctgagccagcccccagccacagccttagagctgcgggaacaccgagaccccccgtccttcagcctcgacctgggtgcaggcatcccgggccagctgcctgcggaccgcttccttccacagcgagaactgcactaccttctgttgtactttaattattgttttgccttgttgctgtgacctccctaagacactgaagatacttctcgggaaaggatcatcgccgttgaaatgaaaagagagacagagagaaaaaaaaaaagagaacccacatgaagctctgaaaccaaacagcatcctgccatgagcttcccagagacagaagagactggagcaaagtcggaaacacagagaagcacggcttcccctcagcacagaccctccagactgggtctcagagccgtgccacccaccctcccacacagccggccacagggagaactggtgctaaccagggtgcttgctttggtcacgttcaacgcactacagagctacgacacagggaaaccttaggagcaaataaaccgtgctttcatgttttttaaatggtgctttccttacccgagaggtattttgcctgttccaatcaaaccaccccattcaggtccatcagcctctgattaatatccgtgagagtgagtgacggagtgagagtgtgagcgagtggatgtggctgtcagtgcagaacagcatgtgtctctttccttctgatatatgaatgaatcaggtttttttttttttttttctgcaaacactgtgtatagtgagacttgttctactttggagaacaggttaccttttgaaaatgaggttgagtttcttcctttctgatgcattgatttttgaagatttttttttcccccttcccctcttggtcagaatcaatcctttggtgaaagtaagaaccgcaggagttgagttttggtttggtcctgctcagttttggtttttagttgtccatcctcacagtcctacacactcgcctcctcctgctagggctgggggtatctgtgtcctttaaaatggatgaggacctggtcctcgacatgtgggtgagccatggaccttgccttcccttctcgtccttgagggtttagaacacacaccaacacctccagcgtccccgccccagcttccggtggggtgatgcggtcaccctgcaaaagacttgcactttcctcagaaccaacatgacgcagctcaataagggtgagggtcactccctcccagaagccccgtctggacgagccttgcctgacctcttcggtgctgaccttcccaaagtgatgccttactggttttgtactaactgtgttcattttacataagtgtcgtgcctgcctggggtttgttttttttgtcattgttttccccattgaaacaaacagggctaaaaagtcatctgttcattaggagaactcaagttgctgtgacttttctcatccaaaagactcatttgtgtggatgcgtgaccatgggaaaaagaaaaaaaaaaagatccattttttaggttcttttcggtctccagctgacaacccaactggacaatgatctgtctggtgcaggagaaggcaaaagtttctacaagtctacatgaccttgctgatacttgttctaatagaaacccagtctgctgtgtcttcaacatactggtattttcattacaaagtatggtaaatttttgagttgtttgtttctgttttgtaaagagaatccttattggacaccagtgaaggtgtctctgttttaatgatcagggtttttattccatcttttgcatttcttctatttctgaaggtttgtctcttggcatctttttttagtttcttaccataagagtttgacccgaaactgctcacttcacattggatgacaccatgttcttcctctttgaaaagaaaaggggaatgtgtcccactagtgaaaggaaaacttttcaacactatccctgctttagtctcagcaaactcagactattctgcttagccttcattagtcatctgggtgtgagtgtgtcttgttctgtttttctttttaataaaacttttaaaccatatatttagcctgtgaccaggggggccaaaccctaagatttctggtaaacctgaagggtggccctcctcagacaatttatctcccagcaatgaccctactacactcgcgtactgtgaatttgggaggaggtaaagttgacttctcctcgtgggcagttttccaatcaccttgtgagtagacacctgccaatattgtttgaaacctttttttaatatgacatcctctcttgtcattctcttctcccctttcccacagacttccctcctgggtccaggttcagaaccaagacttctgtacctagtgctgcctgattggtgaacattgacttcaagtagcatagcccttgtgtgactcacaactccgtgtccttcctaaagtttcgggaagcagggttgtctaatatgcacatttcttattttggtcatatttttactttagtgtcactcaccttttacaaagtgactttgtactcatttagggctctatcggaaatgcttccattttgccttttctacagttaggccaattttgaaatatataaattctatgcaacatttatgttgagttaccaatggaagccaaaagttctcttcccaaactgccaagaatgatacaggccataattgaaatgggaataccttttaagtttcattaggggtggggtgggagtgggacaggaacaagacttgcctagatctttgttgtatcttggggacttttactttgttgtttgatgcttaaacttcaaaattctctgtattcaaatttgattgtggcgaatctacttcaaaaaggaaaaataatccaactttgtggatattaaatggaaggtttgctgttttgatctagttgtttccagtggagcagttttatgaaatatgttctataagatgtacattttttcattgtaacatagaaattgtaaataattgattaaagtgctgcattttgatgaattttttctagccatttttaaagagaaaactaggaattgagtattttgtgtacggtatgtttccatcctccctccccttcctcctcccctcctctctctctcttcctacctatttaattttcatttgtcatgaggtttttggatttgccaatgatctgctggacatcatgccccatgtcatagagaataaagctgatgattgtaccagtcttaaattattcatgattcaataaaattgatgcttatttattc

SEQ ID NO: 42101 - DNA, 7097 bp, Artificial Sequence
  derived and/or modified sequence
atggagtcagttagcgaatcctcccaacagcagaagaggaaaccggttatacacggactggaggaccagaagagaatttacacagattgggctaaccactatctggctaagagcggacacaaacgccttatccgcgacctgcaacaggatgtgaccgacggtgtactccttgcccagataatacaggtcgtagcaaacgagaagatcgaagatattaatggctgccctaaaaaccggagtcagatgatcgaaaatattgatgcatgcctgaactttcttgccgcaaagggcatcaatatccagggcctttcagccgaggaaattcgaaatggaaatctgaaggccattctaggtctgtttttttccctgtcccgctataaacagcagcagcagcagccacaaaagcagcatctcagtagcccgttacccccagcagtctcccaggtggcaggcgctccctcccagtgccaggctggcacgccacagcagcaggttcccgtaactcctcaggcaccgtgccagccacaccagcccgcaccccatcaacaatctaaggcacaggctgagatgcagtcaagattaccaggcccaacagcccgtgtgagtgctgctggaagtgaggccaaaacaagaggaggttcgaccacagccaacaaccgacgtagccagtccttcaacaactatgataagtctaagcctgtcacaagcccccctcccccacctagtagccatgaaaaagagccgctggcgtccagcgcaagctctcacccaggaatgtctgacaatgcccctgcctcactggagtcaggctcctccagcacacctactaactgttcgaccagctccgccatccctcagcctggtgctgccaccaagccgtggcgtagtaagtctctgagtgtcaagcacagcgcaacagtttcaatgctttccgtgaaacccccagggcctgaagcccctcggccaacacccgaagccatgaaacctgcgcctaataaccagaagagcatgctggaaaagctgaaactgtttaactcaaaaggcggaagtaaagctggcgagggtccaggatctagagacacttcctgcgaaagactggaaacattgccttcattcgaggaaagcgaggagttagaagccgcaagtcgcatgttaaccaccgtagggcctgcaagttcatctcctaagatagctctaaagggcattgcgcagcgcactttttcaagagctcttactaataaaaaaagcagtctcaaaggcaatgaaaaagagaaggagaaacagcagagagagaaggataaggaaaaatccaaggatctcgcgaagagagcaagtgtgacggaaaggctagacttgaaagaggagcccaaagaagacccctctggggcagcagtaccggaaatgcctaagaagagctcaaagattgccagcttcattcctaaaggaggtaagctgaacagtgctaagaaggagcccatggccccaagtcatagcgggatcccaaagccaggtatgaagtcgatgccgggaaagtcccccagcgccccagcaccatccaaggagggagaaaggtcccggagtgggaagctgagttctggtttacctcaacagaaacctcaactggatggacggcattcatctagcagttcctccttggcctcttcagaagggaaggggcctggagggacaactttaaaccacagtatcagtagccagaccgttagcggctccgtcggaaccacacagactacaggctcaaacacggtgtctgttcaactgccccagccccagcaacagtacaaccatccaaacaccgctaccgttgcgccatttttgtatcgctcccaaactgatactgaaggtaatgtgacggcggagtcttcttcaaccggtgtttccgtggaaccttctcattttacgaagactgggcagcctgccctggaggaactcactggcgaggacccggaggccagaaggctgcggactgtgaaaaatatcgctgatctgcggcagaatctcgaggagaccatgagtagccttaggggcacccaagtgacacacagtacactggaaacaacctttgatactaacgtcactaccgaaatgagcggacggagtatattatcccttacagggaggcccacccccctctcctggcggctgggtcagtcttcacccaggctccaggctggcgacgctcctagcatgggcaatggctacccccctcgagctaatgcttcacgattcattaatacagaaagcggcaggtacgtgtattccgctccgctgcgaaggcagctagcttcaagaggcagctcagtctgccacgtcgacgtcagcgataaggctggcgacgagatggacttggaggggatttccatggatgctccgggatatatgagtgacggtgacgttctcagcaagaacattaggacagatgatattacctcaggttatatgacagatgggggactgggcctgtatactagacgcctgaaccgtcttcccgatgggatggcagttgtgcgggagacactacaaaggaatacctcactcggccttggggatgcggattcttgggacgactcatcgtctgtatcatctggcatctccgataccatcgataacctgagcacggacgacattaatacctctagcagcatctcttcttatgccaacacccctgcctctagccgcaagaacctggatgtccagacagacgccgagaaacactctcaggtcgaacgcaattctttgtggagcggcgacgatgtgaagaagtctgatggagggtccgacagtggtatcaagatggaacccggatcaaagtggcggagaaacccttccgatgtgtctgacgagtctgacaagtccacttccggaaagaaaaaccctgtgatttctcagaccggatcctggagacgtggcatgactgcacaggtcggaataaccatgccgagaacaaaaccctctgcgcctgcaggtgccttgaagacaccaggcactgggaaaactgacgacgctaaggtgtcagaaaagggacgcttgtctccaaaagcatcccaggtcaaacggtccccatctgacgctggcaggtctagtggggacgagagcaagaagcctctccccagctcctctcgcacgccaaccgctaatgcaaactcatttggattcaagaagcagagcggctctgcagccggattggcaatgattactgcttcaggcgtgacagttacctccaggagcgcgaccttagggaagatcccaaagtcctctgccttggtgtcccgcagcgccggacgtaaatcctctatggatggagcccagaatcaggatgatggctatttggctctgtcttcccgcacaaacctccagtatcgctcactccctcggccaagtaaaagcaattcgcgtaacggggctggaaaccgtagctcaacctcaagcatagactctaatataagctctaagagtgctggtctcccagttcccaaactcagagaaccgtctaagactgccctgggatcctcattgcctggactggttaaccagacagataaggaaaaaggaatcagctctgacaacgaatcagtggcttcttgcaactccgtcaaagtcaatccagccgcacagcctgtgtccagccctgcgcagacatccctgcagcccggtgccaaataccctgacgtagctagtcctaccctgaggcgactgtttggcggaaagccaaccaagcaggtgcctatcgccacagccgaaaatatgaaaaattctgttgtgatcagcaatccccacgcaacaatgacccaacaaggcaacctggactcaccatccgggagtggtgtgctgtccagtggtagcagcagccccctgtattccaaaaacgtggacctgaatcaatcaccgttggctagcagtccgagctcagcccattctgcgccaagcaactcacttacttggggtaccaacgcgtccagtagttctgccgtgtccaaggacggactggggttccaaagcgtttctagcctgcatacaagttgcgaaagcatcgatatctctctcagcagcgggggtgtcccttcccataatagcagtactgggctgattgcctcaagcaaggatgacagtttaacccctttcgtgagaactaacagcgtaaaaacaacgttgagcgagagtcccttaagctcccctgccgcaagccctaaattctgccggtcaacgctgccaagaaaacaggactcagatccacatcttgaccgaaacaccctcccgaagaaaggacttagatatacgccaacaagtcaattacgcacgcaggaggacgccaaggagtggttgagaagccatagtgcaggcggtctgcaggataccgcagccaactctccgttctcatccggatcgtctgttacttccccttctggcactaggtttaactttagccagctggcctcgccaaccacagtgacacagatgtctttgtctaacccgaccatgcttcgcacccactctctgagcaatgccgacggtcaatatgacccttataccgattccaggtttaggaacagtagcatgtcactggacgaaaaaagtcggacaatgagccgatctggcagttttcgcgacggcttcgaggaggtgcacggctctagcctgtccctcgtatcctccacctcttctgtttactctacgcccgaagaaaaatgtcagtctgaaattaggaaattgagacgggaactggacgcgagtcaggaaaaagtgtccgccctgaccactcagcttacggcgaatgcacatcttgtggcagcttttgagcagtccctgggaaatatgaccataaggctgcagtcactgactatgacagcggagcagaaagactcagaacttaacgaactgaggaagaccattgagctgctcaaaaagcaaaatgcggcagcgcaggcagccatcaatggagtgattaatacaccagagctgaattgtaaaggaaacggcacggcacagagcgcggacctgcgcattaggcggcaacatagctccgatagcgtcagttctatcaacagcgcgacctctcacagttctgttggcagtaacatcgagagtgacagcaaaaagaagaaaaggaagaattggctgagaagttcttttaagcaagcctttggcaaaaagaaatctccaaagagcgcttccagccattctgacatcgaagagatgacggacagtagcctgccttcgtcccccaagctgcctcataacggcagtactgggtccacccccttactgcgcaactcacattcgaattccctgatcagtgagtgcatggacagcgaggctgagaccgtcatgcagttgcggaacgagctgagggataaggaaatgaagctgacggatatccggcttgaagcattgagcagtgctcatcaactggaccagctacgcgaagccatgaaccgtatgcaaagtgagatcgaaaagctcaaggccgagaacgaccgcctgaagtcagaaagccagggtagtgggtgtagtcgggcaccatctcaggtttccatctctgcttcccctaggcaaagcatgggcctttcccagcacagcctcaacctgaccgagtcaacctccctcgatatgttactagacgatactggtgaatgctccgctaggaaggaagggggtcgccatgtaaaaatcgttgtgtcctttcaggaggaaatgaaatggaaggaggatagccgtccccatctgttcctgatcggttgtattggagtgtctggcaagacaaaatgggacgtcttagacggggttgtgagacgtctcttcaaggagtacatcatacatgtagatcccgtgtcccagctgggcttgaactcagattcggtgctcggctactccattggcgaaatcaagaggtctaacacctctgaaaccccagagctacttccatgcggctacttggtcggcgagaacactaccatttctgtcaccgtgaagggcctggcggaaaatagccttgattccttggtttttgagagtctcattcccaagcctatcctgcagcgttatgtatctctgctgattgagcaccgtagaatcatcctgtctgggcctagcggaacaggaaaaacatatttagcaaatagactgtccgaatatattgtgctgagggaaggcagggagctcaccgatggagtgattgccacatttaatgtggatcacaagtcttctaaagagctgaggcagtaccttagtaatctggccgatcagtgcaactccgagaacaacgcagtcgatatgccgctggtcatcattctcgataacctgcaccatgtgagctccctgggagagatctttaatgggctgctcaactgtaagtatcacaaatgcccgtacatcattggaaccatgaatcaggccacaagtagtacaccaaacctgcagctgcaccataattttcgctgggtactctgcgcaaaccacacagaacccgtgaaggggtttctaggcaggttcctacgtcgcaagctcatggaaaccgagatcagtggccgtgtgcgcaacatggagctggtgaagatcatcgattggattcctaaggtgtggcaccatcttaacagattcctggaggcacactcatccagcgacgttaccatcggccctagactgtttctttcctgtcccattgacgtggacggaagtagagtttggtttaccgacctgtggaattatagcatcataccctatttgttggaggccgttcgggagggacttcagctttacggcaggagggccccttgggaagatccggcaaagtgggtgatggatacttacccttgggctgcttcacctcagcagcatgaatggccgcctttactccagctccgacccgaagacgtaggtttcgacggatacagcatgcccagggaggggtcgacctccaagcagatgcctccctccgatgcagagggggatcccttaatgaatatgctgatgcgactgcaggaagcagccaactatagctcgcctcagtcatatgacagcgatagtaattctaattctcatcacgacgacattctggacagctcgctggagagcactctgta

SEQ ID NO: 42102 - DNA, 7098 bp, Artificial Sequence
  derived and/or modified sequence
atggagagcgtgagcgagagcagccagcagcagaagagaaagcccgtgatccacggcctggaggaccagaagagaatctacaccgactgggccaaccactacctggccaagagcggccacaagagactgatcagagacctgcagcaggacgtgaccgacggcgtgctgctggcccagatcatccaggtggtggccaacgagaagatcgaggacatcaacggctgccccaagaacagaagccagatgatcgagaacatcgacgcctgcctgaacttcctggccgccaagggcatcaacatccagggcctgagcgccgaggagatcagaaacggcaacctgaaggccatcctgggcctgttcttcagcctgagcagatacaagcagcagcagcagcagccccagaagcagcacctgagcagccccctgccccccgccgtgagccaggtggccggcgcccccagccagtgccaggccggcaccccccagcagcaggtgcccgtgaccccccaggccccctgccagccccaccagcccgccccccaccagcagagcaaggcccaggccgagatgcagagcagactgcccggccccaccgccagagtgagcgccgccggcagcgaggccaagaccagaggcggcagcaccaccgccaacaacagaagaagccagagcttcaacaactacgacaagagcaagcccgtgaccagccccccccccccccccagcagccacgagaaggagcccctggccagcagcgccagcagccaccccggcatgagcgacaacgcccccgccagcctggagagcggcagcagcagcacccccaccaactgcagcaccagcagcgccatcccccagcccggcgccgccaccaagccctggagaagcaagagcctgagcgtgaagcacagcgccaccgtgagcatgctgagcgtgaagccccccggccccgaggcccccagacccacccccgaggccatgaagcccgcccccaacaaccagaagagcatgctggagaagctgaagctgttcaacagcaagggcggcagcaaggccggcgagggccccggcagcagagacaccagctgcgagagactggagaccctgcccagcttcgaggagagcgaggagctggaggccgccagcagaatgctgaccaccgtgggccccgccagcagcagccccaagatcgccctgaagggcatcgcccagagaaccttcagcagagccctgaccaacaagaagagcagcctgaagggcaacgagaaggagaaggagaagcagcagagagagaaggacaaggagaagagcaaggacctggccaagagagccagcgtgaccgagagactggacctgaaggaggagcccaaggaggaccccagcggcgccgccgtgcccgagatgcccaagaagagcagcaagatcgccagcttcatccccaagggcggcaagctgaacagcgccaagaaggagcccatggcccccagccacagcggcatccccaagcccggcatgaagagcatgcccggcaagagccccagcgcccccgcccccagcaaggagggcgagagaagcagaagcggcaagctgagcagcggcctgccccagcagaagccccagctggacggcagacacagcagcagcagcagcagcctggccagcagcgagggcaagggccccggcggcaccaccctgaaccacagcatcagcagccagaccgtgagcggcagcgtgggcaccacccagaccaccggcagcaacaccgtgagcgtgcagctgccccagccccagcagcagtacaaccaccccaacaccgccaccgtggcccccttcctgtacagaagccagaccgacaccgagggcaacgtgaccgccgagagcagcagcaccggcgtgagcgtggagcccagccacttcaccaagaccggccagcccgccctggaggagctgaccggcgaggaccccgaggccagaagactgagaaccgtgaagaacatcgccgacctgagacagaacctggaggagaccatgagcagcctgagaggcacccaggtgacccacagcaccctggagaccaccttcgacaccaacgtgaccaccgagatgagcggcagaagcatcctgagcctgaccggcagacccacccccctgagctggagactgggccagagcagccccagactgcaggccggcgacgcccccagcatgggcaacggctacccccccagagccaacgccagcagattcatcaacaccgagagcggcagatacgtgtacagcgcccccctgagaagacagctggccagcagaggcagcagcgtgtgccacgtggacgtgagcgacaaggccggcgacgagatggacctggagggcatcagcatggacgcccccggctacatgagcgacggcgacgtgctgagcaagaacatcagaaccgacgacatcaccagcggctacatgaccgacggcggcctgggcctgtacaccagaagactgaacagactgcccgacggcatggccgtggtgagagagaccctgcagagaaacaccagcctgggcctgggcgacgccgacagctgggacgacagcagcagcgtgagcagcggcatcagcgacaccatcgacaacctgagcaccgacgacatcaacaccagcagcagcatcagcagctacgccaacacccccgccagcagcagaaagaacctggacgtgcagaccgacgccgagaagcacagccaggtggagagaaacagcctgtggagcggcgacgacgtgaagaagagcgacggcggcagcgacagcggcatcaagatggagcccggcagcaagtggagaagaaaccccagcgacgtgagcgacgagagcgacaagagcaccagcggcaagaagaaccccgtgatcagccagaccggcagctggagaagaggcatgaccgcccaggtgggcatcaccatgcccagaaccaagcccagcgcccccgccggcgccctgaagacccccggcaccggcaagaccgacgacgccaaggtgagcgagaagggcagactgagccccaaggccagccaggtgaagagaagccccagcgacgccggcagaagcagcggcgacgagagcaagaagcccctgcccagcagcagcagaacccccaccgccaacgccaacagcttcggcttcaagaagcagagcggcagcgccgccggcctggccatgatcaccgccagcggcgtgaccgtgaccagcagaagcgccaccctgggcaagatccccaagagcagcgccctggtgagcagaagcgccggcagaaagagcagcatggacggcgcccagaaccaggacgacggctacctggccctgagcagcagaaccaacctgcagtacagaagcctgcccagacccagcaagagcaacagcagaaacggcgccggcaacagaagcagcaccagcagcatcgacagcaacatcagcagcaagagcgccggcctgcccgtgcccaagctgagagagcccagcaagaccgccctgggcagcagcctgcccggcctggtgaaccagaccgacaaggagaagggcatcagcagcgacaacgagagcgtggccagctgcaacagcgtgaaggtgaaccccgccgcccagcccgtgagcagccccgcccagaccagcctgcagcccggcgccaagtaccccgacgtggccagccccaccctgagaagactgttcggcggcaagcccaccaagcaggtgcccatcgccaccgccgagaacatgaagaacagcgtggtgatcagcaacccccacgccaccatgacccagcagggcaacctggacagccccagcggcagcggcgtgctgagcagcggcagcagcagccccctgtacagcaagaacgtggacctgaaccagagccccctggccagcagccccagcagcgcccacagcgcccccagcaacagcctgacctggggcaccaacgccagcagcagcagcgccgtgagcaaggacggcctgggcttccagagcgtgagcagcctgcacaccagctgcgagagcatcgacatcagcctgagcagcggcggcgtgcccagccacaacagcagcaccggcctgatcgccagcagcaaggacgacagcctgacccccttcgtgagaaccaacagcgtgaagaccaccctgagcgagagccccctgagcagccccgccgccagccccaagttctgcagaagcaccctgcccagaaagcaggacagcgacccccacctggacagaaacaccctgcccaagaagggcctgagatacacccccaccagccagctgagaacccaggaggacgccaaggagtggctgagaagccacagcgccggcggcctgcaggacaccgccgccaacagccccttcagcagcggcagcagcgtgaccagccccagcggcaccagattcaacttcagccagctggccagccccaccaccgtgacccagatgagcctgagcaaccccaccatgctgagaacccacagcctgagcaacgccgacggccagtacgacccctacaccgacagcagattcagaaacagcagcatgagcctggacgagaagagcagaaccatgagcagaagcggcagcttcagagacggcttcgaggaggtgcacggcagcagcctgagcctggtgagcagcaccagcagcgtgtacagcacccccgaggagaagtgccagagcgagatcagaaagctgagaagagagctggacgccagccaggagaaggtgagcgccctgaccacccagctgaccgccaacgcccacctggtggccgccttcgagcagagcctgggcaacatgaccatcagactgcagagcctgaccatgaccgccgagcagaaggacagcgagctgaacgagctgagaaagaccatcgagctgctgaagaagcagaacgccgccgcccaggccgccatcaacggcgtgatcaacacccccgagctgaactgcaagggcaacggcaccgcccagagcgccgacctgagaatcagaagacagcacagcagcgacagcgtgagcagcatcaacagcgccaccagccacagcagcgtgggcagcaacatcgagagcgacagcaagaagaagaagagaaagaactggctgagaagcagcttcaagcaggccttcggcaagaagaagagccccaagagcgccagcagccacagcgacatcgaggagatgaccgacagcagcctgcccagcagccccaagctgccccacaacggcagcaccggcagcacccccctgctgagaaacagccacagcaacagcctgatcagcgagtgcatggacagcgaggccgagaccgtgatgcagctgagaaacgagctgagagacaaggagatgaagctgaccgacatcagactggaggccctgagcagcgcccaccagctggaccagctgagagaggccatgaacagaatgcagagcgagatcgagaagctgaaggccgagaacgacagactgaagagcgagagccagggcagcggctgcagcagagcccccagccaggtgagcatcagcgccagccccagacagagcatgggcctgagccagcacagcctgaacctgaccgagagcaccagcctggacatgctgctggacgacaccggcgagtgcagcgccagaaaggagggcggcagacacgtgaagatcgtggtgagcttccaggaggagatgaagtggaaggaggacagcagaccccacctgttcctgatcggctgcatcggcgtgagcggcaagaccaagtgggacgtgctggacggcgtggtgagaagactgttcaaggagtacatcatccacgtggaccccgtgagccagctgggcctgaacagcgacagcgtgctgggctacagcatcggcgagatcaagagaagcaacaccagcgagacccccgagctgctgccctgcggctacctggtgggcgagaacaccaccatcagcgtgaccgtgaagggcctggccgagaacagcctggacagcctggtgttcgagagcctgatccccaagcccatcctgcagagatacgtgagcctgctgatcgagcacagaagaatcatcctgagcggccccagcggcaccggcaagacctacctggccaacagactgagcgagtacatcgtgctgagagagggcagagagctgaccgacggcgtgatcgccaccttcaacgtggaccacaagagcagcaaggagctgagacagtacctgagcaacctggccgaccagtgcaacagcgagaacaacgccgtggacatgcccctggtgatcatcctggacaacctgcaccacgtgagcagcctgggcgagatcttcaacggcctgctgaactgcaagtaccacaagtgcccctacatcatcggcaccatgaaccaggccaccagcagcacccccaacctgcagctgcaccacaacttcagatgggtgctgtgcgccaaccacaccgagcccgtgaagggcttcctgggcagattcctgagaagaaagctgatggagaccgagatcagcggcagagtgagaaacatggagctggtgaagatcatcgactggatccccaaggtgtggcaccacctgaacagattcctggaggcccacagcagcagcgacgtgaccatcggccccagactgttcctgagctgccccatcgacgtggacggcagcagagtgtggttcaccgacctgtggaactacagcatcatcccctacctgctggaggccgtgagagagggcctgcagctgtacggcagaagagccccctgggaggaccccgccaagtgggtgatggacacctacccctgggccgccagcccccagcagcacgagtggccccccctgctgcagctgagacccgaggacgtgggcttcgacggctacagcatgcccagagagggcagcaccagcaagcagatgccccccagcgacgccgagggcgaccccctgatgaacatgctgatgagactgcaggaggccgccaactacagcagcccccagagctacgacagcgacagcaacagcaacagccaccacgacgacatcctggacagcagcctggagagcaccctgtag

SEQ ID NO: 42103 - protein, 1493 aa, Artificial Sequence
  derived and/or modified sequence
MLWPRNLTSWDDSSSVSSGISDTIDNLSTDDINTSSSISSYANTPASSRKNLDVQTDAEKHSQVERNSLWSGDDVKKSDGGSDSGIKMEPGSKWRRNPSDVSDESDKSTSGKKNPVISQTGSWRRGMTAQVGITMPRTKPSAPAGALKTPGTGKTDDAKVSEKGRLSPKASQVKRSPSDAGRSSGDESKKPLPSSSRTPTANANSFGFKKQSGSAAGLAMITASGVTVTSRSATLGKIPKSSALVSRSAGRKSSMDGAQNQDDGYLALSSRTNLQYRSLPRPSKSNSRNGAGNRSSTSSIDSNISSKSAGLPVPKLREPSKTALGSSLPGLVNQTDKEKGISSDNESVASCNSVKVNPAAQPVSSPAQTSLQPGAKYPDVASPTLRRLFGGKPTKQVPIATAENMKNSVVISNPHATMTQQGNLDSPSGSGVLSSGSSSPLYSKNVDLNQSPLASSPSSAHSAPSNSLTWGTNASSSSAVSKDGLGFQSVSSLHTSCESIDISLSSGGVPSHNSSTGLIASSKDDSLTPFVRTNSVKTTLSESDPHLDRNTLPKKGLRYTPTSQLRTQEDAKEWLRSHSAGGLQDTAANSPFSSGSSVTSPSGTRFNFSQLASPTTVTQMSLSNPTMLRTHSLSNADGQYDPYTDSRFRNSSMSLDEKSRTMSRSGSFRDGFEEVHGSSLSLVSSTSSVYSTPEEKCQSEIRKLRRELDASQEKVSALTTQLTANAHLVAAFEQSLGNMTIRLQSLTMTAEQKDSELNELRKTIELLKKQNAAAQAAINGVINTPELNCKGNGTAQSADLRIRRQHSSDSVSSINSATSHSSVGSNIESDSKKKKRKNWLRSSFKQAFGKKKSPKSASSHSDIEEMTDSSLPSSPKLPHNGSTGSTPLLRNSHSNSLISECMDSEAETVMQLRNELRDKEMKLTDIRLEALSSAHQLDQLREAMNRMQSEIEKLKAENDRLKSESQGSGCSRAPSQVSISASPRQSMGLSQHSLNLTESTSLDMLLDDTGECSARKEGGRHVKIVVSFQEEMKWKEDSRPHLFLIGCIGVSGKTKWDVLDGVVRRLFKEYIIHVDPVSQLGLNSDSVLGYSIGEIKRSNTSETPELLPCGYLVGENTTISVTVKGLAENSLDSLVFESLIPKPILQRYVSLLIEHRRIILSGPSGTGKTYLANRLSEYIVLREGRELTDGVIATFNVDHKSSKELRQYLSNLADQCNSENNAVDMPLVIILDNLHHVSSLGEIFNGLLNCKYHKCPYIIGTMNQATSSTPNLQLHHNFRWVLCANHTEPVKGFLGRFLRRKLMETEISGRVRNMELVKIIDWIPKVWHHLNRFLEAHSSSDVTIGPRLFLSCPIDVDGSRVWFTDLWNYSIIPYLLEAVREGLQLYGRRAPWEDPAKWVMDTYPWAASPQQHEWPPLLQLRPEDVGFDGYSMPREGSTSKQMPPSDAEGDPLMNMLMRLQEAANYSSPQSYDSDSNSNSHHDDILDSSLESTL

SEQ ID NO: 42104 - DNA, 4482 bp, Artificial Sequence
  derived and/or modified sequence
atgctttggcctagaaacttgacatcctgggacgattctagctccgtgagttcggggattagcgatacgatcgataatctgagtacagacgacattaacacttcttccagcatatcatcctatgcaaatacgccggcctcaagcagaaagaaccttgatgtgcagactgacgcggagaaacattcccaggttgagcgcaactctctttggagtggtgacgatgttaaaaaaagtgacggcggttctgatagtggtattaaaatggagcccgggtcaaagtggaggcggaacccatcggatgtatcagatgagagtgacaaatctaccagcggcaagaagaatccagtgatcagtcagacgggctcttggcggcggggaatgactgcacaggtgggtatcaccatgcctcgcaccaagccttcggccccagcaggggccctcaagacaccaggaactggcaagaccgacgacgctaaagtatccgaaaagggacgcctgagccccaaggcctcccaggtaaaacgaagcccaagcgatgctgggcgatcgtcgggggatgagtctaagaagccactgccgagcagttctaggaccccgactgccaatgccaattccttcgggttcaaaaagcagagcggctcagctgccggtctggccatgatcacggcatcgggggtcactgtgactagccggtccgcaacgctgggaaagatcccaaagtcgagcgccctggtctctagaagcgctggacgcaagtcttcaatggatggagcccaaaaccaggatgatggctatctcgccctgtccagccgcacgaacttgcaatacagatcactgcctagaccaagcaagtccaattcccggaatggcgcaggcaatagatcctccacaagtagtattgactctaacatctcgagcaagtccgccggtctgcccgtgccaaagctgagagagcccagcaagactgctcttggttcatcgttacccggacttgtaaatcagacagataaggagaaagggatttcttccgataacgagtcagttgccagttgcaattccgtcaaagtcaatccagctgcccagccagtgagctcacccgcacaaaccagcttgcagcctggggcaaagtacccagacgtcgcatccccgacactcagacgattattcggcgggaagcccacaaagcaggtaccaatagccacagcagaaaacatgaagaactctgtggtgatatcaaacccgcatgctactatgacgcagcaggggaatcttgattcacctagcggatccggggtcctgtccagcggtagcagttctccgctgtacagcaaaaatgtggacctgaaccagtcaccactggccagcagcccatcaagcgctcactccgccccgagtaactcactcacatggggtactaacgcctcctcaagctccgccgtgagcaaagatggactcggcttccaatcagtgtcctctctccatacctcatgcgagagcatcgacatttccctgagtagcgggggcgtgccctcccataactcgtcaacagggctgattgcctcctcaaaagatgactccctgactccgttcgtgagaacgaactcagtaaaaaccacacttagcgagtcagatccccacctggatcggaatactcttccaaaaaaaggcttgcgttacactcctacatcgcaactccgcacccaagaggacgccaaggaatggctgcgctcacattcagccggtggcctccaggatactgcagctaatagtcccttttcgtccgggtctagcgttacatctccaagtggcaccaggttcaacttttcgcagctggcatcaccaacaacagtgacgcagatgtctctgagcaatcccaccatgctccgtacgcatagcttgtccaatgcagacgggcagtacgatccctacaccgattcacgctttagaaactctagcatgagtttggatgagaaatcgcggacaatgtcccggtccgggtcctttcgcgatggcttcgaggaagtgcacggttcaagtcttagcctggtctcttccacgagttctgtttactcaacccccgaagagaaatgtcagagcgaaataagaaagctccgccgggaactagacgcaagccaagagaaagtgagtgcacttaccacccagctgactgcaaacgcccacttagtggctgcatttgagcagtcattagggaacatgacaattcgccttcaatccctgaccatgacagccgaacagaaggactctgagctgaacgaactgaggaaaaccattgaactcctcaagaagcagaacgcggcggcccaggctgccatcaacggcgtgatcaataccccagagctgaattgcaaaggtaacggaacagctcagtctgccgacctgagaatccgtcgtcagcacagttctgattcagtgtcatctattaacagcgcaacttctcattcatcagttggtagcaacatcgaaagcgacagtaaaaagaagaagaggaagaattggctgagatcctcttttaagcaggcatttgggaaaaaaaaatcgccaaaaagtgcttcctctcacagcgatatcgaagagatgactgactcctctctgccttcttcccccaaattgcctcataatggctccactggttccactccactactgcggaactcccactccaacagtcttatatccgaatgcatggactccgaagccgagaccgtcatgcagctgcgcaatgaactcagagataaagagatgaagttaactgacattcggctcgaggccctaagctctgcgcatcaattggaccagctgcgggaagctatgaatagaatgcagtctgaaatcgaaaagctaaaggccgagaacgatagactcaagagtgagagccagggatcagggtgttctcgcgcaccttcacaggttagcatttcagcatcacctaggcaatctatgggtttaagccagcattctttgaatctgacagagtccacttccctcgacatgctgctcgacgatacgggcgagtgttcagcccgcaaggagggcgggaggcacgtgaagattgtggtgtcttttcaagaggaaatgaagtggaaagaagactctcgtccacacctgttcctgatcggctgcattggtgtcagtggaaaaacaaaatgggacgtccttgatggcgtggtcagacggctgtttaaggagtacatcatacatgtggatcccgtatcccaattgggacttaattccgactccgtgttgggctattctatcggagagattaaacgcagcaataccagcgagacgccagagctgctcccttgtgggtatctggtgggggaaaacacgacaattagcgtgaccgtgaagggattggcagagaactcattggattcactggtgtttgagtcactgatccccaagccaatcctgcagagatacgtgtcactccttattgaacacagaagaatcattctcagcggacccagcggtaccggaaaaacatatctcgcgaatcggctgagcgaatacatagtcctgagagaggggcgcgagctcacagatggcgtgatagcaaccttcaacgtcgatcataagtcatctaaagagctgaggcagtacttaagcaatttggcagatcagtgcaactcagagaataacgcagtggacatgccactcgtgattatactggataacctgcatcatgtgtcttcactgggagagatctttaatggactgctgaactgtaagtatcacaaatgcccatatataattggaaccatgaaccaggcaacctcttccacaccaaaccttcagcttcatcacaatttccgctgggtcctgtgcgccaaccacactgagccagtcaagggttttcttggtcgttttcttagaagaaaactgatggagaccgagatctctggccgcgtgaggaatatggagctagtgaagattatcgattggataccaaaagtgtggcatcaccttaatcggtttctagaagcacatagttcaagtgacgtgacaatcggcccacgcctgttcctgtcttgccctattgatgttgatgggtcccgggtgtggtttaccgatctgtggaactactccattatcccttaccttctggaggccgtgcgggagggactccaactgtatggtagaagagctccatgggaagatccagcaaaatgggtgatggacacgtacccgtgggcggcctctccacagcagcatgagtggccacccctgctgcagctgcggccggaagatgtgggatttgacggatactcaatgcccagagagggctcaacatccaagcagatgccgccatcagacgccgaaggggaccccttaatgaatatgcttatgcgtcttcaggaggccgctaattatagtagtccgcaatcatacgacagcgactctaactcaaacagtcaccacgatgatatccttgactcatctttagagtctaccctttag

SEQ ID NO: 42105 - DNA, 4482 bp, Artificial Sequence
  derived and/or modified sequence
atgctgtggccacggaacctgacaagctgggatgactccagcagtgtttcatccggcatctcagacacgatcgataacctgtctactgatgacattaacacctcgagcagcatttcatcttatgccaacacgccggcctcttccagaaaaaacctggacgtgcagactgatgctgagaagcatagccaggtggagcgtaactctctgtggagcggagatgacgtgaagaagagcgacggcgggtccgactcagggatcaagatggagcctggatccaagtggaggaggaatcccagcgacgtcagtgatgagtctgacaagtcaacctcggggaagaagaacccagtgattagccagaccggtagttggaggcgcggcatgacagcacaggtgggaataaccatgcctcggaccaagcccagcgcccccgccggtgcccttaaaacacccgggaccggcaagaccgacgatgctaaggtgtccgaaaaaggccgcctgagcccgaaggctagccaggtgaagcggtccccaagcgacgcgggaaggagctcaggagatgagtccaagaaacccctgccatcttcatctagaacacccacggcgaacgccaacagcttcggctttaaaaaacagtcaggatctgccgctggcctggcaatgattactgcctccggggtcactgtgacgtcccggtcggccaccctgggcaagattcctaaatcttcggctcttgtgtccagatcagccggccgcaagtcgagtatggacggcgcgcagaaccaggacgacggctacctggccctctcctctcgaaccaacctgcagtatagatccctgcctcgaccctctaagtccaatagcaggaatggcgccggaaatcggagttccacaagctccattgactctaacatttcctctaagagcgccggactgcctgtgccaaaactgcgggaaccgtccaagactgctctgggctctagcctacccggcctggtgaaccaaacggataaagagaagggtatttcttccgacaatgagagcgtcgcaagctgcaattctgtcaaggttaacccagctgctcagccagtgtcctctccggcccaaacaagcctgcaacccggagcgaaatacccagacgtcgcctcaccaactctgcgccgcctcttcggagggaaacctaccaaacaggtgcctatagctactgccgaaaacatgaagaacagcgtggtgataagcaatccgcatgcaaccatgacccagcagggtaatctggacagtccttcaggaagtggcgtcttgtcctctgggagctcaagcccactatattcaaaaaatgtcgacttgaaccaatcccccctggcctcttccccctcttctgcccactcggccccatcgaactctctcacgtggggtactaatgcaagctcttcgtcggccgtctcaaaagacggcttgggtttccagagtgtgtcgtccctccacacgtcctgtgaatccatagacataagtctgagcagcggaggcgtacccagtcacaactcatccaccggactgattgcttctagcaaggatgacagcctcacacctttcgtacggactaactcagtgaagacaaccctgagtgagtctgacccacatctcgaccggaacaccctgcccaagaaggggctgcgctacacacccaccagccagttacgcacacaggaggacgccaaagaatggctgaggagccacagcgcaggtggcctccaggacaccgctgcaaactccccttttagtagcggctcctccgtaacgtcaccatccgggactagattcaatttttctcagctggcatcccccaccactgtcacccaaatgagcctgtcaaaccctactatgctgcgcacacacagcctttcaaacgccgacggccaatacgacccctatacagactctcgcttccgaaattcttcaatgagtttggacgagaagtctcggaccatgtctcgctcaggatccttcagagacggattcgaagaagtccacggatcttctctgtcactggtgtcttcaacttccagtgtctacagcactcctgaggaaaaatgccagtccgagatcagaaagctgaggagagagctggatgcctcccaagagaaagtgtctgcccttactacacaattgacagcaaatgctcatctggtagcggcctttgagcagtctttaggaaatatgaccatacggctgcagagcctcacaatgaccgctgagcagaaggacagtgaacttaacgaactgaggaagactatagaactactcaagaagcagaatgctgccgctcaggcggccattaacggggtcataaacacacctgagctcaattgcaaaggtaacggcacagcacaaagcgccgatctccgaatcaggaggcagcactcttcagactccgtgagttctattaactccgctaccagccatagttctgtcggcagcaacatcgaatctgactctaagaagaaaaagcgcaagaattggcttagatctagtttcaagcaggcgttcggtaagaagaagagtcctaaaagtgcttcaagccattccgacattgaggaaatgacggatagttccctcccaagcagtccaaagctcccacacaacggcagtactggcagtaccccattactacgaaattcccattcaaattctttgatctcagaatgcatggacagcgaggccgagacggtcatgcagctgagaaatgagctgagggataaggaaatgaagctcacggacatcaggctggaggccctgagttcagctcaccagctggatcagctcagggaggccatgaacaggatgcagtccgaaattgagaagctgaaggctgaaaatgaccggctgaagtctgagtctcagggcagcggctgtagtcgggctccttcacaagtgagtatatccgctagtcctagacagagcatggggctgtcacagcacagcctgaacctaactgagagcacttccttggacatgcttttggacgacaccggtgaatgtagcgctaggaaggaggggggcaggcacgtcaaaattgtggtttctttccaggaagagatgaagtggaaagaggatagcagaccccatcttttcctgattggatgcattggggttagtggaaagactaagtgggacgtcctggacggagtggtaagaagattatttaaggagtacataatacatgtggatccagtgtcccagctaggactaaattctgactcggtgctgggctacagcattggggagatcaagcgttccaatacttcggagacacccgagctgttgccgtgcggttacctggtgggcgagaataccactatcagcgtcaccgttaagggcctggccgaaaattcactggacagcctggtgtttgaaagcctgattcctaaaccgatcctccagagatacgtgtctctgctgattgagcatcggcgcattattttaagcggcccgagcggcactggtaaaacctacctggctaaccggctctcagagtatatcgttcttagagagggccgagaactgaccgacggggtcatagcaacattcaacgtagaccataaatcatcaaaggaactgcggcagtatctctcaaaccttgcagaccagtgcaattccgaaaacaacgctgtggatatgcccttggtgattatcctagataatcttcatcacgtaagttctctgggagagatctttaatgggctgctgaactgtaagtatcataaatgtccctacatcatcggcactatgaaccaagcaacttcatccacccccaatctgcaactgcatcataactttcgctgggtcctgtgcgcaaaccatacggagccagtgaagggatttcttggccgcttcctgcgccgtaagcttatggagactgaaatttcaggcagggtgcgcaacatggagttggtgaaaataattgactggatccccaaagtgtggcatcacctgaatcgatttctggaggcccactcctccagcgatgtgacaattggccccaggctctttttaagctgccctatcgatgtggatggatcacgagtgtggtttacagacctgtggaactattcaatcattccgtacctgctagaggccgttagagaaggactccagttatatgggcgtcgcgctccttgggaggatcctgcaaagtgggttatggatacgtatccttgggctgctagccctcagcaacacgagtggcctcctctcttacagcttaggcccgaagacgtaggctttgacggctattcaatgccacgcgagggtagcacctcaaaacagatgcctcccagcgacgccgagggtgatccattgatgaacatgctgatgcggcttcaagaagccgccaactattcctctccccagtcttacgactctgattctaacagcaatagccatcacgatgatatactagactcctcattggaaagtaccttgtag

SEQ ID NO: 42106 - DNA, 4482 bp, Artificial Sequence
  derived and/or modified sequence
atgctgtggcccaggaacctgacctcctgggatgacagcagctctgtgagcagcggcatcagtgacaccatcgacaacctgagcacagatgacatcaacaccagcagcagcatcagcagctatgccaacaccccagccagcagcaggaagaacctggatgtgcagacagatgctgagaagcacagccaggtggagaggaacagcctgtggagcggagatgatgtgaagaagagtgatggcggcagtgacagcggcatcaagatggagcccggcagcaagtggaggaggaaccccagtgatgtgtctgatgaaagtgacaagagcaccagcggcaagaagaaccctgtgatcagccagacaggctcctggaggcggggcatgacagcccaggtgggcatcaccatgcccaggaccaagcccagcgccccagctggggccctgaagaccccaggcaccgggaagacagatgatgccaaggtgtctgagaagggccgcctgagccccaaggccagccaggtgaagaggagccccagtgatgctggccgcagcagtggagatgagagcaagaagcccctgcccagcagcagcaggacccccacagccaatgccaacagctttggcttcaagaagcagagcggcagcgctgctggcctggccatgatcacagccagcggcgtgacagtgaccagccgcagcgccaccctgggcaagatccccaagagcagcgccctggtgagccgctctgctggcaggaagagctccatggatggagcccagaaccaggatgatggctacctggccctgagcagcaggaccaacctgcagtaccgcagcctgccccggcccagcaagagcaacagcagaaatggagctggcaacagaagcagcaccagcagcattgacagcaacatcagcagcaagtctgctggcctgcctgtgcccaagctgcgggagcccagcaagacagccctgggcagcagcctgcccggcctggtgaaccagacagacaaggagaagggcatcagcagtgacaatgaatctgtggccagctgcaacagcgtgaaggtgaacccagctgcccagcctgtgagcagccctgcccagaccagcctgcagcccggggccaagtacccagatgtggccagccccaccctgcggcggctgtttggaggcaagcccaccaagcaggtgcccatcgccacagctgagaacatgaagaacagcgtggtgatcagcaacccccacgccaccatgacccagcagggcaacctggacagccccagcggcagcggcgtgctgagcagcggcagcagcagccccctgtacagcaagaatgtggacctgaaccagagccccctggccagcagccccagcagcgcccacagcgcccccagcaacagcctgacctggggcaccaatgccagcagcagcagcgctgtgtccaaggatggcctgggcttccagagcgtgagcagcctgcacaccagctgtgagagcattgacatcagcctgagcagcggcggcgtgcccagccacaacagcagcacaggcctgattgccagcagcaaggatgacagcctgaccccatttgtgaggaccaacagcgtgaagaccaccctgtctgagagtgacccccacctggacaggaacaccctgcccaagaagggcctgcgctacacccccaccagccagctgcggacccaggaggatgccaaggagtggctgcggagccacagcgctgggggcctgcaggacacagctgccaacagccccttcagcagcggcagctctgtgaccagccccagcggcacccgcttcaacttcagccagctggccagccccaccaccgtgacccagatgagcctgagcaaccccaccatgctgcggacccacagcctgagcaatgctgatggccagtatgacccctacacagacagccgcttcaggaacagctccatgagcctggatgagaagagcaggaccatgagccgcagcggcagcttcagagatggctttgaggaggtgcacggcagcagcctgagcctggtgagcagcaccagctctgtgtacagcaccccagaggagaagtgccagagcgagatcaggaagctgcggcgggagctggatgccagccaggagaaggtgtctgccctgaccacccagctgacagccaatgcccacctggtggccgcctttgagcagagcctgggcaacatgaccatccggctgcagagcctgaccatgacagctgagcagaaggacagcgagctgaatgagctgaggaagaccatcgagctgctgaagaagcagaatgctgctgcccaggccgccatcaatggagtcatcaacaccccagagctgaactgcaagggaaatggaacagcccagagcgctgacctgcgcatccggcggcagcacagcagtgacagcgtgagcagcatcaacagcgccaccagccacagctctgtgggcagcaacattgaaagtgacagcaagaagaagaagaggaagaactggctgcggagcagcttcaagcaggccttcggcaagaagaagagccccaagagcgccagcagccacagcgacatcgaggagatgacagacagcagcctgcccagcagccccaagctgccccacaacggcagcacaggcagcacccccctgctgaggaacagccacagcaacagcctcatcagcgagtgcatggacagcgaggccgagaccgtgatgcagctgagaaatgagctgcgggacaaggagatgaagctgacagacatccggctggaggccctgagcagcgcccaccagctggaccagctgcgggaggccatgaacaggatgcagagcgagattgagaagctgaaggcagaaaatgaccggctgaagtctgagagccagggcagcggctgcagccgggcccccagccaggtgtccatcagcgccagcccccggcagagcatgggcctgagccagcacagcctgaacctgacagagagcaccagcctggacatgctgctggatgacacaggagaatgttctgccaggaaggagggcggcagacatgtgaagatcgtggtgtccttccaggaggagatgaagtggaaggaggacagccggccccacctgttcctgattggctgcatcggcgtgtctgggaagaccaagtgggatgtgctggatggagtggtgcggcggctcttcaaggagtacatcatccacgtggaccctgtgtcccagctgggcctgaacagcgacagcgtgctgggctacagcatcggggagatcaagaggagcaacaccagcgagaccccagagctgctgccctgtggctacctggtgggggagaacaccaccatctctgtgacagtgaagggcctggccgagaacagcctggacagcctggtgtttgagagcctcatccccaagcccatcctgcagcgctacgtgtccctgctgattgagcaccggcgcatcatcctgagcggccccagcggcaccgggaagacctacctggccaaccggctgtctgagtacatcgtgctgcgggagggccgggagctgacagatggagtcatcgccaccttcaacgtggaccacaagagcagcaaggagctgcggcagtacctgagcaacctggccgaccagtgcaacagtgaaaataatgctgtggacatgcccctggtgatcatcctggacaacctgcaccacgtgagcagcctgggggagatcttcaacggcctgctgaactgcaagtaccacaagtgcccctacatcatcggcaccatgaaccaggccaccagcagcacccccaacctgcagctgcaccacaacttccgctgggtgctgtgtgccaaccacacagagcctgtgaagggcttcctgggccgcttcctgcggaggaagctgatggagacagagatcagcggccgggtgaggaacatggagctggtgaagatcatcgactggatccccaaggtgtggcaccacctgaaccgcttcctggaggcccacagcagcagtgatgtgaccatcggccccaggctcttcctgagctgccccattgatgtggatggcagccgggtgtggttcacagacctgtggaactacagcatcatcccctacctgctggaggccgtgcgggagggcctgcagctgtatggccggcgggccccctgggaggaccctgccaagtgggtgatggacacctacccctgggccgccagcccccagcagcacgagtggccacccctgctgcagctgcggccagaagatgtgggctttgatggctacagcatgccccgggagggcagcaccagcaagcagatgcccccatctgatgctgagggggaccccctgatgaacatgctgatgaggctgcaggaggccgccaactacagcagcccccagagctatgacagcgacagcaacagcaacagccaccatgatgacatcctggacagcagcctggagagcaccctgtag

SEQ ID NO: 42107 - DNA, 4482 bp, Artificial Sequence
  derived and/or modified sequence
atgctgtggccccggaacctgaccagctgggacgacagcagcagcgtgagctctggcatcagcgatacaattgacaacttaagtactgatgacataaacactagctcctccatcagtagttacgctaatacaccggcttcaagccggaagaacctggacgtacagacggacgctgagaagcactcacaggttgaaaggaactcactgtggagtggcgatgatgtcaagaaaagtgatgggggcagtgacagcggaattaagatggaaccaggcagtaagtggcggagaaacccctccgacgtgtctgatgagtcagataaatcaacctcaggaaaaaaaaaccccgtcatcagccagaccggcagctggcggcgcggcatgacagcccaggtcgggataactatgccaaggacaaagccctctgcgccagctggagctctcaaaacgcccgggaccggtaaaaccgatgacgccaaagtgtccgagaaaggcagactcagccccaaagcttctcaggtcaaacgtagcccatccgatgcgggaaggtcttccggggatgaatctaagaagcctctgccatcctcttcaaggacgcctacagccaatgcaaactcgtttgggtttaaaaaacagagcggaagtgctgccggattggctatgatcactgcgagcggtgtcacagttacatcccgatcagccacccttggaaagattcctaaaagcagcgcgctggtgagcaggagtgctggacgtaagagcagcatggatggggcacagaaccaggacgatggatacctggctttaagcagcaggaccaacttgcagtacagatcattgcccagaccctcaaagagcaattcccgaaatggcgcaggcaatcgctcttctacttcatccatcgattccaatattagcagcaagagcgccggcttgccggtacccaagctgcgcgagccgagcaaaaccgcactcggctctagccttcccggcttggtcaatcagactgataaggaaaagggcatctcttctgataacgagagtgttgcgtcctgcaattctgttaaagtgaaccctgcggctcagcccgtatcgtcccccgcccagactagcttacagccaggtgcaaaataccctgatgtcgcctctccaaccctgcggcgtctatttggggggaagccaaccaagcaggtgcccatcgcaactgccgaaaacatgaagaattccgtggtcatttccaatcctcacgctactatgacccagcagggtaaccttgacagcccttcgggatccggcgtgctatccagcggcagcagttcgccactgtactcgaaaaacgtcgacttaaatcaatcgccgctcgcctcaagcccatccagtgcacattccgccccttcaaacagtctaacctgggggaccaacgccagttcatccagtgccgtatccaaggatgggctcgggttccagtcagtatcttcactgcacaccagctgtgagtcaattgatatctctctctcttccgggggtgtcccttctcacaatagcagtacaggactcattgccagcagcaaggatgactccttgactccatttgtgcgtacaaacagcgtgaagacaactttgagtgaatctgatccacatctcgacagaaacactctccctaagaaaggtctgcgctacacaccgacgtcgcagctcaggacccaggaggacgctaaggagtggctgagatcgcatagcgctggcggtctgcaagataccgccgccaattccccattttcttcaggctcctctgttacaagtccctctggaacccgctttaattttagccaacttgcctctccaacaactgtcacgcagatgtccttatctaaccctactatgctgcggacccactcactgtccaatgcagatggacagtacgacccttatacggactctaggtttcgaaattcttcaatgtcactcgacgaaaagtcacgaaccatgagccgctctggcagcttccgtgatgggttcgaggaagtgcacggcagttcactgtctcttgtgtccagtacttccagcgtgtacagcacacccgaagaaaaatgccaatcagaaataagaaagctgcgacgggaactggatgcctcccaggagaaggttagcgccctgaccacccaactgacagctaatgcccatctagtggcagccttcgagcagtccctcggcaatatgacgatcaggttacagtcgctgaccatgacggccgaacagaaggactcggagctaaatgaacttaggaagaccattgagctcctgaaaaagcaaaacgctgcggcccaggctgccatcaatggcgttatcaatactccagagttgaattgcaagggcaatggaacagcccagagcgctgacttacggatcaggagacaacacagcagcgattccgtgagctccatcaactctgcgacttcacattctagtgtggggtccaacattgaatcagacagcaaaaagaagaagcgcaagaactggctgaggagctcttttaagcaggcctttggaaaaaaaaaaagcccaaagagtgcaagttcacacagcgacatagaggaaatgacagacagcagcctgccttcatctcccaagctgccacataatggaagcaccggaagcacccctctccttagaaacagccacagcaatagtttgatatccgaatgcatggactccgaggccgaaacggtcatgcagcttcgcaacgagctccgtgacaaagaaatgaagctgacagatataaggctggaggccctctctagtgcacaccagctggaccagctgagggaagccatgaaccgcatgcaaagcgaaatagagaagttaaaagctgagaatgaccggttgaagtccgagtcccaggggtcaggatgctcaagagctccttcccaggtctcaatctcggcctcaccacgtcaaagcatgggactgagtcagcacagcctaaacctgaccgaatctacatcactggacatgctgctggatgatacgggcgaatgcagcgcccgcaaggaaggtggtagacacgttaaaatagttgtgtcttttcaggaagaaatgaaatggaaggaggactccagacctcatttatttctgatcgggtgcataggggtgtctgggaagaccaaatgggatgtgttagatggtgtagtaagaagattatttaaagagtacataatccatgtcgatcctgtgtcccagctgggccttaattccgactccgtgctgggttactccatcggtgaaattaagaggagcaatacaagtgaaactcctgagctcctgccatgcggatacctggtgggtgagaacacgacaatttcagtcaccgtcaaaggacttgcagaaaactccctggactctctcgtcttcgaatccctgattcctaagccaatcctgcagcggtacgtgagcctcctcatagagcaccggagaattatactgtccggcccttcaggaaccggaaagacgtacctagccaatcgtttgtccgagtacatcgtgctgcgcgaaggtagggagctcaccgacggggtgattgctactttcaacgtggaccataagagttccaaggaattacgacaatacttatcgaatctcgctgatcagtgtaattccgaaaataacgccgtggacatgccgctggttatcattctggacaaccttcaccatgtgtcaagcctgggagagatcttcaacgggctgctgaattgcaagtaccataaatgcccctacattataggcaccatgaaccaggctacatccagcacacctaatctgcaactgcaccataactttaggtgggtactttgcgctaaccacacggaaccggtaaagggctttctggggaggttcctgaggagaaagttgatggaaaccgaaatctccggtcgagttcgaaatatggaactagttaagatcattgattggatacctaaggtctggcatcacctcaaccggttcctagaggcccacagtagctcagacgttacaatcggaccacgcctcttcctttcctgccccatcgatgtcgacgggtctagagtttggtttacagacttatggaactatagcattatcccctaccttctggaggccgtgcgtgagggattacagctgtatggccgacgcgctccctgggaagatccagctaaatgggtgatggatacttacccttgggcagcttcgccacagcagcacgaatggccccccttgctccagcttcgcccagaggatgtcggctttgacggctattcaatgcccagggaaggaagcacttctaagcagatgcctccttctgacgcagagggggaccccctgatgaatatgctgatgaggctgcaggaggcagccaattatagcagtccccagagttacgatagtgatagcaattctaactcacatcacgatgatatactggactcttcactggagagcaccctttag

SEQ ID NO: 42108 - DNA, 4482 bp, Artificial Sequence
  derived and/or modified sequence
atgctgtggccccggaacctgaccagctgggacgacagcagcagcgtgagctccggaatttcagataccatcgacaatctctcaaccgatgacattaacacttcctcttcaatttccagctacgccaacacccccgcctcttccagaaaaaacctggatgtccagacggacgccgaaaaacacagccaggtggagcgcaatagcctgtggtccggagatgacgtgaaaaagtccgatgggggctctgatagtggaatcaaaatggaacccggctctaagtggcgaagaaatccatcagatgtcagcgacgagtctgataagagtacaagtgggaagaagaaccccgtgatctcacagacaggttcatggaggcgcgggatgacagcccaggttggaatcaccatgcctagaaccaaacccagtgcgcctgctggtgctctgaaaactccagggacaggaaagactgacgacgccaaggtgtccgaaaaggggagacttagtcccaaagcctcccaggtcaagaggtctccttcagatgctggacgctccagcggcgatgagtccaagaagcctttgccaagttctagcagaacacctaccgcgaacgccaactctttcggtttcaaaaaacagtccggatcagccgctggactggccatgatcacagcgagcggtgtaacagttacctctcggtctgcgacactaggaaaaattcccaagtcatcagctctcgtgagtcggtcagcaggaaggaagtcctccatggacggtgcccagaatcaggacgatgggtatctggctctgtcttcccgcacaaaccttcaatatagatctctgccacggccctccaagagtaattctcgaaatggagccgggaatcgctctagtacatcatctattgattccaatattagttctaaatctgcagggctcccggtgccgaagttacgcgagccttcaaagacagcccttggaagctctctgccaggcttggtgaatcagactgataaagagaaaggcatctcgtctgacaacgaatccgtcgctagttgcaactccgtcaaagtcaatcccgccgcccagccggtcagctcgccagcccagacgtccttacaacccggcgccaaataccccgacgtggcatcacctactctgcggcggttatttggaggcaagcctacgaaacaggtcccaatcgcaacagcggaaaatatgaagaattcagtcgtgatttccaacccccacgctaccatgacgcagcagggcaatttggactctccatctgggtcgggcgtgttgtcctctgggagttccagccctctgtactcgaagaacgtggacctcaatcagagcccgctcgccagcagtccctccagcgctcactctgctcccagcaattctttgacatgggggacaaatgcctcaagttccagtgccgtgtcaaaggacggcctgggattccagtcagtgtcgagtctacacactagctgtgagagtatcgacatctcacttagctctgggggggtgccgagccacaacagctcaacagggctcatcgcctcctcaaaagacgatagcctgactccattcgtgagaaccaactccgttaagaccacactgtctgaatcagatccccatctggatcgcaatactttaccaaagaagggcctgagatacacccccacgtcccagctcagaacacaggaagatgccaaggaatggctacgatcccactcggccggcggactgcaggataccgctgccaattcccccttctctagcggatcctctgttacaagtcccagcggtaccaggttcaatttttcccagcttgcttctccaacaaccgtcacccagatgtccttaagtaaccccaccatgcttcgcacccactcgctttctaacgcggacggccagtacgacccctacacagattcccgctttcggaatagctctatgagccttgatgaaaaaagtagaacgatgtcacggagcggaagtttccgtgatggcttcgaggaggttcatggatcatcactctcgttggtgagctcaacaagctccgtgtactccacccctgaggagaagtgccagtctgagatccggaagctgcgacgagagttggatgcttctcaggagaaggtctcagccctcaccacccagctgactgcgaacgcgcatttggtagctgcgttcgaacaatccctggggaacatgactattcggttgcagagcttgaccatgactgcagaacagaaagatagcgaattgaatgagctccggaaaacaattgagctgcttaaaaagcagaacgctgcggcccaagctgcaattaatggtgtgataaatacccctgagttgaattgtaagggcaatggcacggcccagtcggctgaccttcgcattagaaggcagcactcatcagactccgtatcctccataaattccgcgacctcgcacagcagcgtgggctccaatatcgagtcagattctaagaaaaaaaaaaggaaaaactggctgcgcagtagctttaagcaagcattcggaaagaagaagagcccgaaatccgcctcctcacacagcgatatcgaggagatgactgacagtagtttgccctcaagccccaagctgccccacaacggctctacggggtcaacccccctcctcagaaattcacatagtaactcccttatatcggagtgtatggatagcgaggcagagacggttatgcagcttaggaacgagttaagggacaaggaaatgaaactgaccgacatcagactggaggctttgtcttcagcccaccagctcgaccagctcagagaggccatgaacaggatgcaaagcgagatagagaagctgaaagcggaaaatgatagactgaaatctgaatcccagggatccggctgtagcagagctccgtcgcaggtgtccataagtgcatccccaaggcagtcaatggggctttcccaacactctctcaatctcacagaatcaacatctctagacatgctcctcgacgacaccggggagtgcagcgctagaaaggaaggggggcgccacgtgaaaatcgtggtcagctttcaagaagaaatgaagtggaaggaggacagtagacctcacctctttcttatcggctgtattggagtgagtggcaaaacgaagtgggacgttctggatggggtggtgcgacgcctctttaaggagtacatcattcacgttgaccccgtgtcccagttagggcttaattccgattccgtcctgggatacagcatcggcgaaatcaagagatcaaacacatcagagaccccagaactgctgccttgtggatatcttgtaggcgagaatacaactattagcgttactgtcaaaggacttgctgagaattccctcgattccttggtatttgagagtcttatccccaaacctattctgcagaggtatgtgagtctgcttatagaacatcgtagaattattctgtccgggccatccggaacaggtaaaacctatctagccaaccgtttgtccgagtacatagttttaagggaggggcgagagctgactgatggggtcattgcaacatttaacgtcgaccacaagagctccaaggagctccgccaatatctaagcaatttagcggaccagtgcaattctgaaaataacgctgtggatatgcctctggtgataattctggataatctgcatcacgtgagctcgctcggtgaaatctttaatgggttattaaactgcaaataccataagtgtccctacattattggcacgatgaatcaagccacaagttccacccccaacttacagctgcatcacaatttccgatgggtgctttgcgcaaaccataccgagcccgttaagggctttcttggacgttttctgcggcgcaagttgatggagaccgaaatttcaggacgcgtgcggaatatggaactggtaaaaatcattgattggatcccgaaggtgtggcaccacctgaacaggttcctggaagcccacagcagcagtgatgtcactatcggtccacggctgtttctttcctgcccaatcgacgtcgatgggtctagagtatggttcactgatttgtggaactattccatcatcccttaccttctcgaggctgtgagagaagggctacagctgtacggacgaagagctccttgggaagacccagcgaagtgggtcatggacacctatccatgggcagcctcaccacagcagcacgagtggccacctctgctccaactcaggcctgaggatgtcggatttgacggatactccatgccacgcgaagggagcacatctaagcaaatgcccccctccgacgccgagggtgatccactgatgaatatgctcatgagactccaagaggctgccaattacagctctccacaaagctatgactccgactccaattctaattcccaccacgacgatatccttgatagttccctggaatctactttatag

SEQ ID NO: 42109 - DNA, 7839 bp, Artificial Sequence
  derived and/or modified sequence
ggccgcaatgtagtgaaatgctctggcctaggaaccttacaagctgggacgacagcagctccgtcagcagcggcatcagcgacaccatagacaacctcagcactgatgacatcaacaccagctcctccatcagctcttatgccaacacacctgcctcctctcgaaaaaacctggatgtgcagactgatgctgagaagcactcacaggtggagaggaattccctgtggtctggtgatgatgtcaagaaatcagacggaggctcagacagcggcataaaaatggagccaggttccaagtggaggcggaatccttctgatgtgtctgacgagtccgacaaaagcacgtcgggcaagaagaatcctgtcatctcccagacaggctcatggcggcgaggcatgacagctcaggtgggcatcaccatgccaaggacgaagccttcagccccggcaggcgcactgaagaccccaggaactggaaaaacagacgacgcaaaggtgtctgagaaaggaaggctttctcctaaagcctcccaggtgaagcgctccccatcagatgcaggccggagcagtggtgacgaatccaaaaagcccctccccagcagctctaggacacctactgccaatgccaacagctttgggttcaagaagcagagtggttccgccgccggcctggccatgatcacagccagcggggtgactgtcaccagcaggtcagccacactgggcaaaatcccaaagtcatctgcactcgtcagtcggtctgctggtcggaagtcaagtatggatggggctcagaatcaggatgacgggtatctagccctaagctcccggacaaaccttcagtaccggagtttgccgaggcccagtaagtccaacagccggaacggggctgggaacaggtctagcaccagcagcatagattccaacattagcagcaagtccgcaggcctgccagtgcccaaactgagggagccttccaaaacagccctaggcagctctctaccaggtctggtcaaccaaacagacaaggagaaaggcatctcatcagacaacgagagtgtggcttcctgtaactcggtgaaagtgaatccggcagcccagcctgtgtccagtccggctcagaccagtctccagcctggagccaagtacccagatgtggcctctcccacactccgcagactctttggtgggaagcctaccaagcaagtgcccatcgccacagctgaaaacatgaaaaattcggtggtcatctccaatcctcatgccaccatgactcagcaaggtaacctagactccccgtcaggcagtggcgtcctgagcagtgggagcagcagtcctctctacagcaagaatgtggacctcaaccagtctccgctagcctccagccccagctcagcccactcggccccttccaacagcctcacctggggcaccaacgccagcagctcctccgcagttagcaaggatggcctgggctttcagtctgtcagcagcctccacaccagctgtgagtccatcgacatctccctcagcagtggaggggtccccagccacaattcttccactggcctcatcgcctcctccaaggacgactccttgactccctttgtcagaactaacagtgtgaagaccacactgtcagaaagtgacccgcaccttgataggaacactttgcctaagaaaggactcaggtatactcccacctcccagcttcgcacgcaagaagatgcaaaagaatggttacggtcccattctgcaggaggccttcaggacaccgctgccaattcccccttttcctctggctccagcgtgacttctccctccggaacaagattcaacttttcccagcttgcgagtcccaccactgtcacccagatgagcttgtccaacccgaccatgctgaggactcacagcctctccaatgctgatgggcagtatgatccatacactgacagccgcttccggaatagctccatgtccctggatgagaagagcagaaccatgagccgttcaggctcattccgggatgggtttgaagaagttcatggatcctcactctccttggtttccagcacatcgtcagtttattctacaccagaagaaaaatgccagtcagagattcgcaagctgcggcgggaactggatgcctcccaggagaaagtttcagctttgaccacccagctgacagcaaatgctcaccttgtggcagcctttgaacagagtcttggtaacatgacaatcaggctccagagtctgaccatgacagctgagcagaaggactcagaactgaatgagttaagaaaaaccattgagctgctaaagaaacagaacgcagctgcccaggctgccattaatggagtaattaacacacctgagctcaactgcaaaggaaacggcactgcccagtctgcagacctccgcatccgcaggcagcactcctcagacagcgtctccagcatcaacagtgccaccagccactccagcgtgggcagcaacatagagagtgactcaaagaagaagaagcggaagaactggttacgcagctccttcaagcaagctttcgggaagaagaagtccccaaaatctgcgtcctctcattcagatattgaggagatgacggattcttctttgccttcctcaccaaagttaccgcacaatgggtccacaggttccaccccactgctgaggaattctcactccaactctctaatttcagaatgcatggatagtgaagctgagaccgtcatgcagctccgaaatgagttaagagacaaggagatgaagctgacggatatccgcttagaagctctcagttctgcccaccagctggaccagctccgggaggccatgaacaggatgcagagtgaaatagagaagctgaaagctgagaatgatcggctgaagtcagagtctcaaggcagtggctgcagccgggctccttcccaagtgtccatctctgcctccccgaggcagtccatgggcctctcccagcacagcttgaacctcactgagtcaaccagcctggacatgttgctggatgacactggtgaatgctcggctcggaaggaaggaggcaggcatgttaagatagttgtcagctttcaggaggaaatgaagtggaaggaggattccagaccacatctctttcttattggctgcattggagttagtggcaagacgaagtgggatgtgctcgatggggtggttagacggctgttcaaagaatacatcattcatgtcgacccagtgagtcagctagggctgaattcagacagcgttcttggctacagcattggagaaatcaagcgcagcaacacttccgaaacaccggagctgcttccttgtggctatctggttggagagaacacgaccatctcagtgactgtgaaagggctcgcagaaaacagcctggactcactggtgtttgagtccttgattcccaagcccatcctgcagcgctacgtctccctcctgatagagcaccgtcggatcattctctctggccccagcggcactgggaaaacctacctggccaaccggctgtctgagtatatagtgcttcgagagggacgggagttgacagacggggttatcgccacctttaacgtggaccataagtccagcaaggaattgcgccagtacctgtccaaccttgctgaccagtgcaacagtgagaacaatgctgtggacatgcccctcgtcatcatcctggacaacctacaccacgtgagctctctgggagagatcttcaatgggctgctcaactgcaagtaccacaaatgcccttacataattggcacaatgaaccaggctacctcttcgactcccaacctgcagcttcaccataacttcagatgggtgctttgtgccaaccacacggagcctgtgaagggtttccttggccgattcctgaggaggaagctcatggaaacagagatcagtgggcgggtgcgcaatatggagctggtaaaaatcattgactggattcccaaggtctggcatcacctcaaccgcttcctggaggctcacagttcctcggacgtcaccatcggcccccggctcttcctgtcatgccccatcgatgtggacggctcgagagtgtggttcaccgacttgtggaactattccattatcccctatctcctggaagccgtcagagaaggactccagctctatggaaggcgcgccccctgggaggatcctgccaagtgggtgatggacacatatccatgggcagccagcccacaacagcacgagtggcctcccctgctgcagttacggcctgaggatgtcggcttcgacggctactccatgcctcgggagggatcgacaagcaagcagatgccccccagtgatgctgaaggtgacccgctgatgaacatgctgatgaggctgcaggaggcagccaactactccagcccccagagctatgacagcgactccaacagcaacagccatcacgatgacatcttggactcctctttggagtccactctgtgacaggggcccggagcccagcgccctcctcttctcctcaccgcattccacctgcatcccccacatcaccctgaagatgacttcctgagccagcccccagccacagccttagagctgcgggaacaccgagaccccccgtccttcagcctcgacctgggtgcaggcatcccgggccagctgcctgcggaccgcttccttccacagcgagaactgcactaccttctgttgtactttaattattgttttgccttgttgctgtgacctccctaagacactgaagatacttctcgggaaaggatcatcgccgttgaaatgaaaagagagacagagagaaaaaaaaaaagagaacccacatgaagctctgaaaccaaacagcatcctgccatgagcttcccagagacagaagagactggagcaaagtcggaaacacagagaagcacggcttcccctcagcacagaccctccagactgggtctcagagccgtgccacccaccctcccacacagccggccacagggagaactggtgctaaccagggtgcttgctttggtcacgttcaacgcactacagagctacgacacagggaaaccttaggagcaaataaaccgtgctttcatgttttttaaatggtgctttccttacccgagaggtattttgcctgttccaatcaaaccaccccattcaggtccatcagcctctgattaatatccgtgagagtgagtgacggagtgagagtgtgagcgagtggatgtggctgtcagtgcagaacagcatgtgtctctttccttctgatatatgaatgaatcaggtttttttttttttttttctgcaaacactgtgtatagtgagacttgttctactttggagaacaggttaccttttgaaaatgaggttgagtttcttcctttctgatgcattgatttttgaagatttttttttcccccttcccctcttggtcagaatcaatcctttggtgaaagtaagaaccgcaggagttgagttttggtttggtcctgctcagttttggtttttagttgtccatcctcacagtcctacacactcgcctcctcctgctagggctgggggtatctgtgtcctttaaaatggatgaggacctggtcctcgacatgtgggtgagccatggaccttgccttcccttctcgtccttgagggtttagaacacacaccaacacctccagcgtccccgccccagcttccggtggggtgatgcggtcaccctgcaaaagacttgcactttcctcagaaccaacatgacgcagctcaataagggtgagggtcactccctcccagaagccccgtctggacgagccttgcctgacctcttcggtgctgaccttcccaaagtgatgccttactggttttgtactaactgtgttcattttacataagtgtcgtgcctgcctggggtttgttttttttgtcattgttttccccattgaaacaaacagggctaaaaagtcatctgttcattaggagaactcaagttgctgtgacttttctcatccaaaagactcatttgtgtggatgcgtgaccatgggaaaaagaaaaaaaaaaagatccattttttaggttcttttcggtctccagctgacaacccaactggacaatgatctgtctggtgcaggagaaggcaaaagtttctacaagtctacatgaccttgctgatacttgttctaatagaaacccagtctgctgtgtcttcaacatactggtattttcattacaaagtatggtaaatttttgagttgtttgtttctgttttgtaaagagaatccttattggacaccagtgaaggtgtctctgttttaatgatcagggtttttattccatcttttgcatttcttctatttctgaaggtttgtctcttggcatctttttttagtttcttaccataagagtttgacccgaaactgctcacttcacattggatgacaccatgttcttcctctttgaaaagaaaaggggaatgtgtcccactagtgaaaggaaaacttttcaacactatccctgctttagtctcagcaaactcagactattctgcttagccttcattagtcatctgggtgtgagtgtgtcttgttctgtttttctttttaataaaacttttaaaccatatatttagcctgtgaccaggggggccaaaccctaagatttctggtaaacctgaagggtggccctcctcagacaatttatctcccagcaatgaccctactacactcgcgtactgtgaatttgggaggaggtaaagttgacttctcctcgtgggcagttttccaatcaccttgtgagtagacacctgccaatattgtttgaaacctttttttaatatgacatcctctcttgtcattctcttctcccctttcccacagacttccctcctgggtccaggttcagaaccaagacttctgtacctagtgctgcctgattggtgaacattgacttcaagtagcatagcccttgtgtgactcacaactccgtgtccttcctaaagtttcgggaagcagggttgtctaatatgcacatttcttattttggtcatatttttactttagtgtcactcaccttttacaaagtgactttgtactcatttagggctctatcggaaatgcttccattttgccttttctacagttaggccaattttgaaatatataaattctatgcaacatttatgttgagttaccaatggaagccaaaagttctcttcccaaactgccaagaatgatacaggccataattgaaatgggaataccttttaagtttcattaggggtggggtgggagtgggacaggaacaagacttgcctagatctttgttgtatcttggggacttttactttgttgtttgatgcttaaacttcaaaattctctgtattcaaatttgattgtggcgaatctacttcaaaaaggaaaaataatccaactttgtggatattaaatggaaggtttgctgttttgatctagttgtttccagtggagcagttttatgaaatatgttctataagatgtacattttttcattgtaacatagaaattgtaaataattgattaaagtgctgcattttgatgaattttttctagccatttttaaagagaaaactaggaattgagtattttgtgtacggtatgtttccatcctccctccccttcctcctcccctcctctctctctcttcctacctatttaattttcatttgtcatgaggtttttggatttgccaatgatctgctggacatcatgccccatgtcatagagaataaagctgatgattgtaccagtcttaaattattcatgattcaataaaattgatgcttatttattc

SEQ ID NO: 42110 - DNA, 5084 bp, Artificial Sequence
  derived and/or modified sequence
aatcttttcaatcgaatgctttgccttcagacgtcaatggaatgagctaagaaatgttatagtcaatgatttttgcatcattaaaagtagcacttagggctggaaagactttctgcaatgtttctgtgcagtctgtgaggatttaaagtagtttttcattcttagattttcttcaatttgacccgctgttgcaaactcccctgggaccacatggagggcccttccattcagtgctttacgggccgcaatgtagtgaaatgctctggcctaggaaccttacaagctgggacgacagcagctccgtcagcagcggcatcagcgacaccatagacaacctcagcactgatgacatcaacaccagctcctccatcagctcttatgccaacacacctgcctcctctcgaaaaaacctggatgtgcagactgatgctgagaagcactcacaggtggagaggaattccctgtggtctggtgatgatgtcaagaaatcagacggaggctcagacagcggcataaaaatggagccaggttccaagtggaggcggaatccttctgatgtgtctgacgagtccgacaaaagcacgtcgggcaagaagaatcctgtcatctcccagacaggctcatggcggcgaggcatgacagctcaggtgggcatcaccatgccaaggacgaagccttcagccccggcaggcgcactgaagaccccaggaactggaaaaacagacgacgcaaaggtgtctgagaaaggaaggctttctcctaaagcctcccaggtgaagcgctccccatcagatgcaggccggagcagtggtgacgaatccaaaaagcccctccccagcagctctaggacacctactgccaatgccaacagctttgggttcaagaagcagagtggttccgccgccggcctggccatgatcacagccagcggggtgactgtcaccagcaggtcagccacactgggcaaaatcccaaagtcatctgcactcgtcagtcggtctgctggtcggaagtcaagtatggatggggctcagaatcaggatgacgggtatctagccctaagctcccggacaaaccttcagtaccggagtttgccgaggcccagtaagtccaacagccggaacggggctgggaacaggtctagcaccagcagcatagattccaacattagcagcaagtccgcaggcctgccagtgcccaaactgagggagccttccaaaacagccctaggcagctctctaccaggtctggtcaaccaaacagacaaggagaaaggcatctcatcagacaacgagagtgtggcttcctgtaactcggtgaaagtgaatccggcagcccagcctgtgtccagtccggctcagaccagtctccagcctggagccaagtacccagatgtggcctctcccacactccgcagactctttggtgggaagcctaccaagcaagtgcccatcgccacagctgaaaacatgaaaaattcggtggtcatctccaatcctcatgccaccatgactcagcaaggtaacctagactccccgtcaggcagtggcgtcctgagcagtgggagcagcagtcctctctacagcaagaatgtggacctcaaccagtctccgctagcctccagccccagctcagcccactcggccccttccaacagcctcacctggggcaccaacgccagcagctcctccgcagttagcaaggatggcctgggctttcagtctgtcagcagcctccacaccagctgtgagtccatcgacatctccctcagcagtggaggggtccccagccacaattcttccactggcctcatcgcctcctccaaggacgactccttgactccctttgtcagaactaacagtgtgaagaccacactgtcagaaagtgacccgcaccttgataggaacactttgcctaagaaaggactcaggtatactcccacctcccagcttcgcacgcaagaagatgcaaaagaatggttacggtcccattctgcaggaggccttcaggacaccgctgccaattcccccttttcctctggctccagcgtgacttctccctccggaacaagattcaacttttcccagcttgcgagtcccaccactgtcacccagatgagcttgtccaacccgaccatgctgaggactcacagcctctccaatgctgatgggcagtatgatccatacactgacagccgcttccggaatagctccatgtccctggatgagaagagcagaaccatgagccgttcaggctcattccgggatgggtttgaagaagttcatggatcctcactctccttggtttccagcacatcgtcagtttattctacaccagaagaaaaatgccagtcagagattcgcaagctgcggcgggaactggatgcctcccaggagaaagtttcagctttgaccacccagctgacagcaaatgctcaccttgtggcagcctttgaacagagtcttggtaacatgacaatcaggctccagagtctgaccatgacagctgagcagaaggactcagaactgaatgagttaagaaaaaccattgagctgctaaagaaacagaacgcagctgcccaggctgccattaatggagtaattaacacacctgagctcaactgcaaaggaaacggcactgcccagtctgcagacctccgcatccgcaggcagcactcctcagacagcgtctccagcatcaacagtgccaccagccactccagcgtgggcagcaacatagagagtgactcaaagaagaagaagcggaagaactggttacgcagctccttcaagcaagctttcgggaagaagaagtccccaaaatctgcgtcctctcattcagatattgaggagatgacggattcttctttgccttcctcaccaaagttaccgcacaatgggtccacaggttccaccccactgctgaggaattctcactccaactctctaatttcagaatgcatggatagtgaagctgagaccgtcatgcagctccgaaatgagttaagagacaaggagatgaagctgacggatatccgcttagaagctctcagttctgcccaccagctggaccagctccgggaggccatgaacaggatgcagagtgaaatagagaagctgaaagctgagaatgatcggctgaagtcagagtctcaaggcagtggctgcagccgggctccttcccaagtgtccatctctgcctccccgaggcagtccatgggcctctcccagcacagcttgaacctcactgagtcaaccagcctggacatgttgctggatgacactggtgaatgctcggctcggaaggaaggaggcaggcatgttaagatagttgtcagctttcaggaggaaatgaagtggaaggaggattccagaccacatctctttcttattggctgcattggagttagtggcaagacgaagtgggatgtgctcgatggggtggttagacggctgttcaaagaatacatcattcatgtcgacccagtgagtcagctagggctgaattcagacagcgttcttggctacagcattggagaaatcaagcgcagcaacacttccgaaacaccggagctgcttccttgtggctatctggttggagagaacacgaccatctcagtgactgtgaaagggctcgcagaaaacagcctggactcactggtgtttgagtccttgattcccaagcccatcctgcagcgctacgtctccctcctgatagagcaccgtcggatcattctctctggccccagcggcactgggaaaacctacctggccaaccggctgtctgagtatatagtgcttcgagagggacgggagttgacagacggggttatcgccacctttaacgtggaccataagtccagcaaggaattgcgccagtacctgtccaaccttgctgaccagtgcaacagtgagaacaatgctgtggacatgcccctcgtcatcatcctggacaacctacaccacgtgagctctctgggagagatcttcaatgggctgctcaactgcaagtaccacaaatgcccttacataattggcacaatgaaccaggctacctcttcgactcccaacctgcagcttcaccataacttcagatgggtgctttgtgccaaccacacggagcctgtgaagggtttccttggccgattcctgaggaggaagctcatggaaacagagatcagtgggcgggtgcgcaatatggagctggtaaaaatcattgactggattcccaaggtctggcatcacctcaaccgcttcctggaggctcacagttcctcggacgtcaccatcggcccccggctcttcctgtcatgccccatcgatgtggacggctcgagagtgtggttcaccgacttgtggaactattccattatcccctatctcctggaagccgtcagagaaggactccagctctatggaaggcgcgccccctgggaggatcctgccaagtgggtgatggacacatatccatgggcagccagcccacaacagcacgagtggcctcccctgctgcagttacggcctgaggatgtcggcttcgacggctactccatgcctcgggagggatcgacaagcaagcagatgccccccagtgatgctgaaggtgacccgctgatgaacatgctgatgaggctgcaggaggcagccaactactccagcccccagagctatgacagcgactccaacagcaacagccatcacgatgacatcttggactcctctttggagtccactctgtgacaggggcccggagcccagcgccctcctcttctcctcaccgcattccacctgcatcccccacatcaccctgaagatgacttcctgagccagcccccagccacagccttagagctgcgggaacaccgagaccccccgtccttcagcctcgacctgggtgcaggcatcccgggccagctgcctgcggaccgcttccttccacagcgagaactgcactaccttctgttgtactttaattattgttttgccttgttgctgtgacctccctaagacactgaagatacttctcgggaaaggatcatcgccgttgaaatgaaaagagagacagagagaaaaaaaaaaagagaa

SEQ ID NO: 42111 - DNA, 4482 bp, Artificial Sequence
  derived and/or modified sequence
atgctgtggcctcgcaatctgacttcctgggacgattccagctctgtgagcagtggcatcagtgatactatcgataacctttctaccgatgatatcaacacatcttcctccattagcagctacgccaacacacccgctagctcacgcaaaaaccttgacgtgcagaccgatgcagagaaacactctcaggtggagagaaattcattgtggtcaggggacgacgtgaagaagtcagacgggggatctgactctggaattaaaatggagcccggttccaaatggcgacgcaacccatctgatgtgtctgatgagtccgacaaatctacaagtgggaagaagaatcctgtcatctctcaaactggcagctggcgcaggggaatgacagcgcaggttggtatcacgatgccgcgaaccaagccttcagcgcctgccggtgcgctcaaaacacctggcactgggaagactgacgatgctaaggtgtcagagaagggcagactgtccccaaaggccagccaggtgaagaggagtccctccgatgccggacgaagctccggcgacgagtccaaaaagcctctgccttcatcctcccggacccctactgccaatgcaaatagctttggattcaagaagcagagcggtagcgccgcaggactagcaatgatcaccgcatccggagtgactgtcacaagcagatctgcaacccttggcaagatccccaagtcgtctgctttagtgtcacgctctgcgggtcggaagtcgtcaatggatggcgcacagaatcaggatgacgggtatctggcactgtcctcccggaccaacctccagtatcgttctctgccaagaccatctaagtcaaactctcggaacggcgcagggaataggagctccacctcctccattgactctaatatttctagcaagagcgccggtttgccagtacccaaactcagagaaccttccaaaactgctctgggatccagcttgcctgggttggtcaatcaaacagacaaagaaaagggcatcagctctgacaatgagagcgtcgcatcctgcaactccgtgaaagtgaatccagccgctcagcctgtttccagccccgcacagacaagccttcaaccgggagccaagtaccccgatgttgcctcaccaacccttcggaggctcttcggagggaagcccaccaagcaagttcctatcgcgaccgcggagaacatgaagaattcggtggtgatttcgaacccccatgctactatgacacagcaaggcaatctcgatagccccagcgggtcaggcgtcctgagctcaggttctagcagtcccctgtattccaaaaacgtggacctcaaccaaagcccgcttgcgagctcgccctcctccgcacatagtgcaccctctaacagtctgacatggggcaccaatgcctcctcatcatctgcagtgtccaaagatggactggggtttcagtccgtatccagcttacacacctcttgtgaatcaatcgacatctccctgtcatctggcggagtgcctagtcacaacagcagcaccggtctcatcgctagtagcaaagatgattcactcacgccattcgttcgtaccaattctgtgaaaacaaccttgagcgaaagcgaccctcacttagaccggaacactctgccaaaaaagggccttcggtacaccccaactagtcaactccgcacacaggaagatgcgaaggaatggcttcgttctcacagcgcaggcggtctccaggataccgctgccaactcaccattctccagcggttcttctgttaccagccccagtgggacacgattcaatttttcacagctggcatcaccaacaactgtcacacagatgagcctatccaatcctaccatgctgcggacacactccctgtccaacgctgacgggcagtatgacccgtataccgatagccggtttaggaacagttctatgtccctcgacgagaagtcaaggacaatgtccagatctggaagttttcgtgacgggtttgaagaggtgcacggcagctccctgtctctggtctcttccaccagctccgtgtacagtactcccgaagagaagtgccagtcagagatcaggaaacttagacgagagctggacgcatcacaagaaaaggtctcagcacttaccacccagctaaccgccaatgcccatctggtagccgctttcgagcagagcctcggcaacatgactatcagattgcagtctctgacaatgactgcggagcagaaagactccgagttaaatgagctgagaaagactattgagctcctgaagaagcagaatgccgcagcccaggccgctattaacggtgttataaataccccagaactcaactgcaaggggaatgggacagctcagtcagctgatctccggattcgaagacagcactcatcagactcagtgtcctccattaattctgcaacctcgcatagctctgtgggcagcaatatagaaagcgactcgaagaaaaagaaaagaaaaaattggttgagatcttccttcaagcaggctttcggcaaaaagaagtcgcctaagtccgcctctagccactccgatattgaggaaatgaccgacagcagcctaccctcatctccgaagctgccacacaacggcagcacaggttctaccccacttctgcgaaactctcatagcaattctcttattagtgagtgtatggacagcgaagcggagaccgtgatgcaattaagaaatgaactgcgcgacaaggaaatgaagctgaccgatatccgcctggaggcgctaagctctgcccatcagctggaccagttgagggaggcgatgaaccgaatgcaatcagagatcgagaaattgaaagccgagaatgacaggctgaagtcagagtctcagggctctgggtgcagccgagccccttctcaggtttcaatctccgcttctcctaggcaatcaatggggttgtcccagcacagtctgaacttgaccgaatctacctccctggacatgctcctagacgacaccggggagtgtagtgctagaaaggaagggggacgccatgtgaaaattgtggtgtcttttcaggaagagatgaagtggaaagaagactcccgaccccacctgttccttatcggttgtattggtgttagtggaaagacgaagtgggacgtgctagatggtgttgtcaggagactgttcaaggagtatattatccacgtggatcctgtctcccagctcggcttgaattctgatagtgtgctggggtatagtattggggaaattaagcgaagtaacacgtcagaaaccccggagctcctcccctgtggctacctcgttggggaaaataccactattagtgtgaccgtcaaaggccttgccgagaatagtctggattcattagtctttgagagtctaataccaaaaccaatactccaaagatacgtgtctctcctgatcgaacaccggagaatcatattaagcggcccaagtgggacaggtaagacatatttggcgaaccggctctcagaatatatcgttctgcgcgaaggcagggaactcacggatggcgtcatcgcaacatttaacgtcgaccataaatcatctaaagaacttcgccagtatctgtctaaccttgccgatcagtgtaactctgagaacaatgcggtggatatgcctctggttattatcctcgataaccttcaccacgtatctagtttgggcgagatatttaacgggctgctgaattgcaaataccataaatgcccttacattattgggaccatgaaccaggccacctcatctacgcctaatctccagttacatcacaacttccgctgggtcctgtgcgccaaccataccgaacccgtcaaaggtttcctgggtagatttctgcgcaggaaactcatggaaacagaaatcagcggcagggttcgaaacatggagttagttaagattatcgactggattcccaaagtctggcatcatcttaatcggtttctggaagcccattcttcatcagatgtgaccattggaccaaggctgttccttagctgtcctatcgatgttgatgggagcagggtatggtttaccgatctctggaattactctattattccttacctgctcgaagcggtaagggaaggtcttcagttatatgggagacgggctccctgggaagatccagcaaagtgggtgatggacacatacccttgggcagcgagtccgcagcagcatgaatggccgcctctgttgcaattgcgcccagaggatgttggttttgatggatactccatgccaagggaagggtcaactagcaagcagatgcctcccagtgacgccgagggagatcccctgatgaacatgctgatgcgccttcaggaagctgctaattactcttcccctcagtcttatgattccgattctaatagcaattctcatcatgatgacattctcgatagtagtcttgagtccaccctgtag

SEQ ID NO: 42112 - DNA, 4482 bp, Artificial Sequence
  derived and/or modified sequence
atgttatggcctcgaaatcttacttcgtgggatgacagtagctcagtgagcagcggcattagtgataccattgacaacctttctaccgacgacataaacacgagttcctctatcagttcttatgccaatacaccagcctcttcaagaaaaaatctagatgttcagactgatgccgaaaaacactcccaggtcgaaagaaattcgttgtggagcggtgacgacgttaagaagtccgacggaggcagcgactctggcataaagatggagcccggatcaaaatggaggcggaatccctcagatgtgagtgacgagtcggataagtcaacatctggcaaaaagaaccccgttatatcccagacgggctcctggagacgcggaatgaccgcacaagtgggtatcactatgccgcgaaccaagcctagcgcacccgctggggcactcaaaactcctgggaccgggaagactgacgatgccaaggtgagcgaaaaggggaggcttagtcccaaggctagccaggtgaagaggtctccttctgacgcaggcagaagtagtggcgatgagtctaagaagccactgccctcaagctcccgtacacctaccgccaacgccaacagcttcggcttcaaaaaacagtccggctcagcggcaggacttgcaatgattactgcttcgggagtaactgtgacctcccgaagcgccacactaggcaagattccaaaaagcagtgctttggtctccagaagcgccggtcgcaaatcatccatggacggggcacagaaccaggacgacggataccttgccctatcaagcagaacaaatctacagtatcgctcactgccaaggccgagcaaaagtaatagtcgcaatggggctggaaacaggagctcgacaagctcaattgactccaatatcagtagcaaaagtgccggacttccagttccaaagctgcgtgaaccatcgaaaacagctcttggctcttctctgccaggactggtgaaccagacagacaaagagaaaggtatatctagcgataacgaatctgtagcctcttgcaactctgtcaaagttaatccagctgcccaaccagtgagttcaccagcgcagacatcactgcagccaggagcgaaatatcccgatgtagcctcgccaacgctgaggcgactgtttggcggtaagccaacaaagcaagtgccaattgccacagccgaaaacatgaagaactccgtggttatcagcaatccccacgccactatgacgcagcagggcaatctggatagtccttctggaagcggcgttttgtctagcgggtcatcgagcccgttatatagtaagaatgtcgatcttaatcagtcaccactggcctcctcacctagcagcgcacactccgccccaagtaacagtctgacttggggaaccaatgcctcaagctcgtccgcagtgagtaaagatggattgggttttcagtctgtatcgagccttcacactagctgtgagagcatcgacatatccctgtcaagtggaggcgttccatctcacaattcctccaccggcttaatcgcttcttccaaagatgatagtctcactccttttgtgcgaaccaactctgtgaagacaaccctgtctgaatccgatcctcatctggaccggaacactctacctaaaaaggggctgcgctatacccctacaagtcagctgcgcacacaggaggacgcgaaagagtggctgcgctcacactccgctgggggattgcaagataccgcggcaaattccccattttcctcaggttctagtgttacaagtccttctggcacccgtttcaacttttctcagctggcttccccaacgaccgttacacagatgagcttatccaatcccacaatgctgcgcacacatagcctttcgaatgctgatgggcagtacgacccctatactgacagccggtttagaaattcttctatgtcactggatgagaagtcacggaccatgagccggtccggatcttttcgggacggtttcgaggaggtgcacggctcttctctttcgctggtgagttcaacctcctctgtttacagcacccccgaggaaaagtgtcagtcagagatcaggaagttgagaagagaactggacgccagccaggaaaaagtttcagccctgaccacacagttgacagcaaacgcacatctggtcgccgcttttgagcagtcgctcggaaatatgacaataaggctgcagagcttgaccatgaccgcagagcagaaggactccgagctgaacgaacttcgcaaaacgattgagctgttgaaaaaacagaatgccgctgcccaggccgctatcaatggagtgattaacacgcccgagctgaattgcaagggaaacggtacagcacagtccgctgatctgaggataaggagacagcactctagcgatagcgtgagttctattaacagtgcgacctcacatagcagcgtgggtagcaatattgaatccgactccaagaagaagaaaagaaaaaattggctgcgatcatcctttaaacaagccttcggtaagaaaaagtccccaaagtcagcctcttcccacagcgacatcgaagagatgaccgacagttccctaccatcgtcgccgaagctgccacacaacgggagcaccgggtctacacctctgctgagaaattcccacagcaactccttaatatctgagtgcatggatagtgaagccgagaccgtaatgcaattacggaacgagctccgggacaaggagatgaagctcaccgacattaggttggaagccctgtcgagtgcgcatcagcttgaccagctgagagaggctatgaaccggatgcagtcagagatagaaaaacttaaggccgagaatgacagactcaagtctgagagccagggctcaggatgtagtcgggctccatcccaggtctctatctctgccagccctaggcaatctatggggctctcacagcacagtttgaatctcaccgagtccacatctttggacatgctgctggacgacacgggcgagtgttcggcgaggaaggagggtgggagacatgtgaagattgtcgtctcgttccaggaggaaatgaaatggaaagaggacagtaggccccatcttttccttatcggctgcattggtgtcagcggaaaaaccaaatgggatgtcctcgacggtgtggtacggagattgttcaaagaatacattatccacgtagaccccgtttcccagctgggcttaaactctgactcggtgcttggctactccatcggcgaaatcaaacgcagtaatacgagtgagaccccggagctgcttccctgtggatacctcgtgggcgaaaacactaccatctcggttaccgtcaagggcctcgccgagaactccctcgattccctggtttttgagagcttgatccctaaacccatcctgcaaagatatgtaagtctgttgattgagcaccggcgaattattctcagcgggccttctggcacaggaaaaacatacctggccaaccggctttctgaatatatcgtgctgagggagggccgagaattaaccgatggagtgatagccaccttcaacgtcgaccataaatctagcaaggagctacggcagtacctctccaacctggcagatcagtgtaattctgaaaacaacgcagtggatatgcctctggtcatcattctggataacttacaccacgtgtcttccctcggggagatcttcaacggactcttgaattgtaaataccataaatgtccctatatcatagggaccatgaaccaggccactagtagtacgccaaatctgcaactccatcataatttcagatgggtgctgtgtgctaaccacaccgaacccgtcaagggtttcttgggccgatttctgaggcggaaattgatggagacggagatctctggccgagttaggaacatggaactggtgaaaatcatcgattggatccccaaggtatggcaccatttaaatcgcttcctggaagcccactcttcatcggatgtgaccattggaccacgattgtttctttcttgccccatagacgtcgacggcagccgcgtgtggtttaccgatttgtggaactacagcattataccgtacctgctcgaagctgtgagagagggtctgcagttgtacggacgtcgtgcgccttgggaggatcctgccaagtgggttatggatacatacccttgggcagcctcgccacagcagcacgagtggcccccattactgcaattgcgcccagaagacgtcggtttcgatggatacagtatgccaagggaaggttccacttccaagcagatgcctccttcggacgccgagggagaccccttaatgaacatgcttatgcgtctgcaggaagctgcaaactactcctctccccaatcttatgactcggattcaaacagcaattcccaccatgatgatattctcgatagctccctcgagtctacactgtag

SEQ ID NO: 42113 - DNA, 4482 bp, Artificial Sequence
  derived and/or modified sequence
atgctgtggcccagaaacctgaccagctgggacgacagcagcagcgtgagcagcggcatcagcgacaccatcgacaacctgagcaccgacgacatcaacaccagcagcagcatcagcagctacgccaacacccccgccagcagcagaaagaacctggacgtgcagaccgacgccgagaagcacagccaggtggagagaaacagcctgtggagcggcgacgacgtgaagaagagcgacggcggcagcgacagcggcatcaagatggagcccggcagcaagtggagaagaaaccccagcgacgtgagcgacgagagcgacaagagcaccagcggcaagaagaaccccgtgatcagccagaccggcagctggagaagaggcatgaccgcccaggtgggcatcaccatgcccagaaccaagcccagcgcccccgccggcgccctgaagacccccggcaccggcaagaccgacgacgccaaggtgagcgagaagggcagactgagccccaaggccagccaggtgaagagaagccccagcgacgccggcagaagcagcggcgacgagagcaagaagcccctgcccagcagcagcagaacccccaccgccaacgccaacagcttcggcttcaagaagcagagcggcagcgccgccggcctggccatgatcaccgccagcggcgtgaccgtgaccagcagaagcgccaccctgggcaagatccccaagagcagcgccctggtgagcagaagcgccggcagaaagagcagcatggacggcgcccagaaccaggacgacggctacctggccctgagcagcagaaccaacctgcagtacagaagcctgcccagacccagcaagagcaacagcagaaacggcgccggcaacagaagcagcaccagcagcatcgacagcaacatcagcagcaagagcgccggcctgcccgtgcccaagctgagagagcccagcaagaccgccctgggcagcagcctgcccggcctggtgaaccagaccgacaaggagaagggcatcagcagcgacaacgagagcgtggccagctgcaacagcgtgaaggtgaaccccgccgcccagcccgtgagcagccccgcccagaccagcctgcagcccggcgccaagtaccccgacgtggccagccccaccctgagaagactgttcggcggcaagcccaccaagcaggtgcccatcgccaccgccgagaacatgaagaacagcgtggtgatcagcaacccccacgccaccatgacccagcagggcaacctggacagccccagcggcagcggcgtgctgagcagcggcagcagcagccccctgtacagcaagaacgtggacctgaaccagagccccctggccagcagccccagcagcgcccacagcgcccccagcaacagcctgacctggggcaccaacgccagcagcagcagcgccgtgagcaaggacggcctgggcttccagagcgtgagcagcctgcacaccagctgcgagagcatcgacatcagcctgagcagcggcggcgtgcccagccacaacagcagcaccggcctgatcgccagcagcaaggacgacagcctgacccccttcgtgagaaccaacagcgtgaagaccaccctgagcgagagcgacccccacctggacagaaacaccctgcccaagaagggcctgagatacacccccaccagccagctgagaacccaggaggacgccaaggagtggctgagaagccacagcgccggcggcctgcaggacaccgccgccaacagccccttcagcagcggcagcagcgtgaccagccccagcggcaccagattcaacttcagccagctggccagccccaccaccgtgacccagatgagcctgagcaaccccaccatgctgagaacccacagcctgagcaacgccgacggccagtacgacccctacaccgacagcagattcagaaacagcagcatgagcctggacgagaagagcagaaccatgagcagaagcggcagcttcagagacggcttcgaggaggtgcacggcagcagcctgagcctggtgagcagcaccagcagcgtgtacagcacccccgaggagaagtgccagagcgagatcagaaagctgagaagagagctggacgccagccaggagaaggtgagcgccctgaccacccagctgaccgccaacgcccacctggtggccgccttcgagcagagcctgggcaacatgaccatcagactgcagagcctgaccatgaccgccgagcagaaggacagcgagctgaacgagctgagaaagaccatcgagctgctgaagaagcagaacgccgccgcccaggccgccatcaacggcgtgatcaacacccccgagctgaactgcaagggcaacggcaccgcccagagcgccgacctgagaatcagaagacagcacagcagcgacagcgtgagcagcatcaacagcgccaccagccacagcagcgtgggcagcaacatcgagagcgacagcaagaagaagaagagaaagaactggctgagaagcagcttcaagcaggccttcggcaagaagaagagccccaagagcgccagcagccacagcgacatcgaggagatgaccgacagcagcctgcccagcagccccaagctgccccacaacggcagcaccggcagcacccccctgctgagaaacagccacagcaacagcctgatcagcgagtgcatggacagcgaggccgagaccgtgatgcagctgagaaacgagctgagagacaaggagatgaagctgaccgacatcagactggaggccctgagcagcgcccaccagctggaccagctgagagaggccatgaacagaatgcagagcgagatcgagaagctgaaggccgagaacgacagactgaagagcgagagccagggcagcggctgcagcagagcccccagccaggtgagcatcagcgccagccccagacagagcatgggcctgagccagcacagcctgaacctgaccgagagcaccagcctggacatgctgctggacgacaccggcgagtgcagcgccagaaaggagggcggcagacacgtgaagatcgtggtgagcttccaggaggagatgaagtggaaggaggacagcagaccccacctgttcctgatcggctgcatcggcgtgagcggcaagaccaagtgggacgtgctggacggcgtggtgagaagactgttcaaggagtacatcatccacgtggaccccgtgagccagctgggcctgaacagcgacagcgtgctgggctacagcatcggcgagatcaagagaagcaacaccagcgagacccccgagctgctgccctgcggctacctggtgggcgagaacaccaccatcagcgtgaccgtgaagggcctggccgagaacagcctggacagcctggtgttcgagagcctgatccccaagcccatcctgcagagatacgtgagcctgctgatcgagcacagaagaatcatcctgagcggccccagcggcaccggcaagacctacctggccaacagactgagcgagtacatcgtgctgagagagggcagagagctgaccgacggcgtgatcgccaccttcaacgtggaccacaagagcagcaaggagctgagacagtacctgagcaacctggccgaccagtgcaacagcgagaacaacgccgtggacatgcccctggtgatcatcctggacaacctgcaccacgtgagcagcctgggcgagatcttcaacggcctgctgaactgcaagtaccacaagtgcccctacatcatcggcaccatgaaccaggccaccagcagcacccccaacctgcagctgcaccacaacttcagatgggtgctgtgcgccaaccacaccgagcccgtgaagggcttcctgggcagattcctgagaagaaagctgatggagaccgagatcagcggcagagtgagaaacatggagctggtgaagatcatcgactggatccccaaggtgtggcaccacctgaacagattcctggaggcccacagcagcagcgacgtgaccatcggccccagactgttcctgagctgccccatcgacgtggacggcagcagagtgtggttcaccgacctgtggaactacagcatcatcccctacctgctggaggccgtgagagagggcctgcagctgtacggcagaagagccccctgggaggaccccgccaagtgggtgatggacacctacccctgggccgccagcccccagcagcacgagtggccccccctgctgcagctgagacccgaggacgtgggcttcgacggctacagcatgcccagagagggcagcaccagcaagcagatgccccccagcgacgccgagggcgaccccctgatgaacatgctgatgagactgcaggaggccgccaactacagcagcccccagagctacgacagcgacagcaacagcaacagccaccacgacgacatcctggacagcagcctggagagcaccctgtag

SEQ ID NO: 42114 - DNA, 1332 bp, Artificial Sequence
  derived and/or modified sequence
atgttgacaaatggtaaggagcaggtgattaagtcatgcgtctcattgcctgagcttaatgcccaggtgttttgccatagcagcaacaacgtcactaaaacagagtgttgcttcacagacttctgcaataacatcacattgcatctgcccaccgccagccccaatgcccccaagctcggccctatggagctggctatcattataactgtgccagtatgtttgttgtccatcgcagctatgctgactgtgtgggcatgccaagggcgccagtgctcttacaggaaaaagaagcgccccaacgtggaggagccattgtccgaatgtaacctcgtcaatgccggtaaaaccctgaaagatctcatttatgatgtgaccgcctctggtagtggatctggtctccccctcctggtccagcggacaattgctcggacaattgttctccaagagatagtcgggaaaggaagattcggggaagtctggcacggccggtggtgcggagaagacgtggctgtcaagatcttcagttctcgcgatgagcggtcttggttccgcgaggctgagatctaccaaactgtcatgctgagacacgagaacatactgggctttatcgcggcggataataaagacaacgggacttggacgcagttgtggcttgtcagcgaataccatgagcagggctctctttacgactacctaaacaggaatatcgttacagtcgctggcatgatcaaacttgcactcagtatcgcgagcggcctggcacacctgcacatggagattgtgggtacccagggaaaacctgccatcgctcacagagacatcaagtcaaagaatatcctggtcaaaaagtgtgaaacatgcgcaatcgcagatctcggcctggccgtgaaacacgacagcattcttaacactattgacattcctcagaatcccaaagtcggaacaaaaaggtacatggcccccgagatgctggatgataccatgaatgtgaacatattcgagagttttaagagggctgatatctattcggtgggcctggtgtactgggagatagcccgcagatgctcggtaggaggtatcgtggaagagtatcagctgccttactatgatatggtcccgtccgatccttcgatcgaggaaatgcgcaaggttgtgtgtgaccaaaagtttagaccttccatccctaaccagtggcaatcatgcgaagcactgcgagtaatgggacgtattatgcgggaatgctggtatgctaacggggcagctaggctcactgcgctccgaatcaagaagactattagtcagctgtgtgtgaaggaggactgcaaagcttag

SEQ ID NO: 42115 - DNA, 1332 bp, Artificial Sequence
  derived and/or modified sequence
atgctgaccaacgggaaggagcaggtgatcaagagctgtgtgtccctgcctgagctgaatgcccaggtgttctgccacagcagcaacaacgtgaccaagacagagtgctgcttcacagacttctgcaacaacatcaccctgcacctgcccacagccagccccaatgcccccaagctgggccccatggagctggccatcatcatcaccgtgcctgtgtgcctgctgagcattgctgccatgctgactgtgtgggcctgccagggccggcagtgcagctacaggaagaagaagaggcccaacgtggaggagcccctgtctgagtgcaacctggtgaatgccggcaagaccctgaaggacctgatctatgatgtgacagccagcggcagcggcagcggcctgcccctgctggtgcagaggaccatcgcccggaccatcgtgctgcaggagatcgtgggcaagggccgctttggagaggtgtggcacggccgctggtgtggagaagatgtggccgtgaagatcttcagcagcagagatgagaggtcctggttccgggaggccgagatctaccagacagtgatgctgcggcatgagaacatcctgggcttcatcgctgctgacaacaaggacaatggcacctggacccagctgtggctggtgtctgagtaccacgagcagggcagcctgtatgactacctgaacagaaacatcgtgacagtggccggcatgatcaagctggccctgagcatcgccagcggcctggcccacctgcacatggagatcgtgggcacccagggcaagccagccatcgcccaccgggacatcaagagcaagaacatcctggtgaagaagtgtgagacctgtgccatcgctgacctgggcctggccgtgaagcatgacagcatcctgaacaccatcgacatcccccagaaccccaaggtgggcaccaagcgctacatggcccctgagatgctggatgacaccatgaatgtgaacatctttgagagcttcaagagagctgacatctacagcgtgggcctggtgtactgggagatcgcccggcgctgcagcgtgggcggcatcgtggaggagtaccagctgccctactatgacatggtgcccagcgaccccagcattgaggagatgaggaaggtggtgtgtgaccagaagttccggcccagcatccccaaccagtggcagagctgtgaggccctgcgggtgatgggccgcatcatgagggagtgctggtacgccaacggggccgcccggctgacagccctgcgcatcaagaagaccatcagccagctgtgtgtgaaggaggactgcaaggcctag

SEQ ID NO: 42116 - DNA, 1332 bp, Artificial Sequence
  derived and/or modified sequence
atgctgaccaacggcaaggagcaggtgatcaagagctgcgtgagcctcccggagttgaacgcacaggtattctgccactcatcaaataacgttacaaagaccgaatgctgcttcacagatttttgcaataatatcaccctgcatctcccaacagcctcccctaatgcccctaagctgggaccgatggagctggctattattatcactgtccccgtctgtcttctctcaatcgccgccatgttgacagtgtgggcctgtcagggccggcagtgcagctacagaaagaagaaacgccccaatgtggaggaacccctgagcgagtgtaacctggtgaacgctggaaaaactctgaaggatctgatctatgacgtgaccgcgagtggttctggatctggcctccccctgttggtccagcgtactatcgcccggactatagtgctgcaggagatcgtgggcaaggggagattcggcgaggtctggcacggcagatggtgcggagaagatgtcgccgtgaaaatttttagttcccgtgacgaacggtcttggtttagggaagcggagatttaccaaactgtaatgctgagacacgagaatatactgggcttcatcgcagctgacaacaaagataacgggacatggacccagctgtggctcgtcagtgaatatcacgagcagggttccctgtacgactacctcaatcggaatattgtgactgtggctggcatgatcaaactcgctttgagcatcgcaagcgggttggctcacttgcacatggagatagtcggaactcagggtaagcctgcaattgcccacagagatattaaatctaagaatatcctggtgaagaagtgcgaaacatgcgctattgccgatctcggccttgctgtaaagcacgacagcattcttaatacgattgatattccacaaaaccctaaagtaggcacgaagcggtacatggctcctgaaatgcttgacgacactatgaacgtgaatattttcgaatctttcaaaagggccgacatttattccgtgggcctggtgtactgggagatagcccgaaggtgcagcgtggggggcatcgtcgaagagtaccagctgccctactatgacatggtgccttctgatcccagcatagaggagatgcgtaaggtcgtctgcgatcagaaatttaggccctctataccaaatcagtggcagagctgtgaagccctgagagtgatggggcgtatcatgcgcgaatgttggtacgctaacggtgctgcgcgtcttacagctttgcggattaaaaaaacgatcagccagctgtgtgtcaaagaagactgtaaagcttag

SEQ ID NO: 42117 - DNA, 1332 bp, Artificial Sequence
  derived and/or modified sequence
atgctgacgaacggaaaggagcaagtgatcaaaagctgtgtgtctttgcctgaattgaatgcgcaagtgttctgccattccagtaataatgtgaccaagacagaatgctgctttaccgacttctgcaataacatcacactccacttgcctacagccagtccaaatgctccaaaactcggacctatggagctcgcgattatcatcactgtgcctgtttgcctgctgtcaattgccgcaatgctgacagtctgggcatgccaaggcaggcaatgtagctatcgtaaaaaaaagaggccaaacgtggaagagccacttagtgagtgcaatctggtgaacgcaggcaaaacactcaaggacctgatttatgacgtcacagcatctggatccggctctggactgccccttctggtgcagaggactattgccagaactatagtgttgcaggagatcgtgggaaagggtcgcttcggcgaggtgtggcacggcagatggtgcggcgaggatgttgcagtgaagatattttcttcccgggacgagagatcttggttccgagaagccgaaatctatcagaccgtaatgctccgacacgagaacatcctgggttttatcgccgcagacaataaagataatggtacctggacccaactgtggctagtttctgaatatcatgagcaaggcagcctgtacgattacttaaatcggaatatcgtgaccgtggcgggaatgatcaaactggccttgagtattgcctctgggctagcccatctccatatggagatcgtggggacccagggcaagcccgctattgcccatcgggacatcaaatctaaaaacattctggtgaaaaaatgcgagacttgcgcaattgccgaccttgggttagcagtgaagcatgacagcatcctgaatacaatcgacatccctcagaacccgaaggtcggaaccaagcgatatatggccccagagatgttagatgataccatgaacgttaacatcttcgagtcattcaagcgggctgatatctactctgtgggcctggtgtactgggagatcgccaggcgctgttctgttgggggtatcgtggaggaatatcagctgccctactacgatatggtcccctctgaccctagcatcgaagagatgagaaaggtggtgtgtgaccagaagtttaggccctcaatccctaatcaatggcagtcatgcgaggcccttcgagtcatgggacgtattatgagggagtgctggtatgcaaatggagcagcacgtcttaccgcgcttcgaattaagaaaactatcagccagctctgcgtaaaggaagactgtaaagcatag

SEQ ID NO: 42118 - DNA, 1332 bp, Artificial Sequence
  derived and/or modified sequence
atgctgaccaacggcaaggagcaggtgatcaagagctgcgtgagcctgcccgagctgaacgcccaggtgttctgccacagcagcaacaacgtgaccaagaccgagtgctgcttcaccgacttctgcaacaacatcaccctgcacctgcccaccgccagccccaacgcccccaagctgggccccatggagctggccatcatcatcaccgtgcccgtgtgcctgctgagcatcgccgccatgctgaccgtgtgggcctgccagggcagacagtgcagctacagaaagaagaagagacccaacgtggaggagcccctgagcgagtgcaacctggtgaacgccggcaagaccctgaaggacctgatctacgacgtgaccgccagcggcagcggcagcggcctgcccctgctggtgcagagaaccatcgccagaaccatcgtgctgcaggagatcgtgggcaagggcagattcggcgaggtgtggcacggcagatggtgcggcgaggacgtggccgtgaagatcttcagcagcagagacgagagaagctggttcagagaggccgagatctaccagaccgtgatgctgagacacgagaacatcctgggcttcatcgccgccgacaacaaggacaacggcacctggacccagctgtggctggtgagcgagtaccacgagcagggcagcctgtacgactacctgaacagaaacatcgtgaccgtggccggcatgatcaagctggccctgagcatcgccagcggcctggcccacctgcacatggagatcgtgggcacccagggcaagcccgccatcgcccacagagacatcaagagcaagaacatcctggtgaagaagtgcgagacctgcgccatcgccgacctgggcctggccgtgaagcacgacagcatcctgaacaccatcgacatcccccagaaccccaaggtgggcaccaagagatacatggcccccgagatgctggacgacaccatgaacgtgaacatcttcgagagcttcaagagagccgacatctacagcgtgggcctggtgtactgggagatcgccagaagatgcagcgtgggcggcatcgtggaggagtaccagctgccctactacgacatggtgcccagcgaccccagcatcgaggagatgagaaaggtggtgtgcgaccagaagttcagacccagcatccccaaccagtggcagagctgcgaggccctgagagtgatgggcagaatcatgagagagtgctggtacgccaacggcgccgccagactgaccgccctgagaatcaagaagaccatcagccagctgtgcgtgaaggaggactgcaaggcctag

SEQ ID NO: 42119 - protein, 413 aa, Artificial Sequence
  derived and/or modified sequence
MTRALCSALRQALLLLAAAAELSPGLKCVCLLCDSSNFTCQTEGACWASVMLTNGKEQVIKSCVSLPELNAQVFCHSSNNVTKTECCFTDFCNNITLHLPTGLPLLVQRTIARTIVLQEIVGKGRFGEVWHGRWCGEDVAVKIFSSRDERSWFREAEIYQTVMLRHENILGFIAADNKDNGTWTQLWLVSEYHEQGSLYDYLNRNIVTVAGMIKLALSIASGLAHLHMEIVGTQGKPAIAHRDIKSKNILVKKCETCAIADLGLAVKHDSILNTIDIPQNPKVGTKRYMAPEMLDDTMNVNIFESFKRADIYSVGLVYWEIARRCSVGGIVEEYQLPYYDMVPSDPSIEEMRKVVCDQKFRPSIPNQWQSCEALRVMGRIMRECWYANGAARLTALRIKKTISQLCVKEDCKA

SEQ ID NO: 42120 - DNA, 1242 bp, Artificial Sequence
  derived and/or modified sequence
atgaccagagccctgtgcagtgcgctgcgacaagcccttctactactcgccgctgcagctgaactgtcaccgggcctgaaatgtgtctgcctgttgtgtgactcctccaattttacatgtcagacggagggcgcctgctgggcatctgttatgctgaccaacggcaaggaacaggtgataaagtcttgcgtgtcacttcccgagctgaacgcccaggtattctgccactctagcaataatgtaacaaaaactgagtgctgttttacagacttctgcaataatatcactttgcacctgccgaccggattaccattactggtgcaacgcactatcgctaggaccatcgtattacaggagatcgtgggtaagggcaggtttggagaagtatggcatggtcgctggtgtggcgaggacgttgccgtaaagatctttagtagcagagacgagcgtagctggtttcgggaggcagagatctatcaaactgtcatgctgcggcatgagaacatattaggctttattgcagctgataataaggacaacgggacttggactcagctttggctcgtgtctgaatatcatgagcagggttcattatatgactacttgaaccgaaacatagtgacagtcgcaggtatgatcaaactcgcgctgagcattgcgagcgggctggctcacctacatatggaaatcgtgggcacccaagggaaaccagcaattgcccaccgcgatattaagagcaaaaacatactggttaagaagtgcgaaacttgtgctatcgccgacttgggccttgccgttaagcatgactcgatactgaacacgatcgatattcctcaaaacccaaaggtcgggactaagaggtatatggctccagagatgcttgacgacacaatgaacgtgaatatattcgaatcctttaagcgggccgatatctattctgtgggtcttgtatactgggaaatcgcacggagatgcagtgtagggggcatcgtcgaggagtaccaactcccttattatgacatggtaccctcagatccctctatcgaggaaatgcgtaaagttgtttgcgaccagaagttccggccttccatcccaaatcagtggcagtcatgtgaggctctccgggttatgggccgtatcatgcgcgaatgctggtatgcaaatggggctgcgcggctgaccgccttgaggatcaagaaaaccatttcccaactgtgtgttaaggaagattgcaaggcttag

SEQ ID NO: 42121 - DNA, 1242 bp, Artificial Sequence
  derived and/or modified sequence
atgacccgggccctgtgcagcgccctgcggcaggccctgctgctgctggccgctgctgctgagctgagccctggcctgaagtgtgtgtgcctgctgtgtgacagcagcaacttcacctgccagacagagggcgcctgctgggcctctgtgatgctgaccaacgggaaggagcaggtgatcaagagctgtgtgtccctgcctgagctgaatgcccaggtgttctgccacagcagcaacaacgtgaccaagacagagtgctgcttcacagacttctgcaacaacatcaccctgcacctgcccaccggcctgcccctgctggtgcagaggaccatcgcccggaccatcgtgctgcaggagatcgtgggcaagggccgctttggagaggtgtggcacggccgctggtgtggagaagatgtggccgtgaagatcttcagcagcagagatgagaggtcctggttccgggaggccgagatctaccagacagtgatgctgcggcatgagaacatcctgggcttcatcgctgctgacaacaaggacaatggcacctggacccagctgtggctggtgtctgagtaccacgagcagggcagcctgtatgactacctgaacagaaacatcgtgacagtggccggcatgatcaagctggccctgagcatcgccagcggcctggcccacctgcacatggagatcgtgggcacccagggcaagccagccatcgcccaccgggacatcaagagcaagaacatcctggtgaagaagtgtgagacctgtgccatcgctgacctgggcctggccgtgaagcatgacagcatcctgaacaccatcgacatcccccagaaccccaaggtgggcaccaagcgctacatggcccctgagatgctggatgacaccatgaatgtgaacatctttgagagcttcaagagagctgacatctacagcgtgggcctggtgtactgggagatcgcccggcgctgcagcgtgggcggcatcgtggaggagtaccagctgccctactatgacatggtgcccagcgaccccagcattgaggagatgaggaaggtggtgtgtgaccagaagttccggcccagcatccccaaccagtggcagagctgtgaggccctgcgggtgatgggccgcatcatgagggagtgctggtacgccaacggggccgcccggctgacagccctgcgcatcaagaagaccatcagccagctgtgtgtgaaggaggactgcaaggcctag

SEQ ID NO: 42122 - DNA, 1242 bp, Artificial Sequence
  derived and/or modified sequence
atgacccgggccctgtgcagcgccctgcggcaggccctgctgctgctagctgcggcagcagagctgtcacccggtcttaagtgcgtgtgtttactctgcgacagttcaaattttacctgtcaaacagaaggcgcctgttgggcttctgtcatgctcacgaacggcaaagaacaggtaattaagagttgcgtatccctgcccgagctgaatgcgcaggttttttgtcacagctcgaacaatgtcacgaagaccgagtgctgctttacagatttttgtaacaacatcaccctacatctgcctacaggactgccactcctggtacaacggactattgctaggaccatcgtgcttcaggagatcgttggcaaaggacgttttggcgaggtgtggcatggtagatggtgtggtgaggatgtggccgtgaagatcttttcttctagggatgaacggtcctggtttcgggaagcagagatataccagacagtgatgctgcgccacgagaacatcttggggtttatcgctgctgacaacaaagataacggaacgtggactcaactgtggctggtttctgaatatcacgaacaaggttccttgtatgactatctgaacagaaacattgtaacagttgccggaatgataaagctcgccctgtccatcgcctctggcctcgcccatcttcatatggagatcgtgggcacgcagggtaaaccagccatcgctcaccgggacattaagtcaaagaatatcttagttaagaagtgtgagacctgcgctatagcagacctcggcctggccgtgaaacacgactcaatactgaataccatcgacataccacagaatcccaaagtcgggacaaaacggtacatggccccagaaatgttagacgacactatgaacgtgaatatctttgaatcattcaaaagggcggatatctattccgttggcctggtatactgggagattgccaggagatgttctgtgggagggatcgtggaggagtatcagttgccgtattatgatatggtaccatcagatcctagtattgaagagatgagaaaggtggtttgtgatcaaaagttcaggcccagcataccaaaccaatggcaaagttgcgaagccctcagggtcatgggccgcataatgagggaatgctggtatgccaacggagcagcccggttaacagcgctccggatcaagaagactatctcccagctatgtgttaaggaggattgcaaagcctag

SEQ ID NO: 42123 - DNA, 1242 bp, Artificial Sequence
  derived and/or modified sequence
atgactcgcgctctgtgcagcgccctgcgccaagcccttctactgctcgccgctgccgcagagctgtcccccggactgaagtgcgtgtgtctgctgtgcgattcctccaacttcacttgccagaccgaaggcgcttgttgggcatccgtgatgctcacaaatggcaaggagcaggttatcaagtcttgcgtcagcctgcccgaactcaacgcacaggttttctgtcactctagtaacaatgtaaccaagacagagtgttgcttcacagatttctgtaataatatcacgctgcatctaccaaccggactgcctctcctggttcagcgtaccatcgctcgaacaattgtgctccaagaaatcgtcggaaaaggcagatttggcgaggtgtggcacggacgatggtgtggagaggatgtcgcagtgaagatatttagctcacgtgatgaacgctcatggttcagagaggctgagatttatcaaaccgttatgcttaggcacgaaaatattctgggcttcatcgcggctgacaacaaagataacgggacatggacgcaactttggctcgtgtcagagtatcacgaacaaggcagcctgtacgattacctgaacaggaatatcgtcaccgttgcaggcatgattaagctcgctctttcaattgctagcgggctcgcgcacctgcatatggagattgtaggaacgcagggaaagcctgccatcgcccatcgggacataaaatctaagaatattctggtcaaaaaatgtgagacctgtgccatagccgacctgggactggcagtcaagcacgatagcatccttaacactatcgatataccccagaacccaaaggtcggcaccaaaaggtatatggcaccagagatgctggatgacactatgaatgttaacatatttgagtctttcaagagggccgatatctatagcgtaggcctggtttactgggaaatcgcacgcagatgtagtgtaggcggaatcgtggaggagtaccagctgccttattacgatatggtgccgagcgatcctagcatcgaggagatgagaaaggtagtttgtgaccagaaattccggccttcgatcccaaaccagtggcaatcctgcgaggcactgcgagtaatgggaagaataatgcgggagtgttggtatgccaacggagcagctaggctaacggccctccgaatcaaaaagaccatcagtcagctatgcgttaaagaagattgtaaagcttag

SEQ ID NO: 42124 - DNA, 1242 bp, Artificial Sequence
  derived and/or modified sequence
atgaccagagccctgtgcagcgccctgagacaggccctgctgctgctggccgccgccgccgagctgagccccggcctgaagtgcgtgtgcctgctgtgcgacagcagcaacttcacctgccagaccgagggcgcctgctgggccagcgtgatgctgaccaacggcaaggagcaggtgatcaagagctgcgtgagcctgcccgagctgaacgcccaggtgttctgccacagcagcaacaacgtgaccaagaccgagtgctgcttcaccgacttctgcaacaacatcaccctgcacctgcccaccggcctgcccctgctggtgcagagaaccatcgccagaaccatcgtgctgcaggagatcgtgggcaagggcagattcggcgaggtgtggcacggcagatggtgcggcgaggacgtggccgtgaagatcttcagcagcagagacgagagaagctggttcagagaggccgagatctaccagaccgtgatgctgagacacgagaacatcctgggcttcatcgccgccgacaacaaggacaacggcacctggacccagctgtggctggtgagcgagtaccacgagcagggcagcctgtacgactacctgaacagaaacatcgtgaccgtggccggcatgatcaagctggccctgagcatcgccagcggcctggcccacctgcacatggagatcgtgggcacccagggcaagcccgccatcgcccacagagacatcaagagcaagaacatcctggtgaagaagtgcgagacctgcgccatcgccgacctgggcctggccgtgaagcacgacagcatcctgaacaccatcgacatcccccagaaccccaaggtgggcaccaagagatacatggcccccgagatgctggacgacaccatgaacgtgaacatcttcgagagcttcaagagagccgacatctacagcgtgggcctggtgtactgggagatcgccagaagatgcagcgtgggcggcatcgtggaggagtaccagctgccctactacgacatggtgcccagcgaccccagcatcgaggagatgagaaaggtggtgtgcgaccagaagttcagacccagcatccccaaccagtggcagagctgcgaggccctgagagtgatgggcagaatcatgagagagtgctggtacgccaacggcgccgccagactgaccgccctgagaatcaagaagaccatcagccagctgtgcgtgaaggaggactgcaaggcctag

SEQ ID NO: 42125 - DNA, 1501 bp, Artificial Sequence
  derived and/or modified sequence
ggaacttcaaagcgggccgtgctgccccggctgcctcgctctgctctggggcctcgcagccccggcgcggccgcctggtggcgatgacccgggcgctctgctcagcgctccgccaggctctcctgctgctcgcagcggccgccgagctctcgccaggactgaagtgtgtatgtcttttgtgtgattcttcaaacttcacctgccaaacagaaggagcatgttgggcatcagtcatgctaaccaatggaaaagagcaggtgatcaaatcctgtgtctcccttccagaactgaatgctcaagtcttctgtcatagttccaacaatgttaccaaaaccgaatgctgcttcacagatttttgcaacaacataacactgcaccttccaacaggtctacctctgttggttcaaaggacaattgcaaggacgattgtgcttcaggaaatagtaggaaaaggtagatttggtgaggtgtggcatggaagatggtgtggggaagatgtggctgtgaaaatattctcctccagagatgaaagatcttggtttcgtgaggcagaaatttaccagacggtcatgctgcgacatgaaaacatccttggtttcattgctgctgacaacaaagataatggaacttggactcaactttggctggtatctgaatatcatgaacagggctccttatatgactatttgaatagaaatatagtgaccgtggctggaatgatcaagctggcgctctcaattgctagtggtctggcacaccttcatatggagattgttggtacacaaggtaaacctgctattgctcatcgagacataaaatcaaagaatatcttagtgaaaaagtgtgaaacttgtgccatagcggacttagggttggctgtgaagcatgattcaatactgaacactatcgacatacctcagaatcctaaagtgggaaccaagaggtatatggctcctgaaatgcttgatgatacaatgaatgtgaatatctttgagtccttcaaacgagctgacatctattctgttggtctggtttactgggaaatagcccggaggtgttcagtcggaggaattgttgaggagtaccaattgccttattatgacatggtgccttcagatccctcgatagaggaaatgagaaaggttgtttgtgaccagaagtttcgaccaagtatcccaaaccagtggcaaagttgtgaagcactccgagtcatggggagaataatgcgtgagtgttggtatgccaacggagcggcccgcctaactgctcttcgtattaagaagactatatctcaactttgtgtcaaagaagactgcaaagcctaatgatgataattatgttaaaaagaaatctctcatagctttcttttccattttcccctttatgtgaatgtttttgccattttttttttgttctacctcaaagataagacagtacagtatttaagtgcccataaggcagcatgaaaagataactctaaagttaagcatgggcaggagtt

SEQ ID NO: 42126 - protein, 336 aa, Artificial Sequence
  derived and/or modified sequence
MTRALCSALRQALLLLAAAAELSPGLKCVCLLCDSSNFTCQTEGACWASVMLTNGKEQVIKSCVSLPELNAQVFCHSSNNVTKTECCFTDFCNNITLHLPTDNGTWTQLWLVSEYHEQGSLYDYLNRNIVTVAGMIKLALSIASGLAHLHMEIVGTQGKPAIAHRDIKSKNILVKKCETCAIADLGLAVKHDSILNTIDIPQNPKVGTKRYMAPEMLDDTMNVNIFESFKRADIYSVGLVYWEIARRCSVGGIVEEYQLPYYDMVPSDPSIEEMRKVVCDQKFRPSIPNQWQSCEALRVMGRIMRECWYANGAARLTALRIKKTISQLCVKEDCKA

SEQ ID NO: 42127 - DNA, 1011 bp, Artificial Sequence
  derived and/or modified sequence
atgacccgtgccttgtgttctgccctgcgtcaggcactgctactcctggcagcagcagcagagctgagcccaggtcttaagtgtgtgtgcctcctgtgtgattcttcaaactttacatgtcagaccgaaggagcctgttgggcttccgtcatgctgaccaacggtaaagaacaggtaattaagagctgcgtgtctctcccagagctcaacgcccaggtgttttgccattccagcaacaacgtgactaaaacagagtgctgcttcaccgacttctgcaacaacatcacactccaccttcctactgataatggcacttggacacaattatggctagtgtcagagtatcacgagcaggggagcctctatgactacctcaaccgcaatatcgttacggtggccggaatgatcaaacttgcactgtctatcgcttctggtctcgcccatctgcatatggaaattgtgggcactcagggaaagcccgctatagcgcatcgcgatatcaagtccaagaacatcttggtaaaaaagtgcgaaacgtgcgctatagccgatctgggcctcgccgttaagcatgacagtatcctcaatacaatcgatatccctcagaacccaaaggtagggactaagcggtacatggcgccggaaatgctggatgacaccatgaatgtgaacatttttgagagctttaagcgagccgacatttactctgtgggccttgtatattgggagatcgctcgtagatgctcagtcggcgggatcgtcgaggaatatcagctcccctattatgacatggtccccagtgaccctagcatcgaagagatgaggaaggtcgtttgtgatcagaaatttcgtccaagcatccccaaccaatggcagtcatgtgaggctctgagagtaatgggacggataatgcgcgaatgctggtacgccaacggcgcagcccggttaaccgccctcaggatcaaaaaaaccatttcccagctgtgtgtcaaggaggactgcaaagcctag

SEQ ID NO: 42128 - DNA, 1011 bp, Artificial Sequence
  derived and/or modified sequence
atgacccgggccctgtgcagcgccctgcggcaggccctgctgctgctggccgctgctgctgagctgagccctggcctgaagtgtgtgtgcctgctgtgtgacagcagcaacttcacctgccagacagagggcgcctgctgggcctctgtgatgctgaccaacgggaaggagcaggtgatcaagagctgtgtgtccctgcctgagctgaatgcccaggtgttctgccacagcagcaacaacgtgaccaagacagagtgctgcttcacagacttctgcaacaacatcaccctgcacctgcccacagacaatggcacctggacccagctgtggctggtgtctgagtaccacgagcagggcagcctgtatgactacctgaacagaaatattgtgacagtggccggcatgatcaagctggccctgagcatcgccagcggcctggcccacctgcacatggagatcgtgggcacccagggcaagccagccatcgcccaccgggacatcaagagcaagaacatcctggtgaagaagtgtgagacctgtgccatcgctgacctgggcctggccgtgaagcatgacagcatcctgaacaccatcgacatcccccagaaccccaaggtgggcaccaagcgctacatggcccctgagatgctggatgacaccatgaatgtgaacatctttgagagcttcaagagagctgacatctacagcgtgggcctggtgtactgggagatcgcccggcgctgcagcgtgggcggcatcgtggaggagtaccagctgccctactatgacatggtgcccagcgaccccagcattgaggagatgaggaaggtggtgtgtgaccagaagttccggcccagcatccccaaccagtggcagagctgtgaggccctgcgggtgatgggccgcatcatgagggagtgctggtacgccaatggagctgcccggctgacagccctgcgcatcaagaagaccatcagccagctgtgtgtgaaggaggactgcaaggcctag

SEQ ID NO: 42129 - DNA, 1011 bp, Artificial Sequence
  derived and/or modified sequence
atgacccgggccctgtgcagcgccctgcggcaggccctgctgctgctggcagctgcggcagaactgtcacccggcctgaagtgcgtatgtctattgtgtgactctagcaacttcacttgtcagaccgagggagcatgttgggcctcagtgatgttgaccaacggaaaggaacaggttattaagtcatgcgtctctctgcctgaactgaacgctcaggtgttctgtcatagttccaacaacgtgaccaaaacagagtgctgtttcaccgacttttgtaacaatataacactgcacctgcctaccgataacggcacttggacacaactgtggttggtatcagagtaccacgagcaaggctcactctacgattacctgaacaggaatatcgtgacagtggcaggcatgatcaagctggcactgtctatagccagtggtttggcacacctccatatggagattgttggaacccaaggaaaacctgcgattgcccaccgcgacattaaaagtaagaacatacttgtcaagaagtgcgagacctgcgccattgcagacctgggacttgctgtgaaacatgacagcattcttaatacaattgacatcccccagaacccgaaagtagggaccaaacgctacatggcaccagaaatgctggacgataccatgaacgtgaacatatttgagtctttcaaacgcgcggatatctactcggtgggcttagtgtactgggagatcgccaggcgatgttctgttggaggtatcgtggaagaatatcagctgccgtattatgacatggtgccatcagatccatctatagaggagatgcggaaagtcgtgtgcgatcagaaattccgcccatcgatcccgaatcaatggcagtcttgcgaggccctgagggtgatgggacgaattatgcgcgaatgttggtatgccaatggcgccgcccgcttgaccgcactgaggatcaaaaaaacaatctctcagctgtgtgttaaagaagactgtaaagcatag

SEQ ID NO: 42130 - DNA, 1011 bp, Artificial Sequence
  derived and/or modified sequence
atgacgagggctttgtgctctgcactgcgtcaggctctgctcttgctggcggcagcggctgagctgagtcccggactgaagtgtgtctgcctcctgtgcgacagttcaaacttcacttgccagactgagggagcctgctgggcttcagtgatgctcactaatggcaaggagcaggtgattaagagctgcgttagcctgccagagttgaacgctcaggtcttctgccactcctccaataacgttacgaagaccgagtgctgttttaccgacttctgcaacaacatcacactgcacctgcccaccgacaacggcacatggacccagctgtggctggtgagcgagtatcacgagcagggttctctctatgattacttaaatcggaacatcgtgactgtggctggaatgataaagttggctctttccatagcctccggcctcgctcacttgcacatggagattgttggaacacagggtaaaccagccatcgctcacagagacataaagtccaagaacatcctcgtaaagaaatgcgaaacctgtgctatcgcagacttggggcttgcagttaagcatgacagcattcttaataccattgatatcccacagaaccccaaagttggcaccaagcgctatatggcccctgaaatgctggatgacacaatgaacgtcaatatcttcgaaagttttaagcgtgcagatatatactctgttggcctggtctactgggagattgctcgaaggtgttccgtgggtggaatcgtggaagagtaccaactaccctattatgatatggtaccgtccgacccaagcatcgaagaaatgcgtaaggtagtctgtgaccagaagttccggccatcaatacctaatcagtggcagtcttgcgaggccctacgtgttatgggcagaatcatgagggagtgctggtatgcaaacggcgcagccaggctaaccgcccttcggattaagaagaccatctcccaactatgtgtgaaggaggattgcaaggcttag

SEQ ID NO: 42131 - DNA, 1011 bp, Artificial Sequence
  derived and/or modified sequence
atgaccagagccctgtgcagcgccctgagacaggccctgctgctgctggccgccgccgccgagctgagccccggcctgaagtgcgtgtgcctgctgtgcgacagcagcaacttcacctgccagaccgagggcgcctgctgggccagcgtgatgctgaccaacggcaaggagcaggtgatcaagagctgcgtgagcctgcccgagctgaacgcccaggtgttctgccacagcagcaacaacgtgaccaagaccgagtgctgcttcaccgacttctgcaacaacatcaccctgcacctgcccaccgacaacggcacctggacccagctgtggctggtgagcgagtaccacgagcagggcagcctgtacgactacctgaacagaaacatcgtgaccgtggccggcatgatcaagctggccctgagcatcgccagcggcctggcccacctgcacatggagatcgtgggcacccagggcaagcccgccatcgcccacagagacatcaagagcaagaacatcctggtgaagaagtgcgagacctgcgccatcgccgacctgggcctggccgtgaagcacgacagcatcctgaacaccatcgacatcccccagaaccccaaggtgggcaccaagagatacatggcccccgagatgctggacgacaccatgaacgtgaacatcttcgagagcttcaagagagccgacatctacagcgtgggcctggtgtactgggagatcgccagaagatgcagcgtgggcggcatcgtggaggagtaccagctgccctactacgacatggtgcccagcgaccccagcatcgaggagatgagaaaggtggtgtgcgaccagaagttcagacccagcatccccaaccagtggcagagctgcgaggccctgagagtgatgggcagaatcatgagagagtgctggtacgccaacggcgccgccagactgaccgccctgagaatcaagaagaccatcagccagctgtgcgtgaaggaggactgcaaggcctag

SEQ ID NO: 42132 - DNA, 1270 bp, Artificial Sequence
  derived and/or modified sequence
ggaacttcaaagcgggccgtgctgccccggctgcctcgctctgctctggggcctcgcagccccggcgcggccgcctggtggcgatgacccgggcgctctgctcagcgctccgccaggctctcctgctgctcgcagcggccgccgagctctcgccaggactgaagtgtgtatgtcttttgtgtgattcttcaaacttcacctgccaaacagaaggagcatgttgggcatcagtcatgctaaccaatggaaaagagcaggtgatcaaatcctgtgtctcccttccagaactgaatgctcaagtcttctgtcatagttccaacaatgttaccaaaaccgaatgctgcttcacagatttttgcaacaacataacactgcaccttccaacagataatggaacttggactcaactttggctggtatctgaatatcatgaacagggctccttatatgactatttgaatagaaatatagtgaccgtggctggaatgatcaagctggcgctctcaattgctagtggtctggcacaccttcatatggagattgttggtacacaaggtaaacctgctattgctcatcgagacataaaatcaaagaatatcttagtgaaaaagtgtgaaacttgtgccatagcggacttagggttggctgtgaagcatgattcaatactgaacactatcgacatacctcagaatcctaaagtgggaaccaagaggtatatggctcctgaaatgcttgatgatacaatgaatgtgaatatctttgagtccttcaaacgagctgacatctattctgttggtctggtttactgggaaatagcccggaggtgttcagtcggaggaattgttgaggagtaccaattgccttattatgacatggtgccttcagatccctcgatagaggaaatgagaaaggttgtttgtgaccagaagtttcgaccaagtatcccaaaccagtggcaaagttgtgaagcactccgagtcatggggagaataatgcgtgagtgttggtatgccaacggagcggcccgcctaactgctcttcgtattaagaagactatatctcaactttgtgtcaaagaagactgcaaagcctaatgatgataattatgttaaaaagaaatctctcatagctttcttttccattttcccctttatgtgaatgtttttgccattttttttttgttctacctcaaagataagacagtacagtatttaagtgcccataaggcagcatgaaaagataactctaaagttaagcatgggcaggagtt

SEQ ID NO: 42133 - protein, 325 aa, Artificial Sequence
  derived and/or modified sequence
MDMWTALLILQALLLPSLADGATPALRFVAVGDWGGVPNAPFHTAREMANAKEIARTVQILGADFILSLGDNFYFTGVQDINDKRFQETFEDVFSDRSLRKVPWYVLAGNHDHLGNVSAQIAYSKISKRWNFPSPFYRLHFKIPQTNVSVAIFMLDTVTLCGNSDDFLSQQPERPRDVKLARTQLSWLKKQLAAAREDYVLVAGHYPVWSIAEHGPTHCLVKQLRPLLATYGVTAYLCGHDHNLQYLQDENGVGYVLSGAGNFMDPSKRHQRKVPNGYLRFHYGTEDSLGGFAYVEISSKEMTVTYIEASGKSLFKTRLPRRARP

SEQ ID NO: 42134 - DNA, 978 bp, Artificial Sequence
  derived and/or modified sequence
atggacatgtggaccgccctgctgatcctgcaggccctgctgctgcccagcctggccgacggcgccacccccgccctgagattcgtggccgtgggcgactggggcggcgtgcccaacgcccccttccacaccgccagagagatggccaacgccaaggagatcgccagaaccgtgcagatcctgggcgccgacttcatcctgagcctgggcgacaacttctacttcaccggcgtgcaggacatcaacgacaagagattccaggagaccttcgaggacgtgttcagcgacagaagcctgagaaaggtgccctggtacgtgctggccggcaaccacgaccacctgggcaacgtgagcgcccagatcgcctacagcaagatcagcaagagatggaacttccccagccccttctacagactgcacttcaagatcccccagaccaacgtgagcgtggccatcttcatgctggacaccgtgaccctgtgcggcaacagcgacgacttcctgagccagcagcccgagagacccagagacgtgaagctggccagaacccagctgagctggctgaagaagcagctggccgccgccagagaggactacgtgctggtggccggccactaccccgtgtggagcatcgccgagcacggccccacccactgcctggtgaagcagctgagacccctgctggccacctacggcgtgaccgcctacctgtgcggccacgaccacaacctgcagtacctgcaggacgagaacggcgtgggctacgtgctgagcggcgccggcaacttcatggaccccagcaagagacaccagagaaaggtgcccaacggctacctgagattccactacggcaccgaggacagcctgggcggcttcgcctacgtggagatcagcagcaaggagatgaccgtgacctacatcgaggccagcggcaagagcctgttcaagaccagactgcccagaagagccagaccctag

SEQ ID NO: 42135 - DNA, 978 bp, Artificial Sequence
  derived and/or modified sequence
atggacatgtggaccgcccttctgatcctgcaggcactactgctgccttctctggccgatggcgccacaccagcactaagattcgtggccgtgggagactgggggggtgtccccaatgccccctttcacacagcccgtgagatggcaaatgctaaggagattgcccggactgtgcaaattttgggagccgacttcatcctgagtctgggcgataatttttacttcacaggcgtgcaggacatcaatgataagagattccaggagaccttcgaggatgttttcagtgaccgctccctacgaaaagtcccctggtacgtacttgccggcaaccatgatcacctggggaatgtgtctgctcagattgcttattccaagatttcaaaacggtggaattttccgtccccattttaccggctgcattttaagattcctcagacaaacgtgtctgtggctattttcatgctggacaccgtgacactgtgtgggaactctgatgacttcctgtcccaacagcctgaaaggcctcgggatgtgaagcttgccaggacacagctgtcttggctcaagaaacaactggcagctgcccgcgaggactatgttctcgtcgccgggcactaccctgtctggtccattgcagagcacggaccaacccattgtctggtaaagcagctgagacctttactggcaacttatggggttaccgcatacctctgcggccacgatcataatctgcagtacctccaggacgagaacggggtcggatatgtgctcagtggcgcaggcaactttatggatcctagcaagagacaccagcgcaaagtacctaacggatatctgaggttccattatggaacagaagacagcctcggggggtttgcttatgtcgaaataagttccaaggagatgacagtgacatatatcgaagctagcgggaagtccctgtttaaaacccggctcccaagacgcgctcgcccatag

SEQ ID NO: 42136 - DNA, 978 bp, Artificial Sequence
  derived and/or modified sequence
atggacatgtggacagccctgctgatcctgcaggccctgctgctgcccagcctggctgatggagccaccccagccctgcgctttgtggccgtgggggactggggcggcgtgcccaatgcccccttccacacagcccgggagatggccaatgccaaggagatcgccaggacagtgcagatcctgggcgctgacttcatcctgagcctgggggacaacttctacttcaccggggtgcaggacatcaatgacaagcgcttccaggagacctttgaagatgtgttcagtgacaggagcctgaggaaggtgccctggtacgtgctggccggcaaccacgaccacctgggcaatgtgtctgcccagatcgcctacagcaagatcagcaagcgctggaacttccccagccccttctaccgcctgcacttcaagatcccccagaccaacgtgtctgtggccatcttcatgctggacacagtgaccctgtgtggcaacagtgatgacttcctgagccagcagcctgagcggcccagagatgtgaagctggcccggacccagctgtcctggctgaagaagcagctggccgccgccagagaagattatgtgctggtggccggccactaccctgtgtggagcattgctgagcacggccccacccactgcctggtgaagcagctgcggcccctgctggccacctatggagtgacagcctacctgtgtggccatgaccacaacctgcagtacctgcaggatgaaaatggagtgggctacgtgctgagcggggccggcaacttcatggaccccagcaagaggcaccagaggaaggtgcccaacggctacctgcgcttccactatggaacagaggacagcctgggcggctttgcctacgtggagatcagcagcaaggagatgacagtgacctacatcgaggccagcggcaagagcctcttcaagacccggctgccccggcgggcccggccctag

SEQ ID NO: 42137 - DNA, 978 bp, Artificial Sequence
  derived and/or modified sequence
atggacatgtggaccgccctgctgatcctgcaggccctgctgctgcccagcctggccgacggcgccacccctgctctgaggtttgtggccgttggcgactgggggggagtgccaaacgctccctttcataccgcacgggaaatggccaacgccaaggagatcgcgcgtaccgtacaaattttaggtgctgactttattctctcattgggggataacttttattttaccggggtacaagacatcaacgataaacggtttcaggagacattcgaagacgtcttcagcgatcgcagtcttaggaaggtgccttggtacgtactggcagggaaccacgatcatctaggtaacgttagcgcacagattgcctacagtaaaataagcaagagatggaattttccaagtcctttctacagactgcattttaaaatcccacagaccaacgttagcgtggcaatctttatgcttgataccgttacactctgtggcaatagcgatgatttcctttcacagcagcctgaacgtccccgcgacgttaagttagcgaggacccaactttcatggctgaagaagcagttggccgctgcccgcgaggactacgtgttagtggccgggcattatcccgtatggtccattgctgaacatggcccaacccactgcctagtcaaacagctgcggccattgctggcaacctatggagtcactgcctatctttgtggccatgaccataacctccaataccttcaggatgaaaatggcgtgggatacgtgctgtctggcgccgggaatttcatggacccaagcaaacggcaccagcggaaggtgccaaatgggtaccttcgattccactacggaactgaggacagcctcggtggtttcgcctacgttgagatctcatcaaaggagatgacggtcacctacatagaagcgagcggaaagtctttgtttaaaactcgactcccaaggagagcacgtccctag

SEQ ID NO: 42138 - DNA, 978 bp, Artificial Sequence
  derived and/or modified sequence
atggatatgtggactgcactgttgatactgcaagcacttcttctcccgagcctggccgacggagctactcctgctctccgcttcgttgccgttggcgattggggcggtgtacccaacgctccctttcacaccgccagagagatggcaaacgcaaaggaaattgcacggaccgttcaaattctgggcgcagactttattttatctttaggcgacaatttctattttaccggtgtgcaagacataaatgataaacgatttcaggagactttcgaggatgttttctctgaccgcagcctgcgaaaagtaccatggtacgtcctcgctggcaaccatgatcacttgggcaacgtatctgcacagatagcctatagcaagatctccaagcggtggaactttcccagtcctttctatcgcctgcattttaaaattccgcagactaatgtttccgtggctatttttatgttagacaccgtgacactctgtggcaatagcgacgacttcctgagccagcaaccagagaggcccagggacgtgaaactggctaggactcagctttcatggctaaaaaaacagctggctgcagctcgggaggattatgtgttagtcgcaggtcattaccccgtgtggtccattgccgagcatgggccaacccattgtctggtcaaacagctccggcctttgttggctacctatggggtcactgcttacctctgcgggcatgaccataatctgcagtatctccaggacgagaacggagttggctatgtcctgtccggcgcaggaaacttcatggatccttctaaaagacaccagagaaaagtgcccaatggatatctgaggttccattatgggacagaagatagcctgggtgggtttgcttacgtagaaatcagttcgaaggaaatgaccgttacctacatcgaggctagtggcaaatccctgtttaagacccggctccctcggcgagcaaggccttag

SEQ ID NO: 42139 - DNA, 978 bp, Artificial Sequence
  derived and/or modified sequence
atggatatgtggactgcactgttaattctgcaagcattactcttgccaagcctggcagatggggctactcccgcgttgcgatttgtggcagttggggactggggtggagttccaaacgctcccttccacaccgcaagagagatggccaatgcaaaagagatcgcccgaacagtccagattctgggcgctgatttcatacttagcttgggcgataacttttacttcactggcgttcaggatatcaatgataagcgcttccaggaaactttcgaggacgtgttcagcgaccgctccctgcgcaaagtcccatggtacgtactggcaggcaaccacgaccatctaggaaacgtgagtgctcagattgcttactccaagatatctaagcgttggaacttcccatcccctttctaccgtctgcatttcaagattcctcaaacgaacgtttccgtggccatttttatgttggacacagtaacgctctgcggaaatagcgatgatttcctgtcccagcagcctgagcggccaagagatgtgaagctggcaaggacccaactctcctggctcaaaaagcagttggccgccgcccgggaggactatgttttagtcgcgggtcattatcctgtgtggtccatcgctgaacacgggcccacacactgtcttgtgaagcagctgcgccccctgctggccacgtacggcgttacggcctacctgtgcgggcatgaccacaacctccagtatcttcaggacgagaatggggtgggctatgtactctccggagccggtaactttatggacccttccaagcggcaccagagaaaggttcctaacggctaccttcggtttcactacggcactgaggattctctgggcggcttcgcttacgttgaaattagctctaaggagatgacagtgacctatatagaggctagcggaaagtccctgttcaaaacacgtctgcctagacgcgcacggccctag

SEQ ID NO: 42140 - DNA, 978 bp, Artificial Sequence
  derived and/or modified sequence
atggatatgtggacagccttgctgatcctccaggccctgctgttgccatccctagccgatggggccacccccgctttaagattcgtcgctgttggggattgggggggtgtgccgaacgccccatttcatacggcacgtgagatggctaacgcaaaagagattgcccgaacggttcagatattgggagcagatttcatcctgtccctgggggataacttctactttaccggcgtgcaagatataaacgacaaaagatttcaggagacgtttgaagatgttttctccgatcgtagcttaagaaaagttccttggtatgtgctcgctggcaaccacgatcatttaggaaacgtgagtgcacagattgcatactccaagatctctaagcggtggaactttcccagccctttctacaggctccactttaaaataccacagacaaacgtgtctgttgccatcttcatgctggacactgtcactctttgtggaaattcagacgatttcctgtcgcagcagcccgaacgcccccgagacgtgaaactggcacgcacccaactcagctggttaaagaagcagctcgccgcggctcgcgaggactatgttttagttgctggtcactatccagtctggtctattgcagagcatgggcccacacactgcctcgttaagcaactgagacccctgctggcaacttacggagtcacggcttatctttgtgggcacgatcacaacctccaatatctacaggacgagaatggggtcggatacgttctctctggcgccgggaatttcatggaccccagtaagagacatcagaggaaagtaccaaatggatacctgcgctttcactacgggaccgaggacagcctgggcggcttcgcttacgtagagattagcagtaaagagatgacagtgacatacatcgaggctagcggcaaaagcttgtttaagacccgcctccctaggagggctaggccttag

SEQ ID NO: 42141 - DNA, 978 bp, Artificial Sequence
  derived and/or modified sequence
atggatatgtggacagcccttctgatactacaggcgctactactgccatcgctcgcagatggtgctacacctgcacttagatttgtcgctgtaggcgactggggcggagtgccaaacgcccctttccatacagctagagagatggctaacgcgaaggagattgctaggactgttcaaatcctgggggcagactttatcctgtctctgggggacaacttctactttacaggggtccaggacatcaatgacaagagatttcaagagacttttgaggatgttttttcagatcgatcgctgcgaaaggtgccttggtacgtgctggccgggaaccacgatcatctaggcaacgtgagcgcccaaattgcctactcgaaaatatccaaacgatggaattttccctccccattctatagactgcacttcaaaatcccccagaccaatgtatctgtggctatttttatgctcgacacagttaccctttgtggtaattcagacgacttcctatcacagcaacccgaaagacccagagacgttaaacttgcccgaacacagctgagttggctcaagaagcagctcgccgcagctcgcgaagactacgtgctggttgccgggcattatccagtgtggtcaattgctgagcatgggccgactcactgcctcgtgaagcagctacgccctctgctggctacctacggtgtcaccgcttatctgtgtggtcacgatcacaatctccagtacctccaggacgagaatggcgtggggtatgtgctctctggagcgggcaacttcatggacccatctaaacgccatcagaggaaggtgcctaatggctaccttcggtttcattacggcaccgaggatagtctcgggggcttcgcttatgttgaaatctccagcaaggagatgaccgttacatatattgaggcctcaggaaaatcactctttaaaacccgactgccaagaagagctagaccgtag

SEQ ID NO: 42142 - DNA, 978 bp, Artificial Sequence
  derived and/or modified sequence
atggacatgtggaccgccctgctgatcctgcaggccctgctgctgccatctctggctgatggagccacacccgctctacgctttgtggcagtgggagactggggaggcgtgcccaacgcgcctttccatacagccagggaaatggccaacgcaaaggaaatcgcaagaacagtccagatcctcggagccgatttcatcctaagcttgggagataacttctattttaccggtgtacaggacattaatgacaaaagattccaggagacctttgaagacgttttcagtgaccggtcattgaggaaggtgccatggtatgttctagcaggcaaccacgaccatcttggaaatgtctccgcccagatagcttattctaaaattagtaagcggtggaattttccctcacccttctatcggctgcacttcaaaatcccacaaactaatgtctcagttgccatcttcatgctggacactgtgaccctgtgtggaaactctgatgactttttatcccaacagccagagcgtccccgggacgtcaaactggcccggacacagttgagctggctgaagaaacaactcgccgcagccagggaggactatgtgctggtggctggccactaccccgtgtggagcattgccgaacacggacctacccattgtctcgtaaaacagctcagacccttacttgcgacatacggcgttaccgcctacctatgtggtcatgaccacaacttacagtacctgcaggacgagaatggtgtggggtacgtgctgtcgggcgcagggaatttcatggacccaagtaagcggcaccagaggaaagttcccaacggctatctgcgatttcactacggcacagaggattccctgggggggtttgcctacgtggagattagtagtaaagaaatgaccgtcacgtatattgaggctagtggcaaatcactctttaagacacgattgccccgccgagcacgcccctag

SEQ ID NO: 42143 - DNA, 978 bp, Artificial Sequence
  derived and/or modified sequence
atggacatgtggaccgccctgctgatcctgcaggccctgctgctgccttccctggcagacggagccacgcccgctctgcgattcgtcgcggtgggcgactgggggggcgtgccaaacgccccctttcacaccgcgagggagatggccaatgcaaaggaaattgctaggactgtgcagatcctgggagcggacttcattttgtcccttggcgacaacttttacttcaccggggtgcaggacattaatgataaacgctttcaagagacttttgaagatgtcttttctgaccgatcgctgcggaaggtcccttggtacgttctggctggcaaccacgaccaccttggaaacgtttccgctcagattgcttactctaagatctccaaacgatggaatttcccctctcctttttaccggctgcattttaaaatccctcagacaaacgtgtccgtggctatttttatgttagacacagtcaccttgtgcgggaactcggatgattttctgtctcagcagcctgagcgaccccgcgatgtgaaattggcaaggacccagctgtcatggctgaagaagcagctcgctgccgcacgtgaggactacgtcctcgtcgcaggacactacccagtgtggtccatcgccgagcatggtccgacacactgcctggtgaaacagcttaggcccctcctggcaacttacggggtcaccgcatacctctgtggccatgaccacaatttgcaatatttacaagacgagaatggggtgggatatgtcctctcaggggccggaaacttcatggacccatcgaaaaggcaccaaagaaaagtacccaacgggtacctaagattccattacggaactgaggatagcctgggaggcttcgcatacgtggaaatttcctccaaagagatgacggttacttacatagaagcttctgggaagagcctctttaaaacacggctgccccgcagggcacggccctag

SEQ ID NO: 42144 - DNA, 978 bp, Artificial Sequence
  derived and/or modified sequence
atggacatgtggaccgccctgctgatcctgcaggccctgctgctgccttcactggccgacggtgctaccccagctttaaggttcgtggctgtaggcgattggggaggcgtaccgaacgccccattccacaccgctcgcgagatggcaaacgcaaaagaaatcgccagaacggtgcagattctaggagcagattttattctgagtttaggcgacaatttctatttcaccggggtccaggacataaacgacaagcgcttccaggagacttttgaggacgtgttttctgatcgttcccttcgaaaggttccatggtacgtactggctggaaatcacgatcaccttggaaatgtgagtgcccaaatcgcttactccaagatcagtaagaggtggaacttcccaagccccttctacagattgcactttaaaatcccccagacgaacgtgagcgttgctattttcatgctggatactgtgacgctttgtggtaacagtgacgacttcctgtcacagcagccggagcggcccagggatgtcaaactcgcaagaacccagttgtcgtggcttaagaaacagctggcagcggcacgcgaggattacgtcttggtggcggggcattaccctgtttggtccatcgctgagcatggccctacccattgcctggtcaaacagcttaggccactgcttgccacttacggggttacagcttatctgtgcggacacgaccataatctgcagtacctccaggacgagaacggcgtgggctacgtgcttagcggcgccggaaattttatggacccctcaaagagacaccaacgcaaggtaccaaatgggtacctgagattccactatgggaccgaagattctctgggtggttttgcatatgtcgagatttcctccaaggaaatgacagtcacctacatcgaagcatcgggtaaatcactgtttaagacccgcctgccacgacgcgcacgcccttag

SEQ ID NO: 42145 - DNA, 978 bp, Artificial Sequence
  derived and/or modified sequence
atggacatgtggacggcattgcttatattacaggccctgctactgccctcgctggctgatggagctaccccagcattgaggttcgtggctgtgggtgactggggcggagttcccaatgcccctttccataccgctagagagatggcaaacgcgaaagaaatcgcgagaactgttcaaatactgggggctgatttcatactgtcgctgggggataacttctattttaccggggtgcaggatatcaacgataaacgctttcaggagacctttgaggatgtcttctctgaccgatctctgcgtaaggtaccctggtacgttttggccggaaaccacgaccacctagggaacgttagcgcacagattgcatattcaaagatcagcaagaggtggaactttccttcaccgttttatcgcttgcattttaagataccacagactaatgtgtcagtggctatatttatgctggatacggtaacactgtgtggtaattcagacgacttcctttcacagcaacctgagcgaccaagggatgttaagctcgctaggacccagctctcctggttgaagaagcagttggctgcagcccgtgaggattacgtgttggttgctggacactaccctgtgtggtcaatcgccgagcacggaccaacgcattgcctggtgaagcagctgcgcccattactggctacctatggggtcaccgcctatctgtgcggccatgaccacaatctgcagtatctgcaggatgagaacggcgtcggatacgtattaagcggggctggcaatttcatggaccctagcaaaagacaccaacgcaaggtccccaacggctaccttcgcttccactacggcacggaggacagcctgggcggtttcgcatacgtggagatcagcagcaaggaaatgactgtgacgtatatcgaggcctcaggtaagtcactgtttaagactagattgccaaggcgggcacggccttag

SEQ ID NO: 42146 - DNA, 978 bp, Artificial Sequence
  derived and/or modified sequence
atggacatgtggaccgctcttctcatactccaggcgctactactaccgagcctggctgacggcgcaacccccgctcttaggttcgtcgcggtgggtgactggggcggagtgcctaatgccccatttcacaccgcaagggagatggccaatgccaaggagatcgccaggaccgtgcagatcctgggggcagactttatattatcccttggagacaacttctactttaccggcgttcaggacatcaatgacaagcgctttcaagaaaccttcgaggatgtgttttctgataggtccctcagaaaagtgccgtggtacgtcctcgccggaaatcatgaccatctcggaaatgtgagcgcgcagattgcttactctaaaattagcaaacggtggaacttcccttcccccttctatagactgcactttaagattccccagactaatgtctcagtggccattttcatgttagataccgtgacgctgtgcggcaactcagacgactttctgagccagcagcccgagcgccctagagacgtgaaattggctcggacacagctgtcctggcttaaaaagcaactggcggctgctagggaggactatgtcctcgttgccggtcactatcccgtgtggtccattgccgaacacggaccaacgcactgcttggtgaaacagttacggcctctgctcgccacctacggggtcacagcatatctgtgtgggcacgatcacaacctgcagtatctccaggacgaaaatggagtgggatacgtgctctccggcgctggtaacttcatggacccttctaaacgacatcaacgtaaggttcccaatggatatctgcggttccactatggcactgaagattctctgggcggattcgcctacgttgaaataagctcaaaggagatgacagtaacatacatcgaagccagcgggaagagtctgtttaagacacgactccccagacgcgcacgcccatag

SEQ ID NO: 42147 - DNA, 978 bp, Artificial Sequence
  derived and/or modified sequence
atggacatgtggaccgcattactgatcttacaagctttgttactgccaagtttggccgacggagccaccccagcccttcggtttgtggcagtcggggattgggggggtgtcccaaacgcacccttccacaccgctcgtgagatggccaacgctaaggagattgcccgaaccgtccagattctaggggctgactttattctctcccttggggacaacttctacttcaccggagtgcaggacatcaacgacaagcgatttcaggaaacatttgaggatgtgttttccgataggagcctgcgaaaggtcccatggtatgtgcttgcagggaaccatgaccacttggggaacgtctctgctcaaatcgcctattccaaaatcagcaagaggtggaattttccctcacccttctatcggctccactttaaaatcccccaaacaaatgtcagcgttgctattttcatgctggacacggtaacactctgtgggaatagcgacgactttctcagccagcagcctgagcgaccccgagacgttaaactggcgcgtactcagctgtcctggctaaagaagcagctcgctgcggcaagggaggactacgtgcttgtggccggtcactaccccgtttggtctatcgccgaacacggcccaacgcattgtctggtaaagcagctgcggccattgctggcgacgtacggagtgactgcctacctgtgcggacatgatcacaacctccagtatctgcaagacgagaacggcgtgggttatgttctcagcggggctggcaactttatggatccatcaaagagacaccagcggaaagtgccaaatggctatctcaggttccattatggcacagaagattcgctgggtggtttcgcttatgtggaaatctcatcaaaagaaatgaccgtgacatatatcgaggccagcggtaagagtcttttcaagactcgcctgccacgccgagctcgaccttag

SEQ ID NO: 42148 - DNA, 1699 bp, Artificial Sequence
  derived and/or modified sequence
gctcacctgggtcagccctgagccctcgagcagggcggatcggccgctgcctgcttaaagctggggccgccaggagtgcgatcgcctgcggatctgcagctgggcaccggccgcaacgcccgccccgcgacggcagggctgggaatgggggggaccaagcacttcgcagggtgacccggggagatctgtgagccagtggcctcagcgttgaatgagagctctctcccgggtccgcgctcgcagggactgaagggactcctgaatgtccgcgggacgtgtcgcggcggcgcccagcacggaggaggcaggcagggagggaataaaggctcagggaccggcagttctactctagagcccaccagcctctcagagcctccggtgactggcctgtgtctccccctggatggacatgtggacggcgctgctcatcctgcaagccttgttgctaccctccctggctgatggtgccacccctgccctgcgctttgtagccgtgggtgactggggaggggtccccaatgccccattccacacggcccgggaaatggccaatgccaaggagatcgctcggactgtgcagatcctgggtgcagacttcatcctgtctctaggggacaatttttacttcactggtgtgcaagacatcaatgacaagaggttccaggagacctttgaggacgtattctctgaccgctcccttcgcaaagtgccctggtacgtgctagccggaaaccatgaccaccttggcaatgtctctgcccagattgcatactctaagatctccaagcgctggaacttccccagccctttctaccgcctgcacttcaagatcccacagaccaatgtgtctgtggccatttttatgctggacacagtgacactatgtggcaactcagatgacttcctcagccagcagcctgagaggccccgagacgtgaagctggcccgcacacagctgtcctggctcaagaaacagctggcggcggccagggaggactacgtgctggtggctggccactaccccgtgtggtccatagccgagcacgggcctacccactgcctggtcaagcagctacggccactgctggccacatacggggtcactgcctacctgtgcggccacgatcacaatctgcagtacctgcaagatgagaatggcgtgggctacgtgctgagtggggctgggaatttcatggacccctcaaagcggcaccagcgcaaggtccccaacggctatctgcgcttccactatgggactgaagactcactgggtggctttgcctatgtggagatcagctccaaagagatgactgtcacttacatcgaggcctcgggcaagtccctctttaagaccaggctgccgaggcgagccaggccctgaactcccatgactgcccagctctgaggcccgatctccactgttgggtgggtgggccctgccgggaccctgctcacaggcaggcttttcctccaacctgtggcgctgcagcagggcaggaaggggaaacacagctgatgaactgtggtgccacatgacccttgtggcacagatgcccacgtatgtgaaacacacatggacatgtgtcccagccacagtgttatgctctgtggctggctcacctttgctgagttccggggtgcaatgggggagggagggagggaaagcttcctcctaaatcaagcatctttctgttactga

SEQ ID NO: 42149 - DNA, 1629 bp, Artificial Sequence
  derived and/or modified sequence
cgccggggctcacctgggtcagccctgagccctcgagcagggcggatcggccgctgcctgcttaaagctggggccgccaggagtgcgatcgcctgcggatctgcagctgggcaccggccgcaacgcccgccccgcgacggcagggactgaagggactcctgaatgtccgcgggacgtgtcgcggcggcgcccagcacggaggaggcaggcagggagggaataaaggctcagggaccggcagttctactctagagcccaccagcctctcagagcctccggtgactggcctgtgtctccccctggatggacatgtggacggcgctgctcatcctgcaagccttgttgctaccctccctggctgatggtgccacccctgccctgcgctttgtagccgtgggtgactggggaggggtccccaatgccccattccacacggcccgggaaatggccaatgccaaggagatcgctcggactgtgcagatcctgggtgcagacttcatcctgtctctaggggacaatttttacttcactggtgtgcaagacatcaatgacaagaggttccaggagacctttgaggacgtattctctgaccgctcccttcgcaaagtgccctggtacgtgctagccggaaaccatgaccaccttggcaatgtctctgcccagattgcatactctaagatctccaagcgctggaacttccccagccctttctaccgcctgcacttcaagatcccacagaccaatgtgtctgtggccatttttatgctggacacagtgacactatgtggcaactcagatgacttcctcagccagcagcctgagaggccccgagacgtgaagctggcccgcacacagctgtcctggctcaagaaacagctggcggcggccagggaggactacgtgctggtggctggccactaccccgtgtggtccatagccgagcacgggcctacccactgcctggtcaagcagctacggccactgctggccacatacggggtcactgcctacctgtgcggccacgatcacaatctgcagtacctgcaagatgagaatggcgtgggctacgtgctgagtggggctgggaatttcatggacccctcaaagcggcaccagcgcaaggtccccaacggctatctgcgcttccactatgggactgaagactcactgggtggctttgcctatgtggagatcagctccaaagagatgactgtcacttacatcgaggcctcgggcaagtccctctttaagaccaggctgccgaggcgagccaggccctgaactcccatgactgcccagctctgaggcccgatctccactgttgggtgggtgggccctgccgggaccctgctcacaggcaggcttttcctccaacctgtggcgctgcagcagggcaggaaggggaaacacagctgatgaactgtggtgccacatgacccttgtggcacagatgcccacgtatgtgaaacacacatggacatgtgtcccagccacagtgttatgctctgtggctggctcacctttgctgagttccggggtgcaatgggggagggagggagggaaagcttcctcctaaatcaagcatctttctgttactgatgttcaataaaagaatagttgccaaggctg

SEQ ID NO: 42150 - DNA, 1556 bp, Artificial Sequence
  derived and/or modified sequence
cgccggggctcacctgggtcagccctgagccctcgagcagggcggatcggccgctgcctgcttaaagctggggccgccaggagtgcgatcgcctgcggatctgcagctgggcaccggccgcaacgcccgccccgcgacggcagggaataaaggctcagggaccggcagttctactctagagcccaccagcctctcagagcctccggtgactggcctgtgtctccccctggatggacatgtggacggcgctgctcatcctgcaagccttgttgctaccctccctggctgatggtgccacccctgccctgcgctttgtagccgtgggtgactggggaggggtccccaatgccccattccacacggcccgggaaatggccaatgccaaggagatcgctcggactgtgcagatcctgggtgcagacttcatcctgtctctaggggacaatttttacttcactggtgtgcaagacatcaatgacaagaggttccaggagacctttgaggacgtattctctgaccgctcccttcgcaaagtgccctggtacgtgctagccggaaaccatgaccaccttggcaatgtctctgcccagattgcatactctaagatctccaagcgctggaacttccccagccctttctaccgcctgcacttcaagatcccacagaccaatgtgtctgtggccatttttatgctggacacagtgacactatgtggcaactcagatgacttcctcagccagcagcctgagaggccccgagacgtgaagctggcccgcacacagctgtcctggctcaagaaacagctggcggcggccagggaggactacgtgctggtggctggccactaccccgtgtggtccatagccgagcacgggcctacccactgcctggtcaagcagctacggccactgctggccacatacggggtcactgcctacctgtgcggccacgatcacaatctgcagtacctgcaagatgagaatggcgtgggctacgtgctgagtggggctgggaatttcatggacccctcaaagcggcaccagcgcaaggtccccaacggctatctgcgcttccactatgggactgaagactcactgggtggctttgcctatgtggagatcagctccaaagagatgactgtcacttacatcgaggcctcgggcaagtccctctttaagaccaggctgccgaggcgagccaggccctgaactcccatgactgcccagctctgaggcccgatctccactgttgggtgggtgggccctgccgggaccctgctcacaggcaggcttttcctccaacctgtggcgctgcagcagggcaggaaggggaaacacagctgatgaactgtggtgccacatgacccttgtggcacagatgcccacgtatgtgaaacacacatggacatgtgtcccagccacagtgttatgctctgtggctggctcacctttgctgagttccggggtgcaatgggggagggagggagggaaagcttcctcctaaatcaagcatctttctgttactgatgttcaataaaagaatagttgccaaggctg

SEQ ID NO: 42151 - DNA, 1472 bp, Artificial Sequence
  derived and/or modified sequence
cccgggacagccctcggagaaactgcatcatcctcactaatgatccacttcctcctcagggaataaaggctcagggaccggcagttctactctagagcccaccagcctctcagagcctccggtgactggcctgtgtctccccctggatggacatgtggacggcgctgctcatcctgcaagccttgttgctaccctccctggctgatggtgccacccctgccctgcgctttgtagccgtgggtgactggggaggggtccccaatgccccattccacacggcccgggaaatggccaatgccaaggagatcgctcggactgtgcagatcctgggtgcagacttcatcctgtctctaggggacaatttttacttcactggtgtgcaagacatcaatgacaagaggttccaggagacctttgaggacgtattctctgaccgctcccttcgcaaagtgccctggtacgtgctagccggaaaccatgaccaccttggcaatgtctctgcccagattgcatactctaagatctccaagcgctggaacttccccagccctttctaccgcctgcacttcaagatcccacagaccaatgtgtctgtggccatttttatgctggacacagtgacactatgtggcaactcagatgacttcctcagccagcagcctgagaggccccgagacgtgaagctggcccgcacacagctgtcctggctcaagaaacagctggcggcggccagggaggactacgtgctggtggctggccactaccccgtgtggtccatagccgagcacgggcctacccactgcctggtcaagcagctacggccactgctggccacatacggggtcactgcctacctgtgcggccacgatcacaatctgcagtacctgcaagatgagaatggcgtgggctacgtgctgagtggggctgggaatttcatggacccctcaaagcggcaccagcgcaaggtccccaacggctatctgcgcttccactatgggactgaagactcactgggtggctttgcctatgtggagatcagctccaaagagatgactgtcacttacatcgaggcctcgggcaagtccctctttaagaccaggctgccgaggcgagccaggccctgaactcccatgactgcccagctctgaggcccgatctccactgttgggtgggtgggccctgccgggaccctgctcacaggcaggcttttcctccaacctgtggcgctgcagcagggcaggaaggggaaacacagctgatgaactgtggtgccacatgacccttgtggcacagatgcccacgtatgtgaaacacacatggacatgtgtcccagccacagtgttatgctctgtggctggctcacctttgctgagttccggggtgcaatgggggagggagggagggaaagcttcctcctaaatcaagcatctttctgttactgatgttcaataaaagaatagttgccaaggctg

SEQ ID NO: 42152 - DNA, 1658 bp, Artificial Sequence
  derived and/or modified sequence
cggctccgggagctctgtcaacagtggctacagcccgagacccataccaaggagcagatcctggagctgctggtgctggagcagtttctgatcatcctgcctaaggagctccaggcccgggtgcaggagcatcacccagagagcagggaggacgtggttgttgttctggaggatttgcagctggatcttggagaaacaggacaacaggacccagaccagccaaagaaacaaaaaatacttgtggaggagatggcccctctgaaaggagtacaggaacagcaggttcggcatgagtgtgaagttacaaagcctgagaaagagaagggtgaggagacaaggattgagaatgggaagcttattgtagtaacagactcttgtggaagagtagagtcatctgggaaaatatctgaacccatggaggctcataatgagggctctaacttggaaaggcatcaggccaagcccaaagagaagattgagtataaatgctcagaacgtgagcagagattcatccagcacttggacctgattgaacatgcgagtacacacacgggaaagaaatcctgcgagtctgatgtgtgtcagagttccagtcttacaggacataagaaagtcctctctagagagaaaggtcatcagtgtcatgagtgtgggaaagcctttcagaggagttcacacctcgtcagacatcagaaaatccatcttggtgagaagccttatcagtgcaatgagtgtggcaaagtctttagccagaatgcaggccttttggaacatctcagaattcatactggagagaaaccttatctatgtatccattgtggaaaaaattttaggcgcagctctcaccttaatcgacatcagagaattcacagtcaggaggagccctgtgagtgcaaggagtgtggaaaaacctttagtcaggccttactcctcacccaccatcagagaatccatagtcactccaaaagccatcaatgtaacgagtgtggaaaagctttcagtttgacctcagaccttattcgacaccacagaattcatactggagaaaaacctttcaagtgtaacatatgccagaaagccttccgactaaactcacaccttgctcagcatgtaagaatccacaatgaagaaaaaccctatcagtgtagtgaatgtggagaagccttcaggcaaaggtcaggtctttttcaacatcagagatatcaccacaaagacaaactggcttgatgaggtgttctctccttgtagaacatcagagaaggcacattgactagcaaacagcactttaggaaaagtcaccgtagcccactgtgggatcagaaaattcttgggggctgagttggaggctccctgcctctattctctctcctttgctttccttgaagtcagctttggaccacaataatttcactgtagatgatatgctaggatcaaagttaaacagcattcttcactgcaggacatctcagagcatgtaacataactgcatgattatatactctaagcaatagagagcttcatgactgagtaagagttttgaagtcagcagtgaatcaagtgacagatttgcaggcttaagcagaacaagggaagattgatatttttggatatgctatagcagctttctcctatgaaataaaactgatgatgtttggaag

SEQ ID NO: 42153 - protein, 464 aa, Artificial Sequence
  derived and/or modified sequence
METGFPAIMYPGSFIGGWGEEYLSWEGPGLPDFVFQQPVESEAMHCSNPKSGVVLATVARGPDACQILTRAPLGQDPPQRTVLGLLTANGQYRRTCGQGITRIRCYSGSENAFPPAGKKALPDCGVQEPPKQGFDIYMDELEQGDRDSCSVREGMAFEDVYEVDTGTLKSDLHFLLDFNTVSPMLVDSSLLSQSEDISSLGTDVINVTEYAEEIYQYLREAEIRHRPKAHYMKKQPDITEGMRTILVDWLVEVGEEYKLRAETLYLAVNFLDRFLSCMSVLRGKLQLVGTAAMLLASKYEEIYPPEVDEFVYITDDTYTKRQLLKMEHLLLKVLAFDLTVPTTNQFLLQYLRRQGVCVRTENLAKYVAELSLLEADPFLKYLPSLIAAAAFCLANYTVNKHFWPETLAAFTGYSLSEIVPCLSELHKAYLDIPHRPQQAIREKYKASKYLCVSLMEPPAVLLLQ

SEQ ID NO: 42154 - DNA, 1395 bp, Artificial Sequence
  derived and/or modified sequence
atggagaccggcttccccgccatcatgtaccccggcagcttcatcggcggctggggcgaggagtacctgagctgggagggccccggcctgcccgacttcgtgttccagcagcccgtggagagcgaggccatgcactgcagcaaccccaagagcggcgtggtgctggccaccgtggccagaggccccgacgcctgccagatcctgaccagagcccccctgggccaggaccccccccagagaaccgtgctgggcctgctgaccgccaacggccagtacagaagaacctgcggccagggcatcaccagaatcagatgctacagcggcagcgagaacgccttcccccccgccggcaagaaggccctgcccgactgcggcgtgcaggagccccccaagcagggcttcgacatctacatggacgagctggagcagggcgacagagacagctgcagcgtgagagagggcatggccttcgaggacgtgtacgaggtggacaccggcaccctgaagagcgacctgcacttcctgctggacttcaacaccgtgagccccatgctggtggacagcagcctgctgagccagagcgaggacatcagcagcctgggcaccgacgtgatcaacgtgaccgagtacgccgaggagatctaccagtacctgagagaggccgagatcagacacagacccaaggcccactacatgaagaagcagcccgacatcaccgagggcatgagaaccatcctggtggactggctggtggaggtgggcgaggagtacaagctgagagccgagaccctgtacctggccgtgaacttcctggacagattcctgagctgcatgagcgtgctgagaggcaagctgcagctggtgggcaccgccgccatgctgctggccagcaagtacgaggagatctacccccccgaggtggacgagttcgtgtacatcaccgacgacacctacaccaagagacagctgctgaagatggagcacctgctgctgaaggtgctggccttcgacctgaccgtgcccaccaccaaccagttcctgctgcagtacctgagaagacagggcgtgtgcgtgagaaccgagaacctggccaagtacgtggccgagctgagcctgctggaggccgaccccttcctgaagtacctgcccagcctgatcgccgccgccgccttctgcctggccaactacaccgtgaacaagcacttctggcccgagaccctggccgccttcaccggctacagcctgagcgagatcgtgccctgcctgagcgagctgcacaaggcctacctggacatcccccacagaccccagcaggccatcagagagaagtacaaggccagcaagtacctgtgcgtgagcctgatggagccccccgccgtgctgctgctgcagtag

SEQ ID NO: 42155 - DNA, 1962 bp, Artificial Sequence
  derived and/or modified sequence
aacagacgcgggtgggcagctcagccgcatcgctaagcccggccgcctcccaggctggaatccctcgacacttggtccttcccgccccgcccttccgtgccctgcccttccctgcccttccccgccctgccccgcccggcccggcccggccctgcccaaccctgccccgccctgccccgcccagccggccacctcttaaccgcgatcctccagtgcacttgccagttgttccggacacatagaaagataacgacgggaagagcggggcccgctttggggtccaggcaggttttggggcctcctgtctggtgggaggaggccgcagcgcagcaccctgctcgtcacttgggatggagaccggctttcccgcaatcatgtaccctggatcttttattgggggctggggagaagagtatctcagctgggaaggaccggggctcccagatttcgtcttccagcagcccgtggagtctgaagcaatgcactgcagcaaccccaagagtggagttgtgctggctacagtggcccgaggtcccgatgcttgtcagatactcaccagagccccgctgggccaggatcccccgcagaggacagtgctagggctgctaactgcaaatgggcagtacaggaggacctgtggccaggggatcacaagaatcaggtgttattctggatcagaaaatgccttccctccagctggaaagaaagcactccctgactgtggggtccaagagccccccaagcaagggtttgacatctacatggatgaactagagcagggggacagagacagctgctcggtcagagaggggatggcatttgaggatgtgtatgaagtagacaccggcacactcaagtcagacctgcacttcctgctggatttcaacacagtttcccctatgctggtagattcatctctcctctcccagtctgaagatatatccagtcttggcacagatgtgataaatgtgactgaatatgctgaagaaatttatcagtaccttagggaagctgaaataaggcacagacccaaagcacactacatgaagaagcagccagacatcacggaaggcatgcgcacgattctggtggactggctggtggaggttggggaagaatataaacttcgagcagagaccctgtatctggctgtcaacttcctggacaggttcctttcatgtatgtctgttctgagagggaaactgcagctcgtaggaacagcagctatgcttttggcttcgaaatatgaagagatatatcctcctgaagtagacgagtttgtctatatcaccgatgatacatacacaaaacgacaactgttaaaaatggaacacttgcttctgaaagttctagcttttgatctgacagtaccaaccaccaaccagtttctccttcagtacttgaggcgacaaggagtgtgcgtcaggactgagaacctggctaagtacgtagcagagctgagtctacttgaagcagatccattcttgaaatatcttccttcactgatagctgcagcagctttttgcctggcaaactatactgtgaacaagcacttttggccagaaacccttgctgcatttacagggtattcattaagtgaaattgtgccttgcctgagtgagcttcataaagcgtaccttgatataccccatcgacctcagcaagcaattagggagaagtacaaggcttcaaagtacctgtgtgtgtccctcatggagccacctgcagttcttcttctacaataagtttctgaatggaagcacttccagaacttcacctccatatcagaagtgccaataatcgtcataggcttctgcacgttggatcaactaatgttgtttacaatatagatgacattttaaaaatgtaaatgaatttagtttcccttagactttagtagtttgtaatatagtccaacattttttaaacaataaactgcttgtcttatgaccatgtgttaga

SEQ ID NO: 42156 - DNA, 1841 bp, Artificial Sequence
  derived and/or modified sequence
gccgcagcctgcgcagccccgaggaccccgcgtcgctctcccgagccagggttctcaggagcgggccgcgcaggagacgttagagggggttgttagcggctgttgggagaacgggtcacggaaacagtcccttccaaagccggggccatcgtggggtgggcgagtccgccctcccaggccgggggcgcggaccagaggggacgtgtgcagacggccgcggtcagccccacctcgcccgggcggagacgcacagctggagctggagggccgtcgcccgttgggccctcaggggcctgaacgcccaggggtcgcggcgagtccacccggagcgagtcagcagcccgtggagtctgaagcaatgcactgcagcaaccccaagagtggagttgtgctggctacagtggcccgaggtcccgatgcttgtcagatactcaccagagccccgctgggccaggatcccccgcagaggacagtgctagggctgctaactgcaaatgggcagtacaggaggacctgtggccaggggatcacaagaatcaggtgttattctggatcagaaaatgccttccctccagctggaaagaaagcactccctgactgtggggtccaagagccccccaagcaagggtttgacatctacatggatgaactagagcagggggacagagacagctgctcggtcagagaggggatggcatttgaggatgtgtatgaagtagacaccggcacactcaagtcagacctgcacttcctgctggatttcaacacagtttcccctatgctggtagattcatctctcctctcccagtctgaagatatatccagtcttggcacagatgtgataaatgtgactgaatatgctgaagaaatttatcagtaccttagggaagctgaaataaggcacagacccaaagcacactacatgaagaagcagccagacatcacggaaggcatgcgcacgattctggtggactggctggtggaggttggggaagaatataaacttcgagcagagaccctgtatctggctgtcaacttcctggacaggttcctttcatgtatgtctgttctgagagggaaactgcagctcgtaggaacagcagctatgcttttggcttcgaaatatgaagagatatatcctcctgaagtagacgagtttgtctatatcaccgatgatacatacacaaaacgacaactgttaaaaatggaacacttgcttctgaaagttctagcttttgatctgacagtaccaaccaccaaccagtttctccttcagtacttgaggcgacaaggagtgtgcgtcaggactgagaacctggctaagtacgtagcagagctgagtctacttgaagcagatccattcttgaaatatcttccttcactgatagctgcagcagctttttgcctggcaaactatactgtgaacaagcacttttggccagaaacccttgctgcatttacagggtattcattaagtgaaattgtgccttgcctgagtgagcttcataaagcgtaccttgatataccccatcgacctcagcaagcaattagggagaagtacaaggcttcaaagtacctgtgtgtgtccctcatggagccacctgcagttcttcttctacaataagtttctgaatggaagcacttccagaacttcacctccatatcagaagtgccaataatcgtcataggcttctgcacgttggatcaactaatgttgtttacaatatagatgacattttaaaaatgtaaatgaatttagtttcccttagactttagtagtttgtaatatagtccaacattttttaaacaataaactgcttgtcttatgaccatgtgttaga

SEQ ID NO: 42157 - DNA, 1395 bp, Artificial Sequence
  derived and/or modified sequence
atggaaactggctttcctgcgatcatgtatccgggctccttcattggggggtggggcgaggaatatctgtcctgggagggaccagggctgcccgatttcgtgttccaacagcccgtggagtccgaggccatgcattgctctaatcccaagtctggcgtcgtgcttgcaaccgtggcccgtggcccagacgcctgccagattctgactcgcgccccgctcggacaggaccctccccagcgcactgtgttgggactgttaacagcaaacggccaatatcgacggacatgtggacaaggcataacaaggatccgctgttactctgggtcagaaaacgccttccccccagctgggaaaaaggccctgcccgattgcggcgtccaggagcctcctaaacaaggcttcgatatctatatggacgagctggaacaaggagatcgggacagctgcagcgtcagggaaggcatggctttcgaggatgtttacgaggtggataccggcacgctgaaatcggacctgcactttctcctcgactttaacacagtgagccccatgcttgtggactcatccctgctttcgcagagcgaagacatttccagccttggaaccgacgttattaacgttactgagtacgcggaggaaatttatcaatacctcagagaagccgaaattagacaccgccccaaggcccattatatgaaaaagcaaccagacatcaccgaaggtatgcgaaccatactggtggattggttggtcgaggtaggggaagaatataagcttcgagccgaaactttatatctggctgtaaactttctagatagatttctgtcctgcatgtctgtcctgaggggcaaactacagctggttggaaccgccgcaatgctcctggccagcaagtatgaggaaatttaccctccggaggttgacgagtttgtgtacatcacggacgatacgtatacaaagagacaactgctgaagatggagcacctgcttctgaaggtcctggcgttcgacttgacggttccgacaacaaaccaattcctgttacagtatcttcgtcggcagggggtctgtgtacggacagaaaatctcgctaaatacgtagccgaattaagcctgctggaagctgacccctttctaaaatatctgccctccctgatcgctgcagcggcattttgtcttgccaattataccgtcaataaacatttctggccagagaccctggccgccttcactgggtactccctgagcgagatcgtgccttgtctaagtgaattacacaaggcatacctggacatccctcaccggccgcagcaggctatccgggaaaagtacaaggcgagcaagtacctatgtgtgtcccttatggagcctccagccgtgctcctgttacagtag

SEQ ID NO: 42158 - DNA, 1395 bp, Artificial Sequence
  derived and/or modified sequence
atggagaccggcttccctgccatcatgtacccaggcagcttcatcggcggctggggcgaggagtacctgtcctgggagggccctggcctgcctgactttgtgttccagcagcctgtggagagcgaggccatgcactgcagcaaccccaagtctggagtggtgctggccaccgtggcccggggcccagatgcctgccagatcctgacccgggcccccctgggccaggaccccccccagaggacagtgctgggcctgctgacagccaacggccagtacagaaggacctgtggccagggcatcacccgcatccgctgctacagcggctctgaaaatgccttccccccagctgggaagaaggccctgcctgactgtggggtgcaggagccccccaagcagggctttgacatctacatggatgagctggagcagggcgaccgggacagctgcagcgtgcgggagggcatggcctttgaagatgtgtatgaggtggacaccggcaccctgaagagtgacctgcacttcctgctggacttcaacacagtgagccccatgctggtggacagcagcctgctgagccagagcgaggacatcagcagcctgggcacagatgtgatcaacgtgacagaatatgcagaggagatctaccagtacctgcgggaggccgagatccgccaccggcccaaggcccactacatgaagaagcagcctgacatcacagagggcatgaggaccatcctggtggactggctggtggaggtgggggaggagtacaagctgcgggcagagaccctgtacctggccgtgaacttcctggaccgcttcctgagctgcatgtctgtgctgcggggcaagctgcagctggtgggcacagctgccatgctgctggccagcaaatatgaggagatctacccacctgaggtggatgaatttgtgtacatcacagatgacacctacaccaagaggcagctgctgaagatggagcacctgctgctgaaggtgctggcctttgacctgactgtgcccaccaccaaccagttcctgctgcagtacctgcggcggcagggcgtgtgtgtgaggacagagaacctggccaagtatgtggccgagctgagcctgctggaggccgaccccttcctgaagtacctgcccagcctgattgctgctgctgccttctgcctggccaactacacagtgaacaagcacttctggccagagaccctggccgccttcaccggctacagcctgtctgagatcgtgccctgcctgtctgagctgcacaaggcctacctggacatcccccaccggccccagcaggccatccgggagaagtacaaggccagcaagtacctgtgtgtgtccctgatggagcccccagctgtgctgctgctgcagtag

SEQ ID NO: 42159 - DNA, 1395 bp, Artificial Sequence
  derived and/or modified sequence
atggagaccggcttccccgccatcatgtaccccggcagcttcatcggcggctggggagaggagtatttgtcatgggaagggcccggcctgcccgatttcgtgtttcaacagccagtggaatcagaagccatgcactgttctaatccaaaatctggcgtggtcctagccacggtagctaggggtcccgatgcttgtcagattttgacccgggctccgctagggcaagaccctccacagcgtaccgtgctcgggctgttgactgcaaatgggcagtaccggaggacttgcgggcagggtattacacgcatccgatgctacagcgggtctgaaaacgctttcccccccgcagggaagaaggcactccccgactgcggggtgcaggaaccccccaaacaggggtttgatatttacatggatgagctagagcagggagatcgcgattcatgtagcgttcgcgagggaatggccttcgaagacgtgtacgaggtggacactggaaccttgaagtctgacctgcatttcctcctggacttcaatactgtatccccaatgttggtagatagttccctgcttagtcagtctgaggatatctctagccttggtacagacgtgatcaacgtcaccgagtatgcagaggagatttaccaatatctgagggaagcagagatcaggcaccggccgaaagctcactatatgaagaagcagcccgatattaccgaaggcatgcgtaccatcctcgtggactggcttgtagaggtcggagaggagtacaagcttagggctgagaccctctacttggcagttaatttcttagacaggtttctctcctgtatgtctgtgttacgggggaaacttcaactcgttggcaccgctgctatgcttcttgccagcaaatacgaagagatctacccccctgaagtggatgagttcgtctacataaccgacgacacttacaccaagaggcagttgctgaagatggaacacctgctgttgaaggtcttggcctttgatctgaccgtgcccaccactaaccaattcctgttgcagtatctaaggcgccagggcgtgtgcgtccgcactgagaatttagctaaatatgttgcagagctcagcctgctagaggcagacccatttcttaagtatctgccctcattgattgctgctgcagctttctgtcttgcgaattacacagtgaataaacacttctggcccgagactctggctgcttttacagggtactccctctctgagatcgtgccttgcctgtcggagttgcataaagcatatctcgacattccgcatagaccacagcaggctatccgggaaaagtataaagccagcaagtacttgtgtgtgagcctaatggaaccgcctgctgtcttactcttgcagtag

SEQ ID NO: 42160 - DNA, 1395 bp, Artificial Sequence
  derived and/or modified sequence
atggagactggcttcccagccataatgtatccaggctcattcatcgggggatggggtgaagagtatctatcatgggaaggccctggactgcctgactttgtattccagcaaccagtggagtccgaagcgatgcactgttccaatcccaagagcggggttgtcctggcaactgtagctcgcggacctgatgcttgccagatactgaccagggccccacttggccaggatcccccacaacggaccgtgttggggttgcttacagctaatggtcagtaccgcagaacatgcggtcagggcattacccgcattaggtgctatagcgggtcagagaatgcattcccaccggcaggaaaaaaggccctccctgactgcggtgttcaagagcccccaaagcagggcttcgacatctacatggatgaactggaacaaggggacagagacagttgctctgttcgagaagggatggcattcgaagatgtttacgaagtagacaccggcaccctaaagagtgatctacacttcctgctggacttcaataccgtgagccctatgctcgtggatagctccttgctgtcacaatcggaggatatcagctcactcggcacagatgtcataaatgttacagagtatgcagaggaaatttaccagtatcttagggaggccgaaatccgacatcggcctaaggctcactacatgaagaagcaacctgacataactgagggcatgcgcacaatcctcgtggattggttggttgaggtgggagaagagtataagcttcgtgcagaaactctctacttggcagtgaactttctggacaggtttctgagttgcatgtctgtgctcagggggaaattacaattggtcggcaccgcagccatgctcctggccagcaaatatgaggaaatctatcctcccgaagtcgacgagtttgtgtatataacagacgacacctacacaaaacgccagctgctgaagatggaacatctgcttctgaaggtcctggccttcgacctcacagtgccgaccacgaaccagttcttactgcagtacctaagacgccaaggggtgtgcgtgaggactgagaatttggcgaagtatgtggccgagctgtcactattggaggccgaccccttcctcaaatacctgccatccctaattgccgcagccgctttttgtttggcaaactatacggttaacaaacacttttggcctgaaacactcgctgctttcacgggctattcactgagcgaaattgtgccatgtctctccgaactacataaagcttaccttgatatcccccatcgtccccagcaggcaatacgcgagaaatacaaggcttccaagtacctctgcgtgagcctgatggagccccctgcagttctcctgctgcagtag

SEQ ID NO: 42161 - protein, 586 aa, Artificial Sequence
  derived and/or modified sequence
MPKPINVRVTTMDAELEFAIQPNTTGKQLFDQVVKTIGLREVWYFGLHYVDNKGFPTWLKLDKKVSAQEVRKENPLQFKFRAKFYPEDVAEELIQDITQKLFFLQVKEGILSDEIYCPPETAVLLGSYAVQAKFGDYNKEVHKSGYLSSERLIPQRVMDQHKLTRDQWEDRIQVWHAEHRGMLKDNAMLEYLKIAQDLEMYGINYFEIKNKKGTDLWLGVDALGLNIYEKDDKLTPKIGFPWSEIRNISFNDKKFVIKPIDKKAPDFVFYAPRLRINKRILQLCMGNHELYMRRRKPDTIEVQQMKAQAREEKHQKQLERQQLETEKKRRETVEREKEQMMREKEELMLRLQDYEEKTKKAERELSEQIQRALQLEEERKRAQEEAERLEADRMAALRAKEELERQAVDQIKSQEQLAAELAEYTAKIALLEEARRRKEDEVEEWQHRAKEAQDDLVKTKEELHLVMTAPPPPPPPVYEPVSYHVQESLQDEGAEPTGYSAELSSEGIRDDRNEEKRITEAEKNERVQRQLLTLSSELSQARDENKRTHNDIIHNENMRQGRDKYKTLRQIRQGNTKQRIDEFEAL

SEQ ID NO: 42162 - protein, 554 aa, Artificial Sequence
  derived and/or modified sequence
MPKPINVRVTTMDAELEFAIQPNTTGKQLFDQVSAQEVRKENPLQFKFRAKFYPEDVAEELIQDITQKLFFLQVKEGILSDEIYCPPETAVLLGSYAVQAKFGDYNKEVHKSGYLSSERLIPQRVMDQHKLTRDQWEDRIQVWHAEHRGMLKDNAMLEYLKIAQDLEMYGINYFEIKNKKGTDLWLGVDALGLNIYEKDDKLTPKIGFPWSEIRNISFNDKKFVIKPIDKKAPDFVFYAPRLRINKRILQLCMGNHELYMRRRKPDTIEVQQMKAQAREEKHQKQLERQQLETEKKRRETVEREKEQMMREKEELMLRLQDYEEKTKKAERELSEQIQRALQLEEERKRAQEEAERLEADRMAALRAKEELERQAVDQIKSQEQLAAELAEYTAKIALLEEARRRKEDEVEEWQHRAKEAQDDLVKTKEELHLVMTAPPPPPPPVYEPVSYHVQESLQDEGAEPTGYSAELSSEGIRDDRNEEKRITEAEKNERVQRQLLTLSSELSQARDENKRTHNDIIHNENMRQGRDKYKTLRQIRQGNTKQRIDEFEAL

SEQ ID NO: 42163 - DNA, 1761 bp, Artificial Sequence
  derived and/or modified sequence
atgcccaagcccatcaacgtgagagtgaccaccatggacgccgagctggagttcgccatccagcccaacaccaccggcaagcagctgttcgaccaggtggtgaagaccatcggcctgagagaggtgtggtacttcggcctgcactacgtggacaacaagggcttccccacctggctgaagctggacaagaaggtgagcgcccaggaggtgagaaaggagaaccccctgcagttcaagttcagagccaagttctaccccgaggacgtggccgaggagctgatccaggacatcacccagaagctgttcttcctgcaggtgaaggagggcatcctgagcgacgagatctactgcccccccgagaccgccgtgctgctgggcagctacgccgtgcaggccaagttcggcgactacaacaaggaggtgcacaagagcggctacctgagcagcgagagactgatcccccagagagtgatggaccagcacaagctgaccagagaccagtgggaggacagaatccaggtgtggcacgccgagcacagaggcatgctgaaggacaacgccatgctggagtacctgaagatcgcccaggacctggagatgtacggcatcaactacttcgagatcaagaacaagaagggcaccgacctgtggctgggcgtggacgccctgggcctgaacatctacgagaaggacgacaagctgacccccaagatcggcttcccctggagcgagatcagaaacatcagcttcaacgacaagaagttcgtgatcaagcccatcgacaagaaggcccccgacttcgtgttctacgcccccagactgagaatcaacaagagaatcctgcagctgtgcatgggcaaccacgagctgtacatgagaagaagaaagcccgacaccatcgaggtgcagcagatgaaggcccaggccagagaggagaagcaccagaagcagctggagagacagcagctggagaccgagaagaagagaagagagaccgtggagagagagaaggagcagatgatgagagagaaggaggagctgatgctgagactgcaggactacgaggagaagaccaagaaggccgagagagagctgagcgagcagatccagagagccctgcagctggaggaggagagaaagagagcccaggaggaggccgagagactggaggccgacagaatggccgccctgagagccaaggaggagctggagagacaggccgtggaccagatcaagagccaggagcagctggccgccgagctggccgagtacaccgccaagatcgccctgctggaggaggccagaagaagaaaggaggacgaggtggaggagtggcagcacagagccaaggaggcccaggacgacctggtgaagaccaaggaggagctgcacctggtgatgaccgcccccccccccccccccccccccgtgtacgagcccgtgagctaccacgtgcaggagagcctgcaggacgagggcgccgagcccaccggctacagcgccgagctgagcagcgagggcatcagagacgacagaaacgaggagaagagaatcaccgaggccgagaagaacgagagagtgcagagacagctgctgaccctgagcagcgagctgagccaggccagagacgagaacaagagaacccacaacgacatcatccacaacgagaacatgagacagggcagagacaagtacaagaccctgagacagatcagacagggcaacaccaagcagagaatcgacgagttcgaggccctgtag

SEQ ID NO: 42164 - DNA, 1665 bp, Artificial Sequence
  derived and/or modified sequence
atgcccaagcccatcaacgtgagagtgaccaccatggacgccgagctggagttcgccatccagcccaacaccaccggcaagcagctgttcgaccaggtgagcgcccaggaggtgagaaaggagaaccccctgcagttcaagttcagagccaagttctaccccgaggacgtggccgaggagctgatccaggacatcacccagaagctgttcttcctgcaggtgaaggagggcatcctgagcgacgagatctactgcccccccgagaccgccgtgctgctgggcagctacgccgtgcaggccaagttcggcgactacaacaaggaggtgcacaagagcggctacctgagcagcgagagactgatcccccagagagtgatggaccagcacaagctgaccagagaccagtgggaggacagaatccaggtgtggcacgccgagcacagaggcatgctgaaggacaacgccatgctggagtacctgaagatcgcccaggacctggagatgtacggcatcaactacttcgagatcaagaacaagaagggcaccgacctgtggctgggcgtggacgccctgggcctgaacatctacgagaaggacgacaagctgacccccaagatcggcttcccctggagcgagatcagaaacatcagcttcaacgacaagaagttcgtgatcaagcccatcgacaagaaggcccccgacttcgtgttctacgcccccagactgagaatcaacaagagaatcctgcagctgtgcatgggcaaccacgagctgtacatgagaagaagaaagcccgacaccatcgaggtgcagcagatgaaggcccaggccagagaggagaagcaccagaagcagctggagagacagcagctggagaccgagaagaagagaagagagaccgtggagagagagaaggagcagatgatgagagagaaggaggagctgatgctgagactgcaggactacgaggagaagaccaagaaggccgagagagagctgagcgagcagatccagagagccctgcagctggaggaggagagaaagagagcccaggaggaggccgagagactggaggccgacagaatggccgccctgagagccaaggaggagctggagagacaggccgtggaccagatcaagagccaggagcagctggccgccgagctggccgagtacaccgccaagatcgccctgctggaggaggccagaagaagaaaggaggacgaggtggaggagtggcagcacagagccaaggaggcccaggacgacctggtgaagaccaaggaggagctgcacctggtgatgaccgcccccccccccccccccccccccgtgtacgagcccgtgagctaccacgtgcaggagagcctgcaggacgagggcgccgagcccaccggctacagcgccgagctgagcagcgagggcatcagagacgacagaaacgaggagaagagaatcaccgaggccgagaagaacgagagagtgcagagacagctgctgaccctgagcagcgagctgagccaggccagagacgagaacaagagaacccacaacgacatcatccacaacgagaacatgagacagggcagagacaagtacaagaccctgagacagatcagacagggcaacaccaagcagagaatcgacgagttcgaggccctgtag

SEQ ID NO: 42165 - DNA, 1761 bp, Artificial Sequence
  derived and/or modified sequence
atgccgaaaccaattaacgtgagggtcactacaatggatgcagagctcgaatttgcgatccagcccaataccaccggaaagcagttgttcgatcaggtggtgaaaaccattggcttgcgggaggtttggtacttcggcctacactatgttgacaacaaaggctttccaacctggctcaagctcgacaagaaggtgagtgcccaagaagtacggaaagagaacccactccaatttaagtttcgagcaaaattttacccagaagatgtggcagaagagttgatccaagacatcacccagaagttattttttttgcaggtcaaagagggcatcctctccgacgagatctattgtccccctgagacggctgtgttgctggggagttatgccgtgcaggctaaatttggtgactataataaggaggtccacaagagcggctacttgagctccgagcggcttattccccagagagtgatggaccagcataagctgactagggaccagtgggaggacaggattcaggtgtggcatgccgaacatcgggggatgctgaaggacaacgctatgcttgagtaccttaagatcgctcaggacctagaaatgtatggcataaattacttcgagataaaaaacaaaaagggcacagacttgtggctgggtgtagatgccctggggctaaacatctacgaaaaggacgataagctgacccctaaaatcggattcccctggtcagaaatccggaatatttccttcaatgacaaaaagttcgtgattaaacccatcgataagaaggctcccgatttcgtgttttacgccccacgactgagaattaacaaacgtattttacagttatgtatggggaaccacgagctctacatgcgcaggcgcaaacccgataccatcgaggtccagcaaatgaaagcgcaagcacgggaagagaagcatcaaaaacagctggagagacagcagttagaaacagagaagaaaaggcgtgagactgtagagagagagaaagagcaaatgatgagggaaaaggaagagctgatgctgcgcctgcaagactacgaagagaagacaaagaaagcagagagggaattgtccgagcagatccaaagagctctgcagctggaagaggaaaggaagcgggctcaagaagaggccgaaagacttgaagccgatagaatggccgccctacgagccaaagaggaacttgagagacaggccgtcgaccagatcaagtcacaggaacagctggctgccgagctcgccgagtataccgctaaaatagccttactggaggaggctcggaggaggaaggaggatgaggttgaggagtggcagcatcgcgccaaggaagcccaagatgacttagttaagacaaaagaggagctccatcttgtgatgaccgcaccaccaccccccccacccccagtgtacgaaccagtcagttatcatgtccaggaatctctgcaggacgagggcgctgagcccactgggtacagcgcagaactatcaagtgagggtatccgtgacgatagaaatgaggagaagagaattacagaggccgaaaagaatgagcgcgttcagagacagctcctcactctgtcctccgaattgtctcaggcccgggatgagaacaagagaactcataatgatataatccacaatgagaacatgaggcaaggtagagataagtataagacccttagacagatccgacagggcaatacaaaacaacgcattgacgaatttgaggccttatag

SEQ ID NO: 42166 - DNA, 1761 bp, Artificial Sequence
  derived and/or modified sequence
atgcccaaaccgatcaatgttcgagtgaccaccatggatgccgagctcgagtttgccatccagcctaataccacagggaagcagctcttcgaccaggttgttaagaccattggcctccgtgaggtgtggtacttcgggttgcattacgtggacaataaaggctttccaacttggttgaaactcgataagaaagtgtcggctcaggaggtacgaaaagaaaatcccctccaattcaaattccgggccaaattctatcccgaagacgttgctgaagagctcattcaggacataactcagaaattgttctttctgcaggtgaaagagggaatcctgtctgacgaaatatactgtccacctgaaacggctgtactgcttggatcatacgctgtacaggcaaagttcggagattacaacaaagaggttcacaaaagtgggtatctttcctcagaaaggctgatccctcagagggtcatggaccagcacaaactcacgagagatcagtgggaggatcgaattcaggtgtggcatgccgagcaccgcggaatgcttaaagacaacgcgatgctggaataccttaaaatcgcccaagatcttgaaatgtatggaattaattactttgagattaagaataaaaagggtacagacctctggctgggcgtggacgcgctgggtttaaacatctatgaaaaagatgacaaactcaccccgaagatcggttttccttggtccgagatccggaacatctccttcaacgacaagaagttcgttataaagcctattgacaagaaggccccagatttcgtgttctacgcaccgcgcttacgtattaataagaggatcctgcaactgtgcatgggcaaccacgaactgtacatgagaagacgaaaaccggacaccattgaagttcagcagatgaaagcacaggcccgggaggagaagcatcagaagcagctggaacgtcagcagcttgaaaccgaaaaaaagcgtcgggagacggtggaacgagagaaagaacagatgatgcgggagaaggaggaactgatgcttcggttacaggattatgaggaaaagacgaaaaaggcagaaagagagctgtccgagcagatccagcgggcattgcagctggaggaagaaaggaagagggctcaggaagaagcagagcgactggaagcagacagaatggcagcccttcgcgccaaagaggagctggagagacaggcagtggaccagataaaaagccaggagcagctggccgcggaacttgcagaatataccgccaagatcgctctgctggaggaggcacgcagaaggaaggaggatgaggtggaggagtggcagcaccgtgctaaagaagcacaagatgatttagtcaaaactaaagaagaattgcatctggtaatgacagcccctcccccgcctccaccccctgtgtacgagccagtcagctatcacgtccaagaatccctgcaagatgagggagctgaaccaactggttactccgcagaattatcatcggagggaatcagagatgacagaaacgaggagaaaagaattaccgaagccgaaaaaaacgagagagtccagcggcagcttctcaccctgagctctgagcttagtcaggctagagacgagaacaaaaggacccacaatgatatcatccataatgagaacatgcgccaaggccgcgataagtacaaaactttacgccagattcgacaggggaacacaaaacaaagaatcgacgaattcgaagcactgtag

SEQ ID NO: 42167 - DNA, 1665 bp, Artificial Sequence
  derived and/or modified sequence
atgcccaagcctatcaatgtccgggtcacaaccatggatgccgaactggagttcgcaattcaacccaataccaccggaaaacagctctttgaccaggtcagtgctcaggaggtgagaaaagagaacccactccaattcaagttcagggccaaattctaccctgaggacgtcgccgaagagctcatccaggatatcacacagaaactcttttttttacaagtaaaggagggcatattatcagacgagatctattgccctcccgaaaccgctgtactgctcgggagttacgcggtgcaggccaaatttggagattacaacaaggaggtccacaaatcaggttacctatctagcgaacgcctgatcccgcagagagtgatggatcaacacaaactgacccgagaccagtgggaggatcgcatacaagtttggcacgcggagcacaggggaatgctgaaagataatgctatgctggagtatcttaagatcgcccaggatcttgagatgtatggcatcaattactttgagattaagaataaaaagggcactgatctgtggctcggcgtggacgctcttggccttaacatctacgaaaaagatgacaagctaacaccaaaaatcggatttccctggagcgagatccggaacatctcctttaacgacaaaaagttcgttattaagccaatcgacaagaaagctcctgacttcgtgttctatgcccctaggctgagaatcaacaagcgtatcttgcagttgtgcatgggaaatcatgagctttatatgaggcggaggaagcctgatacgatcgaagtccagcagatgaaggctcaagcccgggaggaaaagcaccagaaacagctcgagcgccagcagctggagacggagaaaaagagacgggagaccgtggaaagagaaaaagagcagatgatgcgggagaaagaggagctgatgctgaggcttcaggactatgaggaaaaaactaaaaaggcagaacgagagctgtccgagcagatccaaagagcccttcagctggaggaggaacgcaaacgggcgcaggaggaggctgaacgcttggaagccgataggatggccgctctgcgcgccaaagaggagctagaaaggcaggctgtggaccaaataaaaagtcaggaacagttggcggccgagctggccgaatatactgccaagattgcacttttggaggaggcaaggaggcgtaaagaagacgaggtggaggaatggcaacatcgcgccaaggaggcccaagacgacctcgttaagaccaaggaagagctgcacctcgtcatgacagccccccctccacctcctccccccgtttatgagccagtcagttaccatgttcaagaatcgctgcaagacgaaggagccgagcccactggatattcggccgaattgtcctctgaggggattcgggatgaccgcaacgaggagaagaggatcaccgaggctgagaaaaatgaacgcgtccagcgacaactactgacgctgtcctctgaattatcacaggctcgggatgaaaataagcggactcataacgatatcatacataacgagaacatgaggcaaggacgtgacaaatataagacactgcggcagatccgccaaggcaatacaaagcaaaggatcgacgagttcgaggccctgtag

SEQ ID NO: 42168 - DNA, 3068 bp, Artificial Sequence
  derived and/or modified sequence
ggcgcggcaggaggacgaggcagggcgggcgggcgctctaagggttctgctctgactccaggttgggacagcgtcttcgctgctgctggatagtcgtgttttcggggatcgaggatactcaccagaaaccgaaaatgccgaaaccaatcaatgtccgagttaccaccatggatgcagagctggagtttgcaatccagccaaatacaactggaaaacagctttttgatcaggtggtaaagactatcggcctccgggaagtgtggtactttggcctccactatgtggataataaaggatttcctacctggctgaagctggataagaaggtgtctgcccaggaggtcaggaaggagaatcccctccagttcaagttccgggccaagttctaccctgaagatgtggctgaggagctcatccaggacatcacccagaaacttttcttcctccaagtgaaggaaggaatccttagcgatgagatctactgcccccctgagactgccgtgctcttggggtcctacgctgtgcaggccaagtttggggactacaacaaagaagtgcacaagtctgggtacctcagctctgagcggctgatccctcaaagagtgatggaccagcacaaacttaccagggaccagtgggaggaccggatccaggtgtggcatgcggaacaccgtgggatgctcaaagataatgctatgttggaatacctgaagattgctcaggacctggaaatgtatggaatcaactatttcgagataaaaaacaagaaaggaacagacctttggcttggagttgatgcccttggactgaatatttatgagaaagatgataagttaaccccaaagattggctttccttggagtgaaatcaggaacatctctttcaatgacaaaaagtttgtcattaaacccatcgacaagaaggcacctgactttgtgttttatgccccacgtctgagaatcaacaagcggatcctgcagctctgcatgggcaaccatgagttgtatatgcgccgcaggaagcctgacaccatcgaggtgcagcagatgaaggcccaggcccgggaggagaagcatcagaagcagctggagcggcaacagctggaaacagagaagaaaaggagagaaaccgtggagagagagaaagagcagatgatgcgcgagaaggaggagttgatgctgcggctgcaggactatgaggagaagacaaagaaggcagagagagagctctcggagcagattcagagggccctgcagctggaggaggagaggaagcgggcacaggaggaggccgagcgcctagaggctgaccgtatggctgcactgcgggctaaggaggagctggagagacaggcggtggatcagataaagagccaggagcagctggctgcggagcttgcagaatacactgccaagattgccctcctggaagaggcgcggaggcgcaaggaggatgaagttgaagagtggcagcacagggccaaagaagcccaggatgacctggtgaagaccaaggaggagctgcacctggtgatgacagcacccccgcccccaccaccccccgtgtacgagccggtgagctaccatgtccaggagagcttgcaggatgagggcgcagagcccacgggctacagcgcggagctgtctagtgagggcatccgggatgaccgcaatgaggagaagcgcatcactgaggcagagaagaacgagcgtgtgcagcggcagctgctgacgctgagcagcgagctgtcccaggcccgagatgagaataagaggacccacaatgacatcatccacaacgagaacatgaggcaaggccgggacaagtacaagacgctgcggcagatccggcagggcaacaccaagcagcgcatcgacgagttcgaggccctgtaacagccaggccaggaccaagggcagaggggtgctcatagcgggcgctgccagccccgccacgcttgtgtctttagtgctccaagtctaggaactccctcagatcccagttcctttagaaagcagttacccaacagaaacattctgggctgggaaccagggaggcgccctggtttgttttccccagttgtaatagtgccaagcaggcctgattctcgcgattattctcgaatcacctcctgtgttgtgctgggagcaggactgattgaattacggaaaatgcctgtaaagtctgagtaagaaacttcatgctggcctgtgtgatacaagagtcagcatcattaaaggaaacgtggcaggacttccatctgtgccatacttgttctgtattcgaaatgagctcaaattgattttttaatttctatgaaggatccatctttgtatatttacatgcttagaggggtgaaaattattttggaaattgagtctgaagcactctcgcacacacagtgattccctcctcccgtcactccacgcagctggcagagagcacagtgatcaccagcgtgagtggtggaggaggacacttggatttttttttttgttttttttttttttgcttaacagttttagaatacattgtacttatacaccttattaatgatcagctatatactatttatatacaagtgataatacagatttgtaacattagttttaaaaagggaaagttttgttctgtatattttgttaccttttacagaataaaagaattacatatgaaaaaccctctaaaccatggcacttgatgtgatgtggcaggagggcagtggtggagctggacctgcctgctgcagtcacgtgtaaacaggattattattagtgttttatgcatgtaatggactatgcacacttttaattttgtcagattcacacatgccactatgagctttcagactccagctgtgaagagactctgtttgcttgtgtttgtttgtttgcagtctctctctgccatggccttggcaggctgctggaaggcagcttgtggaggccgttggttccgcccactcattccttctcgtgcactgctttctccttcacagctaagatgccatgtgcaggtggattccatgccgcagacatgaaataaaagctttgcaaaggcacgaagca

SEQ ID NO: 42169 - DNA, 3096 bp, Artificial Sequence
  derived and/or modified sequence
ggacccgccccgccggggcttttgggagcgcgggcagcgagcgcactcggcggacgcaagggcggcggggagcacacggagcactgcaggcgccgggttgggacagcgtcttcgctgctgctggatagtcgtgttttcggggatcgaggatactcaccagaaaccgaaaatgccgaaaccaatcaatgtccgagttaccaccatggatgcagagctggagtttgcaatccagccaaatacaactggaaaacagctttttgatcaggtggtaaagactatcggcctccgggaagtgtggtactttggcctccactatgtggataataaaggatttcctacctggctgaagctggataagaaggtgtctgcccaggaggtcaggaaggagaatcccctccagttcaagttccgggccaagttctaccctgaagatgtggctgaggagctcatccaggacatcacccagaaacttttcttcctccaagtgaaggaaggaatccttagcgatgagatctactgcccccctgagactgccgtgctcttggggtcctacgctgtgcaggccaagtttggggactacaacaaagaagtgcacaagtctgggtacctcagctctgagcggctgatccctcaaagagtgatggaccagcacaaacttaccagggaccagtgggaggaccggatccaggtgtggcatgcggaacaccgtgggatgctcaaagataatgctatgttggaatacctgaagattgctcaggacctggaaatgtatggaatcaactatttcgagataaaaaacaagaaaggaacagacctttggcttggagttgatgcccttggactgaatatttatgagaaagatgataagttaaccccaaagattggctttccttggagtgaaatcaggaacatctctttcaatgacaaaaagtttgtcattaaacccatcgacaagaaggcacctgactttgtgttttatgccccacgtctgagaatcaacaagcggatcctgcagctctgcatgggcaaccatgagttgtatatgcgccgcaggaagcctgacaccatcgaggtgcagcagatgaaggcccaggcccgggaggagaagcatcagaagcagctggagcggcaacagctggaaacagagaagaaaaggagagaaaccgtggagagagagaaagagcagatgatgcgcgagaaggaggagttgatgctgcggctgcaggactatgaggagaagacaaagaaggcagagagagagctctcggagcagattcagagggccctgcagctggaggaggagaggaagcgggcacaggaggaggccgagcgcctagaggctgaccgtatggctgcactgcgggctaaggaggagctggagagacaggcggtggatcagataaagagccaggagcagctggctgcggagcttgcagaatacactgccaagattgccctcctggaagaggcgcggaggcgcaaggaggatgaagttgaagagtggcagcacagggccaaagaagcccaggatgacctggtgaagaccaaggaggagctgcacctggtgatgacagcacccccgcccccaccaccccccgtgtacgagccggtgagctaccatgtccaggagagcttgcaggatgagggcgcagagcccacgggctacagcgcggagctgtctagtgagggcatccgggatgaccgcaatgaggagaagcgcatcactgaggcagagaagaacgagcgtgtgcagcggcagctgctgacgctgagcagcgagctgtcccaggcccgagatgagaataagaggacccacaatgacatcatccacaacgagaacatgaggcaaggccgggacaagtacaagacgctgcggcagatccggcagggcaacaccaagcagcgcatcgacgagttcgaggccctgtaacagccaggccaggaccaagggcagaggggtgctcatagcgggcgctgccagccccgccacgcttgtgtctttagtgctccaagtctaggaactccctcagatcccagttcctttagaaagcagttacccaacagaaacattctgggctgggaaccagggaggcgccctggtttgttttccccagttgtaatagtgccaagcaggcctgattctcgcgattattctcgaatcacctcctgtgttgtgctgggagcaggactgattgaattacggaaaatgcctgtaaagtctgagtaagaaacttcatgctggcctgtgtgatacaagagtcagcatcattaaaggaaacgtggcaggacttccatctgtgccatacttgttctgtattcgaaatgagctcaaattgattttttaatttctatgaaggatccatctttgtatatttacatgcttagaggggtgaaaattattttggaaattgagtctgaagcactctcgcacacacagtgattccctcctcccgtcactccacgcagctggcagagagcacagtgatcaccagcgtgagtggtggaggaggacacttggatttttttttttgttttttttttttttgcttaacagttttagaatacattgtacttatacaccttattaatgatcagctatatactatttatatacaagtgataatacagatttgtaacattagttttaaaaagggaaagttttgttctgtatattttgttaccttttacagaataaaagaattacatatgaaaaaccctctaaaccatggcacttgatgtgatgtggcaggagggcagtggtggagctggacctgcctgctgcagtcacgtgtaaacaggattattattagtgttttatgcatgtaatggactatgcacacttttaattttgtcagattcacacatgccactatgagctttcagactccagctgtgaagagactctgtttgcttgtgtttgtttgtttgcagtctctctctgccatggccttggcaggctgctggaaggcagcttgtggaggccgttggttccgcccactcattccttctcgtgcactgctttctccttcacagctaagatgccatgtgcaggtggattccatgccgcagacatgaaataaaagctttgcaaaggca

SEQ ID NO: 42170 - DNA, 1823 bp, Artificial Sequence
  derived and/or modified sequence
gtgtcgggcgcggcaggaggacgaggcagggcgggcgggcgctctaagggttctgctctgactccaggttgggacagcgtcttcgctgctgctggatagtcgtgttttcggggatcgaggatactcaccagaaaccgaaaatgccgaaaccaatcaatgtccgagttaccaccatggatgcagagctggagtttgcaatccagccaaatacaactggaaaacagctttttgatcaggtgtctgcccaggaggtcaggaaggagaatcccctccagttcaagttccgggccaagttctaccctgaagatgtggctgaggagctcatccaggacatcacccagaaacttttcttcctccaagtgaaggaaggaatccttagcgatgagatctactgcccccctgagactgccgtgctcttggggtcctacgctgtgcaggccaagtttggggactacaacaaagaagtgcacaagtctgggtacctcagctctgagcggctgatccctcaaagagtgatggaccagcacaaacttaccagggaccagtgggaggaccggatccaggtgtggcatgcggaacaccgtgggatgctcaaagataatgctatgttggaatacctgaagattgctcaggacctggaaatgtatggaatcaactatttcgagataaaaaacaagaaaggaacagacctttggcttggagttgatgcccttggactgaatatttatgagaaagatgataagttaaccccaaagattggctttccttggagtgaaatcaggaacatctctttcaatgacaaaaagtttgtcattaaacccatcgacaagaaggcacctgactttgtgttttatgccccacgtctgagaatcaacaagcggatcctgcagctctgcatgggcaaccatgagttgtatatgcgccgcaggaagcctgacaccatcgaggtgcagcagatgaaggcccaggcccgggaggagaagcatcagaagcagctggagcggcaacagctggaaacagagaagaaaaggagagaaaccgtggagagagagaaagagcagatgatgcgcgagaaggaggagttgatgctgcggctgcaggactatgaggagaagacaaagaaggcagagagagagctctcggagcagattcagagggccctgcagctggaggaggagaggaagcgggcacaggaggaggccgagcgcctagaggctgaccgtatggctgcactgcgggctaaggaggagctggagagacaggcggtggatcagataaagagccaggagcagctggctgcggagcttgcagaatacactgccaagattgccctcctggaagaggcgcggaggcgcaaggaggatgaagttgaagagtggcagcacagggccaaagaagcccaggatgacctggtgaagaccaaggaggagctgcacctggtgatgacagcacccccgcccccaccaccccccgtgtacgagccggtgagctaccatgtccaggagagcttgcaggatgagggcgcagagcccacgggctacagcgcggagctgtctagtgagggcatccgggatgaccgcaatgaggagaagcgcatcactgaggcagagaagaacgagcgtgtgcagcggcagctgctgacgctgagcagcgagctgtcccaggcccgagatgagaataagaggacccacaatgacatcatccacaacgagaacatgaggcaaggccgggacaagtacaagacgctgcggcagatccggcagggcaacaccaagcagcgcatcgacgagttcgaggccctgtaacagccaggccaggaccaa

SEQ ID NO: 42171 - DNA, 1761 bp, Artificial Sequence
  derived and/or modified sequence
atgcccaagcccatcaacgtgcgggtgaccaccatggatgctgagctggagtttgccatccagcccaacaccaccgggaagcagctgtttgaccaggtggtgaagaccatcggcctgcgggaggtgtggtacttcggcctgcactacgtggacaacaagggcttccccacctggctgaagctggacaagaaggtgtctgcccaggaggtgaggaaagaaaaccccctgcagttcaagttccgggccaagttctacccagaagatgtggccgaggagctgatccaggacatcacccagaagctgttcttcctgcaggtgaaggagggcatcctgagtgatgagatctactgccccccagagacagctgtgctgctgggcagctatgctgtgcaggccaagtttggagactacaacaaggaggtgcacaagagcggctacctgagcagcgagcggctcatcccccagagggtgatggaccagcacaagctgacccgggaccagtgggaggaccgcatccaggtgtggcatgctgagcaccggggcatgctgaaggacaatgccatgctggagtacctgaagatcgcccaggacctggagatgtatggcatcaactactttgagatcaagaacaagaagggcacagacctgtggctgggcgtggatgccctgggcctgaacatctatgagaaggatgacaagctgacccccaagattggcttcccctggagcgagatccggaacatctccttcaatgacaagaagtttgtgatcaagcccatcgacaagaaggccccagactttgtgttctacgccccccggctgcgcatcaacaagaggatcctgcagctgtgcatgggcaaccacgagctgtacatgagaagaaggaagccagacaccatcgaggtgcagcagatgaaggcccaggcccgggaggagaagcaccagaagcagctggagcggcagcagctggagacagagaagaagagaagagagaccgtggagcgggagaaggagcagatgatgagggagaaggaggagctgatgctgcggctgcaggactatgaggagaagaccaagaaggccgagcgggagctgtctgagcagatccagagggccctgcagctggaggaggagaggaagagggcccaggaggaggccgagcggctggaggccgacaggatggccgccctgcgggccaaggaggagctggagcggcaggccgtggaccagatcaagagccaggagcagctggccgctgagctggccgagtacacagccaagatcgccctgctggaggaggcccggcggaggaaagaagatgaggtggaggagtggcagcaccgggccaaggaggcccaggatgacctggtgaagaccaaggaggagctgcacctggtgatgacagcccctcctcctcctcctcctcctgtgtatgagcctgtgtcctaccacgtgcaggagagcctgcaggatgaaggagctgagcccaccggctacagcgctgagctgagcagcgagggcatcagagatgacagaaatgaggagaagaggatcacagaagctgagaagaatgaaagagtgcagaggcagctgctgaccctgagcagcgagctgagccaggccagagatgagaacaagaggacccacaatgacatcatccacaatgaaaacatgaggcagggccgggacaagtacaagaccctgcggcagatccggcagggcaacaccaagcagagaattgatgaatttgaggccctgtag

SEQ ID NO: 42172 - DNA, 1665 bp, Artificial Sequence
  derived and/or modified sequence
atgcccaagcccatcaacgtgcgggtgaccaccatggatgctgagctggagtttgccatccagcccaacaccaccgggaagcagctgtttgaccaggtgtctgcccaggaggtgaggaaagaaaaccccctgcagttcaagttccgggccaagttctacccagaagatgtggccgaggagctgatccaggacatcacccagaagctgttcttcctgcaggtgaaggagggcatcctgagtgatgagatctactgccccccagagacagctgtgctgctgggcagctatgctgtgcaggccaagtttggagactacaacaaggaggtgcacaagagcggctacctgagcagcgagcggctcatcccccagagggtgatggaccagcacaagctgacccgggaccagtgggaggaccgcatccaggtgtggcatgctgagcaccggggcatgctgaaggacaatgccatgctggagtacctgaagatcgcccaggacctggagatgtatggcatcaactactttgagatcaagaacaagaagggcacagacctgtggctgggcgtggatgccctgggcctgaacatctatgagaaggatgacaagctgacccccaagattggcttcccctggagcgagatccggaacatctccttcaatgacaagaagtttgtgatcaagcccatcgacaagaaggccccagactttgtgttctacgccccccggctgcgcatcaacaagaggatcctgcagctgtgcatgggcaaccacgagctgtacatgagaagaaggaagccagacaccatcgaggtgcagcagatgaaggcccaggcccgggaggagaagcaccagaagcagctggagcggcagcagctggagacagagaagaagagaagagagaccgtggagcgggagaaggagcagatgatgagggagaaggaggagctgatgctgcggctgcaggactatgaggagaagaccaagaaggccgagcgggagctgtctgagcagatccagagggccctgcagctggaggaggagaggaagagggcccaggaggaggccgagcggctggaggccgacaggatggccgccctgcgggccaaggaggagctggagcggcaggccgtggaccagatcaagagccaggagcagctggccgctgagctggccgagtacacagccaagatcgccctgctggaggaggcccggcggaggaaagaagatgaggtggaggagtggcagcaccgggccaaggaggcccaggatgacctggtgaagaccaaggaggagctgcacctggtgatgacagcccctcctcctcctcctcctcctgtgtatgagcctgtgtcctaccacgtgcaggagagcctgcaggatgaaggagctgagcccaccggctacagcgctgagctgagcagcgagggcatcagagatgacagaaatgaggagaagaggatcacagaagctgagaagaatgaaagagtgcagaggcagctgctgaccctgagcagcgagctgagccaggccagagatgagaacaagaggacccacaatgacatcatccacaatgaaaacatgaggcagggccgggacaagtacaagaccctgcggcagatccggcagggcaacaccaagcagagaattgatgaatttgaggccctgtag

SEQ ID NO: 42173 - DNA, 1761 bp, Artificial Sequence
  derived and/or modified sequence
atgcccaagcccatcaacgtgcgggtgaccaccatggacgccgagctggagtttgctatccagccgaataccacgggaaaacaactgtttgatcaagtggtcaagaccatcggattgcgggaagtgtggtactttggtcttcattacgtggacaacaagggctttcctacctggctcaagctcgacaagaaagtctctgcgcaagaggtgagaaaggagaaccccctgcagttcaaattcagggctaagttttaccctgaggatgtggccgaagagcttatccaggatataacacagaaactgttctttcttcaggtcaaggaaggaatcttgtcagacgagatttactgtccacctgagactgccgtgcttttggggtcctacgctgtccaggcaaaatttggagattataacaaagaggtccacaaatccggatacctgtccagcgagagactgattccacagagggttatggaccagcataagttaactagggatcagtgggaggatcgaatccaggtgtggcacgccgagcacagagggatgctgaaagacaacgccatgctagagtatctaaagattgcccaggatcttgaaatgtatggtataaattacttcgagatcaagaataagaaaggcacggacttgtggttaggtgtagatgctttaggactgaacatctatgagaaagacgacaaattgacacccaagatagggttcccttggtcggaaatccgaaatatcagcttcaacgacaaaaaattcgttatcaaaccgatcgacaaaaaagctcctgacttcgtcttctatgctcctaggctgagaataaataaaagaatacttcagctgtgtatggggaaccacgaactttacatgcgtagacggaagcctgatacaatcgaagtccaacaaatgaaggcccaagctagggaagagaagcaccaaaaacagttagagcggcagcagctggaaactgaaaaaaagagaagggaaactgtcgagcgcgagaaagaacagatgatgagagagaaggaggaactcatgctccggctgcaggactacgaggagaaaactaaaaaagcagagagggaactgtctgagcagatacagcgcgcacttcaactcgaggaggagagaaaacgcgctcaggaagaggcagaacggctggaagctgataggatggccgctttaagagccaaggaggagctcgaacgccaggcagtggatcaaatcaaatctcaggagcagctggccgccgagttagctgaatatactgccaagatcgcattgcttgaagaggcacgtcggaggaaagaggatgaggtagaagaatggcagcaccgcgctaaagaggcccaggacgacctagttaaaactaaggaggagctgcacctggttatgaccgctccacctccacctccacctccggtctatgagccagtctcatatcacgtgcaggagtctctgcaggatgaaggagcagagcccaccgggtactcagccgagctgtctagcgaaggcatcagagatgataggaacgaagaaaagagaattacagaggcagagaagaacgagcgcgtccagcgacagctgctaacactgtcatcggagctctctcaggcacgggacgaaaacaagcgcacccacaacgatatcatacataatgagaacatgcgccagggccgggacaagtacaaaaccctgagacagattagacaggggaataccaaacagcgaatagacgaatttgaagccctgtag

SEQ ID NO: 42174 - DNA, 1761 bp, Artificial Sequence
  derived and/or modified sequence
atgcccaagcccatcaacgtgcgggtgaccaccatggacgccgagcttgagttcgcgatccaaccaaacacaacagggaagcaactattcgaccaggtagtgaaaaccatcggtttgagagaggtctggtacttcgggctacactacgtcgacaacaaaggtttcccgacctggttgaagttagacaagaaggtgtccgcgcaagaggttcgaaaagagaatcctctccagtttaaattccgcgctaagttctaccccgaggatgtggctgaggaattgatacaggacataactcagaagctcttcttcttacaggtgaaggagggcattctgtccgacgagatatactgcccgccagagacggccgtcctgctggggagctacgcggtgcaggccaaatttggcgattacaataaggaggttcataaaagcggctacctctcttcagaacgtcttatcccgcagagagtgatggaccagcacaagctcaccagagaccagtgggaggaccgcatacaggtatggcacgccgagcacagaggtatgctgaaggataacgccatgcttgaatatctcaagatagcccaggaccttgagatgtacggcatcaactactttgagatcaagaataagaagggtactgatttgtggctgggcgtcgatgcactgggtcttaacatctatgagaaggatgacaagctgactccgaaaatcgggttcccatggagcgagatcaggaatataagcttcaatgataaaaaatttgtcatcaagcccatagacaagaaagctccagattttgtcttttatgctccacgcctgcggatcaacaagaggatacttcagctgtgcatgggcaaccatgaactttatatgcgccggcgcaagcctgacaccatcgaggtgcagcagatgaaagctcaggctagagaagagaaacaccagaaacagctggaaagacagcagctggagactgaaaaaaagaggagggaaacagtcgagcgcgagaaagagcagatgatgagggagaaggaagagttgatgcttagactccaggactacgaagaaaagactaagaaggcggagagagagttgtccgagcaaatccagagagccctacagctggaagaagaacgcaaaagggcccaagaggaagcggaacgacttgaggcggatcgcatggccgcactccgcgccaaggaggaactggaacggcaggcagtggatcagataaagagccaggaacagttggccgctgaactggctgagtacacagccaagatagccctgttagaagaggcacggaggagaaaggaggacgaggttgaggaatggcagcatcgggcaaaggaggctcaagacgatctggtgaaaaccaaagaagagttgcacttggtgatgacagctccaccaccgccccccccacccgtctacgagcccgtcagttatcatgtgcaggaatctttgcaggacgagggtgcagaacccactggctactctgccgaactgtctagtgagggcattcgagatgacaggaatgaggaaaagcgaatcaccgaggccgaaaagaacgagcgggtgcagagacaactgttgaccttgtccagcgagctgtcccaagctcgtgatgagaataaacggacccacaatgacataattcacaatgagaacatgagacagggcagggataaatataaaacactgcgacagatccggcagggcaataccaaacagcggatcgacgagtttgaggctctatag

SEQ ID NO: 42175 - DNA, 1665 bp, Artificial Sequence
  derived and/or modified sequence
atgcccaagcccatcaacgtgcgggtgaccaccatggacgccgagctggagtttgcaatccagccaaacacaaccgggaaacagctctttgatcaggtcagcgcacaggaagtgcgaaaggagaatcctctgcagttcaagtttcgggcgaagttttatccagaggatgtggccgaggaactgattcaggacatcacccagaagctcttcttcttgcaggtcaaggagggcattctatcagatgaaatctattgtcccccggagacggccgtcctgctggggtcttatgcagtacaggctaaattcggcgattataataaggaagtgcacaaatccggataccttagcagcgaacggctcatacctcagcgcgttatggatcaacacaaactgacccgggaccaatgggaggaccggattcaggtttggcacgccgaacaccgaggcatgctgaaggataacgccatgctggaatacctgaagatcgctcaagatctcgaaatgtatggaatcaactactttgagattaaaaataaaaaaggaaccgatctgtggttgggcgtcgacgccctgggcctgaatatttacgaaaaggacgataagctgacgcctaaaattggcttcccctggtccgaaattcgcaatattagtttcaacgacaaaaagttcgtgatcaaacctatcgataagaaggcacccgactttgttttttacgcacccaggttacgcattaacaagagaatactgcagctgtgtatggggaatcacgagctgtatatgcggcgccgaaagccagatacaatcgaagtgcaacagatgaaggctcaggcacgcgaggagaaacaccaaaaacagctggaacgtcagcagctggagacggaaaagaagcggcgtgagaccgtggaaagagaaaaggaacagatgatgcgggaaaaagaggagctaatgctacgcctgcaggattacgaagagaagactaagaaggcagagagggaacttagcgaacagattcagcgcgctcttcagcttgaagaagaacgaaaaagggctcaagaggaggcagagaggttggaagcagacagaatggcagctttaagggcaaaagaggagctcgagcgtcaagccgtggatcaaatcaaaagccaggagcagctggccgccgagttagcagagtatacggctaagatcgcactcctggaagaagcaagacggcgtaaagaggatgaagtggaagagtggcagcaccgggccaaggaggcccaggatgacctggtaaagactaaggaagagctgcatcttgtcatgaccgcgccacccccccccccaccaccagtgtacgaaccagtgagttaccacgttcaagagtctctgcaggacgagggtgccgaacccaccggctacagtgccgaactgagctctgagggaatccgggatgatcgcaacgaggagaagcgaatcaccgaggcagaaaaaaacgagcgcgtccagaggcagctcttgactctgtcttctgaactgtcacaagcgcgcgacgagaataaacgcacacacaatgacatcatacataacgagaacatgcgccaagggcgcgataaatataagacactcaggcaaattcggcagggtaatacgaaacagcggattgatgaattcgaggctctgtag

SEQ ID NO: 42176 - DNA, 1761 bp, Artificial Sequence
  derived and/or modified sequence
atgccaaaacccatcaacgtgcgggttacgaccatggacgcggagctggagttcgccattcaaccaaacacaacaggcaaacagctgttcgaccaggtggtgaagacaatcggcttgcgagaggtgtggtattttggccttcattacgtggacaacaagggcttccctacctggctgaaactcgacaaaaaagtgtctgcacaggaagtgcggaaagaaaacccactccagttcaaattccgcgctaagttttatccagaagatgtggcagaagagctaatccaggatataacccagaaactattttttctgcaggtaaaagaaggcatcctgagtgatgagatctactgccctccagaaactgccgtcctcctgggttcttatgcggtgcaggccaaatttggagactacaacaaagaagtgcacaaatcgggttatctcagcagcgagcggttaattcctcagagagtcatggatcagcacaaactgacccgagaccagtgggaggaccggatccaggtgtggcacgccgagcaccggggtatgctgaaggacaacgccatgctggaatacctgaaaatagcacaagatctggaaatgtacggcattaattatttcgaaattaaaaacaaaaaaggcaccgatctgtggctgggagtcgatgctctgggactaaatatctacgaaaaagatgacaaactgactccaaagatcggattcccctggagcgagatccgcaacatatccttcaacgacaagaagttcgtcataaagcctattgacaagaaagccccagattttgtcttttacgctccaagactgagaatcaataagcgcattctgcagttatgcatggggaaccacgagctgtatatgcgcaggagaaaaccggacacaatagaggtccagcagatgaaggcacaggctcgggaggaaaagcaccagaagcagctagagagacagcagctcgagactgaaaagaaaagacgagagactgttgagagagagaaagagcagatgatgagagagaaggaagagcttatgctccgccttcaggattatgaagagaagaccaaaaaagcagagcgcgagctttcagaacagatacagcgggcactacagctcgaagaggagcggaagagggcccaggaagaggctgaaagattggaagctgacagaatggctgcgcttagagccaaagaggagctcgaacgacaagcggtagaccagattaaatctcaagagcagttggctgccgaactggcagagtacaccgctaagattgctctattggaggaggccaggcggcgaaaggaggatgaagttgaggagtggcaacacagggccaaagaagcacaagatgacttggtgaagacgaaagaagagctgcatctcgtgatgacggcccctccccctccaccccctcccgtgtatgaacctgtgagctatcacgtacaggaaagtttgcaagacgagggtgccgaacctaccggatactctgcggagctcagttccgagggcataagagacgaccggaatgaggaaaagcggattactgaggctgagaagaatgaacgggtccaaagacagctgctgacactgtcctcagagctaagccaagcaagagacgagaacaaacggacgcacaacgatattatccacaacgaaaacatgagacagggaagggacaagtacaaaacactacgtcaaattcggcagggaaatacgaagcagcgcattgacgagtttgaagccctttag

SEQ ID NO: 42177 - DNA, 1761 bp, Artificial Sequence
  derived and/or modified sequence
atgccaaaacccatcaatgtgcgagtgaccactatggatgctgaactagaattcgccatccagcctaataccactggtaaacaactctttgatcaagtggttaaaaccattgggttgagagaagtctggtacttcggcttgcattatgtagataataaaggattccctacttggctgaagctggacaaaaaggtttcagctcaggaggttaggaaagagaatccactgcagttcaagttccgagccaagttttacccggaagatgtggccgaagagctaatacaggatattacacagaagttgttctttctgcaggtcaaggagggaattctatccgacgagatctactgtccgcctgaaaccgcggttctgttaggcagttatgcagtgcaagctaaattcggggattacaataaagaagtccacaagagcggatatttgtcgtccgagagattgatcccacagagggtcatggaccagcataagctgactcgtgaccagtgggaagatagaattcaggtttggcacgccgagcatcgaggaatgctgaaggataacgccatgctcgaatacttaaaaatcgctcaggacttggagatgtacggtatcaattacttcgagataaagaataagaagggaaccgatctatggctaggcgtcgacgctctcggacttaatatatacgagaaagacgacaagctgactccaaaaattgggttcccctggtccgagattcgtaacatctccttcaatgataagaaattcgtcataaagccaattgacaaaaaagccccagatttcgttttttatgccccaagattacgaatcaacaaacgaattctccagctttgtatgggcaaccacgagctttatatgcgcaggaggaaaccagatacaatcgaagtacagcagatgaaagcccaggcccgagaggagaaacaccagaagcagcttgaaagacagcaactggagaccgagaaaaagaggcgcgagacagtagagcgggaaaaggagcagatgatgcgggagaaggaggaactgatgttgcgtctacaagactatgaggaaaagactaagaaagcggagcgggaactgagcgaacagatccagcgggcactccaattggaggaggagagaaaacgtgctcaagaagaagcagagcgactggaggccgatagaatggccgcattacgggctaaggaagagctggaacgacaggcggtggaccagattaaatcccaggagcagctggccgctgaactggctgagtacacagccaaaatcgcactcctggaagaagctcgcaggagaaaggaggacgaggtggaggagtggcagcatagggctaaggaagcccaggatgatttggtgaagactaaagaggaacttcatctggtaatgacagctccacctccccctccacctcctgtgtacgaaccagtgtcctaccatgtccaagaatccctccaggatgaaggcgctgagccaactggctacagcgctgaattgtcctccgaaggcatacgcgacgaccgcaacgaagagaaacgcataaccgaggccgagaaaaacgaacgggttcagcggcagttacttacactgtcaagcgaactctcccaagcaagagatgagaataagcgcacccacaatgacattattcataatgaaaatatgagacaaggcagggacaagtacaaaacactgaggcagatccgccaaggcaatactaagcagaggatagatgaatttgaagccttatag

SEQ ID NO: 42178 - DNA, 1665 bp, Artificial Sequence
  derived and/or modified sequence
atgcctaaacccattaacgttcgggtgacgactatggatgccgaactggaattcgctatccagccaaataccacgggcaaacagttgttcgaccaggtttcggcccaggaagtgagaaaggaaaatccacttcagtttaaattcagagcaaagttctatcctgaagatgtggccgaagagctcattcaggacataacacagaagctgttcttcctgcaggtaaaggaaggaatcttatccgatgaaatctactgcccccctgaaacagctgtgctgctgggctcttacgctgttcaggctaaatttggggattataacaaagaggtgcacaaatccggatacctgagcagtgaaaggcttatcccccaaagggtgatggatcaacacaagttgacaagggatcaatgggaagatcgtatccaggtctggcacgccgaacatagggggatgcttaaagataatgccatgctggaatacctgaagatagctcaggacctagaaatgtacggcataaactactttgagattaaaaacaaaaaaggcaccgatctttggttgggagtcgatgccctaggactaaatatttacgaaaaggacgataagctgactcccaagattggcttcccttggagcgagattcggaatatctcttttaatgataaaaaatttgtgattaaaccaatcgacaaaaaagcccctgatttcgtgttctacgcacctcgcctgcgcatcaataagcgcattctgcagctctgtatggggaaccacgagctgtatatgagacggaggaaaccagatacaattgaagtgcagcagatgaaggctcaggctagagaagagaagcaccagaaacaactggaacgccagcaattggagaccgagaagaaacggagagagactgttgagcgcgagaaggagcaaatgatgcgggagaaagaagagctgatgctgaggctacaggactatgaagaaaaaacaaaaaaagcagaaagggagctgagcgagcagattcagagagcactccaactggaggaggagcgcaaacgcgcacaagaagaagccgagaggttagaagcagataggatggccgcactccgcgctaaggaagagctggaacgacaggctgtagaccagattaagtcccaggaacagctagctgctgaacttgctgagtataccgctaaaatcgctctcctggaagaggcacgacgcagaaaagaggacgaggtcgaagaatggcagcatagggccaaggaagcacaggatgatttagtcaagaccaaagaggagctgcatcttgtgatgactgccccacccccaccgcctcccccagtttacgaaccagtgagctatcatgtacaggaaagcctgcaagacgagggcgctgagccaactggttattctgctgagctctcctctgaaggcattagggacgaccgcaacgaagagaagcgaatcactgaagccgagaagaatgagagggtccagaggcagttgctgacactcagcagtgagctctctcaggccagggatgagaataagaggacacataatgatataattcacaacgagaatatgcgccagggcagagacaaatacaagaccctcagacagattcgtcagggcaataccaagcagagaatcgacgaattcgaggcactgtag

SEQ ID NO: 42179 - protein, 491 aa, Artificial Sequence
  derived and/or modified sequence
MGCIKSKGKDSLSDDGVDLKTQPVPESQLLPGQRFQTKDPEEQGDIVVALYPYDGIHPDDLSFKKGEKMKVLEEHGEWWKAKSLLTKKEGFIPSNYVAKLNTLETEEWFFKDITRKDAERQLLAPGNSAGAFLIRESETLKGSFSLSVRDFDPVHGDVIKHYKIRSLDNGGYYISPRITFPCISDMIKHYQKQADGLCRRLEKACISPKPQKPWDKDAWEIPRESIKLVKRLGAGQFGEVWMGYYNNSTKVAVKTLKPGTMSVQAFLEEANLMKTLQHDKLVRLYAVVTREEPIYIITEYMAKGSLLDFLKSDEGGKVLLPKLIDFSAQIAEGMAYIERKNYIHRDLRAANVLVSESLMCKIADFGLARVIEDNEYTAREGAKFPIKWTAPEAINFGCFTIKSDVWSFGILLYEIVTYGKIPYPGRTNADVMTALSQGYRMPRVENCPDELYDIMKMCWKEKAEERPTFDYLQSVLDDFYTATEGQYQQQP

SEQ ID NO: 42180 - DNA, 1476 bp, Artificial Sequence
  derived and/or modified sequence
atgggctgcatcaagagcaagggcaaggacagcctgagcgacgacggcgtggacctgaagacccagcccgtgcccgagagccagctgctgcccggccagagattccagaccaaggaccccgaggagcagggcgacatcgtggtggccctgtacccctacgacggcatccaccccgacgacctgagcttcaagaagggcgagaagatgaaggtgctggaggagcacggcgagtggtggaaggccaagagcctgctgaccaagaaggagggcttcatccccagcaactacgtggccaagctgaacaccctggagaccgaggagtggttcttcaaggacatcaccagaaaggacgccgagagacagctgctggcccccggcaacagcgccggcgccttcctgatcagagagagcgagaccctgaagggcagcttcagcctgagcgtgagagacttcgaccccgtgcacggcgacgtgatcaagcactacaagatcagaagcctggacaacggcggctactacatcagccccagaatcaccttcccctgcatcagcgacatgatcaagcactaccagaagcaggccgacggcctgtgcagaagactggagaaggcctgcatcagccccaagccccagaagccctgggacaaggacgcctgggagatccccagagagagcatcaagctggtgaagagactgggcgccggccagttcggcgaggtgtggatgggctactacaacaacagcaccaaggtggccgtgaagaccctgaagcccggcaccatgagcgtgcaggccttcctggaggaggccaacctgatgaagaccctgcagcacgacaagctggtgagactgtacgccgtggtgaccagagaggagcccatctacatcatcaccgagtacatggccaagggcagcctgctggacttcctgaagagcgacgagggcggcaaggtgctgctgcccaagctgatcgacttcagcgcccagatcgccgagggcatggcctacatcgagagaaagaactacatccacagagacctgagagccgccaacgtgctggtgagcgagagcctgatgtgcaagatcgccgacttcggcctggccagagtgatcgaggacaacgagtacaccgccagagagggcgccaagttccccatcaagtggaccgcccccgaggccatcaacttcggctgcttcaccatcaagagcgacgtgtggagcttcggcatcctgctgtacgagatcgtgacctacggcaagatcccctaccccggcagaaccaacgccgacgtgatgaccgccctgagccagggctacagaatgcccagagtggagaactgccccgacgagctgtacgacatcatgaagatgtgctggaaggagaaggccgaggagagacccaccttcgactacctgcagagcgtgctggacgacttctacaccgccaccgagggccagtaccagcagcagccctag

SEQ ID NO: 42181 - DNA, 1476 bp, Artificial Sequence
  derived and/or modified sequence
atgggttgcatcaagtctaagggaaaggattctctctcggacgatggcgtggacttaaagactcaacctgtccctgagtcccaacttctgccaggccaacgatttcaaactaaggacccagaggagcaaggggacattgtcgttgcgctttatccatacgacgggatccaccccgatgacctttcttttaaaaaaggtgaaaaaatgaaagtgctcgaggagcatggggaatggtggaaagctaaatcacttcttactaagaaagaagggttcatcccctccaactacgtggcaaagctaaacacgcttgaaaccgaggaatggttcttcaaggatatcactagaaaagatgcggagcggcagcttctagcgcccggaaattctgccggagcattcctgatcagggaaagcgagacactcaagggtagtttttccctgagcgtgagagatttcgaccccgtccacggagacgtgataaagcactataagattagaagcctggacaatggtggctattatatttctccccgaatcacgttcccttgtataagcgatatgatcaagcattaccagaagcaggccgacggcttgtgtcggcggcttgaaaaggcttgcatcagtcccaagcctcagaagccgtgggataaggacgcgtgggagatccctagagagtctatcaagctggtcaaacggctcggcgctggccagtttggggaagtgtggatgggatattataacaacagcaccaaagtggccgttaaaaccctgaaaccggggactatgtcggtgcaggccttccttgaggaggccaacttaatgaaaaccttacagcacgataaactggtgcggctttacgctgtggtgactagggaggagcccatttacattatcacggaatacatggctaagggtagtcttctcgacttcctgaagagcgacgaagggggaaaggtgctgttgcctaagctgattgacttttcagctcaaattgctgaaggcatggcatacattgagagaaagaactatatccaccgcgacctaagagccgcaaacgttctggtgtccgagagcctgatgtgtaaaatcgcagactttggcctggctcgagtgattgaagataatgagtacaccgcccgtgagggggccaagtttccaattaagtggactgcacctgaagcaattaatttcggatgctttaccataaaaagcgatgtctggtcgttcgggatcttactatacgaaattgtcacgtatggcaaaattccgtaccctggcaggacaaatgctgatgtcatgaccgctctgtctcagggctacagaatgccaagggttgagaattgcccagacgaattgtacgacattatgaaaatgtgctggaaagagaaggcagaagagagacccacgttcgattatctgcaatcagtgctggacgatttttacaccgcgacagaggggcagtatcagcaacagccttag

SEQ ID NO: 42182 - DNA, 1476 bp, Artificial Sequence
  derived and/or modified sequence
atgggctgcatcaagagcaagggcaaggacagcctgagtgatgatggagtggacctgaagacccagcctgtgcctgagagccagctgctgcccggccagcgcttccagaccaaggaccctgaggagcagggcgacatcgtggtggccctgtacccctatgatggcatccacccagatgacctgtccttcaagaagggggagaagatgaaggtgctggaggagcacggggagtggtggaaggccaagagcctgctgaccaagaaggagggcttcatccccagcaactacgtggccaagctgaacaccctggagacagaggagtggttcttcaaggacatcaccaggaaggatgctgagcggcagctgctggcccctggcaacagcgctggggccttcctgatccgggagagcgagaccctgaagggcagcttcagcctgtctgtgcgggactttgatcctgtgcatggagatgtgatcaagcactacaagatccgcagcctggacaatggaggctactacatcagcccccgcatcaccttcccctgcatcagtgacatgatcaagcactaccagaagcaggctgatggcctgtgccggcggctggagaaggcctgcatcagccccaagccccagaagccctgggacaaggatgcctgggagatcccccgggagagcatcaagctggtgaagaggctgggcgccggccagtttggagaggtgtggatgggctactacaacaacagcaccaaggtggccgtgaagaccctgaagccaggcaccatgtctgtgcaggccttcctggaggaggccaacctgatgaagaccctgcagcacgacaagctggtgcggctgtatgctgtggtgacccgggaggagcccatctacatcatcacagagtacatggccaagggcagcctgctggacttcctgaagagtgatgaaggaggcaaggtgctgctgcccaagctgattgacttcagcgcccagattgctgagggcatggcctacattgaaaggaagaactacatccaccgggacctgcgggccgccaacgtgctggtgtctgagagcctgatgtgcaagattgctgactttggcctggcccgggtgattgaggacaatgagtacacagcccgggagggcgccaagttccccatcaagtggacagcccctgaggccatcaactttggctgcttcaccatcaagagtgatgtgtggagctttggcatcctgctgtatgaaattgtgacctacggcaagatcccctacccaggccgcaccaatgctgatgtgatgacagccctgagccagggctacaggatgccccgggtggagaactgcccagatgagctgtatgacatcatgaagatgtgctggaaggagaaggccgaggagcggcccacctttgactacctgcagagcgtgctggatgacttctacacagccacagagggccagtaccagcagcagccctag

SEQ ID NO: 42183 - DNA, 1476 bp, Artificial Sequence
  derived and/or modified sequence
atgggctgcatcaagagcaagggcaaggacagcctgagcgacgacggggtggacctcaagacacagccggtccctgaaagccagctgctcccaggtcaaagattccagacgaaggacccggaggagcagggcgatattgtggtggctctgtatccttacgatggtattcatcccgatgatctctccttcaagaaaggagagaaaatgaaggtcctggaggagcacggggaatggtggaaggccaagtccctcctgacaaaaaaggagggctttatcccgtctaattacgtcgccaaattgaacacactggaaactgaggaatggttctttaaggatattacccgcaaagacgccgagcggcagctgctggccccaggaaacagcgctggtgcgtttttaatcagggagtcagagactctgaagggcagctttagcttaagtgtcagagatttcgacccggtacacggcgacgtgattaagcactataaaatcaggagccttgataatggggggtattacattagtcctcggataaccttcccgtgtataagcgacatgatcaagcactaccagaaacaggcggacggcttgtgcaggcggctcgaaaaggcctgtatcagcccgaagccacagaagccctgggataaggacgcatgggaaattcctagagaatccatcaaattggtaaagagactaggcgccgggcaattcggcgaggtatggatgggatactataataactcaactaaggttgccgtgaagacactgaagccaggcaccatgtccgttcaggcctttcttgaggaggctaaccttatgaaaacattgcagcacgacaaactggtgagactttatgccgttgtcactcgggaggaacccatttacataattactgagtatatggccaaaggctctctgctggactttttaaagtcggatgagggggggaaagtgcttctgccgaagttaattgacttctctgcgcagattgccgagggcatggcttatattgaacggaaaaactatatccacagggatctgagagcagccaatgttctggtgagtgagtccttaatgtgcaagatcgcggactttggacttgcccgcgtgattgaagataacgagtatactgcccgagaaggcgccaagttcccaatcaagtggaccgcaccggaagccataaactttggttgttttaccattaagtcagatgtgtggtccttcggcattctcctttacgagattgttacgtatggcaagataccctacccaggcaggactaatgctgatgttatgactgcactttcccaagggtatagaatgccccgggtcgaaaattgccccgacgaactttatgatatcatgaagatgtgctggaaagaaaaagctgaggagcgtcctacgtttgattacttgcagtcggtcctagatgatttctacaccgcgaccgaaggacaatatcaacagcagccttag

SEQ ID NO: 42184 - DNA, 1476 bp, Artificial Sequence
  derived and/or modified sequence
atgggatgtatcaaatccaaaggcaaggattctctgtctgatgacggagtcgatctcaagacccagccagtaccagagagccagttgttacctggccaaagatttcagacgaaggacccggaggagcagggcgacatagtggttgccctgtacccgtacgatggcatccacccagatgacttgagttttaaaaaaggggagaaaatgaaagtactcgaggaacacggtgaatggtggaaggccaagagtctcttaaccaaaaaggaggggtttattccttcaaactacgtggcaaagctgaatacgctagagacagaggagtggttcttcaaggatataacccgcaaagatgcagagaggcaactgttagctcccggtaactctgccggagctttcctgattagggaaagtgaaaccttgaaggggtcctttagtttgagcgtgagagatttcgatccggtgcacggtgacgtgatcaagcattacaaaatcagaagtctcgacaatggcggatactacataagcccacggataaccttcccttgcatctcagacatgattaaacattaccagaaacaggccgacggcttatgccgccgacttgaaaaggcgtgcatcagcccaaaaccccagaagccgtgggacaaagatgcttgggaaatacctcgggagtcaatcaaattagtgaagcgcttaggcgcaggtcagtttggcgaagtctggatggggtactataataatagtaccaaagtggcagtgaaaaccctcaagcctggaactatgtccgtacaggcattcttggaagaggcaaatctcatgaagacattacagcacgataaactcgtccgactgtacgctgtagtaaccagggaagagccgatctacatcattacagagtacatggcaaaaggatccctactcgattttctgaaaagcgacgaagggggaaaagttctgctcccaaagctgatagatttttcagctcaaatcgcagagggcatggcctacattgaacgaaaaaactatatccaccgggacttaagagccgcaaatgtactggtttccgagtccctgatgtgtaagattgcagatttcggcctcgctagggtaatcgaagacaatgagtacacagccagagagggtgcaaaatttccaattaagtggactgcaccagaagcgattaattttggatgtttcaccattaagtcggatgtgtggtcttttggcattctcctgtacgagattgttacctatggcaaaattccatacccgggacggactaacgcagacgtcatgacggctctctctcagggttacagaatgccgagggtggaaaactgtcccgacgagttatacgacatcatgaaaatgtgttggaaggagaaagccgaagaacgcccaacctttgactatttgcaatctgtactggatgatttctacaccgctacggaaggacagtatcagcagcagccctag

SEQ ID NO: 42185 - DNA, 3020 bp, Artificial Sequence
  derived and/or modified sequence
agttcctctcccgccgcgccgggccgcgctgccgctcgctccccggccgtggcgcctccgggccagacgcgctgcagcctccagcccgcggcaagcggggcggccgcgccacccccggccccgcgccagcagcccctcgccgcgcgtccagcgttcccggccagcagcctccccatacgcaggtcctgctgggccgccccgtcgcgccccccactctgaactcaagtcaccgtggagctccgccgccccgaaactttcaccgcgagcgggaaatatgggatgtataaaatcaaaagggaaagacagcttgagtgacgatggagtagatttgaagactcaaccagttccagaatctcagcttttacctggacagaggtttcaaactaaagatccagaggaacaaggagacattgtggtagccttgtacccctatgatggcatccacccggacgacttgtctttcaagaaaggagagaagatgaaagtcctggaggagcatggagaatggtggaaagcaaagtcccttttaacaaaaaaagaaggcttcatccccagcaactatgtggccaaactcaacaccttagaaacagaagagtggtttttcaaggatataaccaggaaggacgcagaaaggcagcttttggcaccaggaaatagcgctggagctttccttattagagaaagtgaaacattaaaaggaagcttctctctgtctgtcagagactttgaccctgtgcatggtgatgttattaagcactacaaaattagaagtctggataatgggggctattacatctctccacgaatcacttttccctgtatcagcgacatgattaaacattaccaaaagcaggcagatggcttgtgcagaagattggagaaggcttgtattagtcccaagccacagaagccatgggataaagatgcctgggagatcccccgggagtccatcaagttggtgaaaaggcttggcgctgggcagtttggggaagtctggatgggttactataacaacagtaccaaggtggctgtgaaaaccctgaagccaggaactatgtctgtgcaagccttcctggaagaagccaacctcatgaagaccctgcagcatgacaagctcgtgaggctctacgctgtggtcaccagggaggagcccatttacatcatcaccgagtacatggccaagggcagtttgctggatttcctgaagagcgatgaaggtggcaaagtgctgcttccaaagctcattgacttttctgctcagattgcagagggaatggcatacatcgagcggaagaactacattcaccgggacctgcgagcagctaatgttctggtctccgagtcactcatgtgcaaaattgcagattttggccttgctagagtaattgaagataatgagtacacagcaagggaaggtgctaagttccctattaagtggacggctccagaagcaatcaactttggatgtttcactattaagtctgatgtgtggtcctttggaatcctcctatacgaaattgtcacctatgggaaaattccctacccagggagaactaatgccgacgtgatgaccgccctgtcccagggctacaggatgccccgtgtggagaactgcccagatgagctctatgacattatgaaaatgtgctggaaagaaaaggcagaagagagaccaacgtttgactacttacagagcgtcctggatgatttctacacagccacggaagggcaataccagcagcagccttagagcacagggagacccgtccatttggcaggggtggctgcctcatttagagaggaaaagtaaccatcactggttgcacttatgatttcatgtgcggggatcatctgccgtgcctggatcctgaaatagaggctaaattactcaggaagaacaccctctaaatgggaaagtattctgtactcttagatggattctccactcagttgcaacttggacttgtcctcagcagctggtaatcttgctctgcttgacaacatctgagtgcagccgtttgagaagaaaacatctattctctccaaaaatgcacccaactagctctatgtttacaaatggacataggactcaaagtttcagagaccattgcaatgaatccccaataattgcagaactaaactcatttataaagctaaaataaccggatatatacatagcatgacatttctttgtgctttggcttacttgtttaaaaaaaaaaaaaaactaatccaacctgttagattttgcaggtgaagtcagcagcttaaaaatgtctttcccagatttcaatgatttttttccccctacctcccaaaatctgagactgttaaaacatttttcttctatgaacactgctcagacctgctagacatgccataggagtggcgtgcacatctctctctcttccagcaggaggagcccgtgagcacgcacagctgccctgtctgctcacccgaaggcaccgggctcacctggacctcccaggaaagggagaagagcctcagaaactgctctgtgtttagaaggaatatttttaagagtccagctttttcatttccacaatttcctatatccagatttgttttgacaatgtagtttggaagaactaagattctaatctctgaagaaccttatagggccttctaaaacataagagtttcctttgttgcttcaaatatttgaacattatgttaaagatcaagtattaattttagttgtactctagaaagctaaagtgccacattcggggctatttttatgattcagcaatcttttctaaattgtgtagcatgtgtatgagactatttatacccaaggatatgaaggaacataagtgactacaaggctctaataagccacggtggcaggaggttcaagcggttctgttcactaaatttttctcctgtaagctttgaatggaaacttctgtatcacatgatgtgtttcacttatgctgttgtgtatatacctaatatttctatttttgattttattttaatacacctcgtccaataac

SEQ ID NO: 42186 - protein, 128 aa, Artificial Sequence
  derived and/or modified sequence
MGDLPGLVRLSIALRIQPNDGPVFYKVDGQRFGQNRTIKLLTGSSYKVEVKIKPSTLQVENISIGGVLVPLELKSKEPDGDRVVYTGTYDTEGVTPTKSGERQPIQITMPECLEQRPQEISLTYECEE

SEQ ID NO: 42187 - DNA, 387 bp, Artificial Sequence
  derived and/or modified sequence
atgggcgacctgcccggcctggtgagactgagcatcgccctgagaatccagcccaacgacggccccgtgttctacaaggtggacggccagagattcggccagaacagaaccatcaagctgctgaccggcagcagctacaaggtggaggtgaagatcaagcccagcaccctgcaggtggagaacatcagcatcggcggcgtgctggtgcccctggagctgaagagcaaggagcccgacggcgacagagtggtgtacaccggcacctacgacaccgagggcgtgacccccaccaagagcggcgagagacagcccatccagatcaccatgcccgagtgcctggagcagagaccccaggagatcagcctgacctacgagtgcgaggagtag

SEQ ID NO: 42188 - DNA, 387 bp, Artificial Sequence
  derived and/or modified sequence
atgggagacctccctgggttagtaagattatctatcgcgctgcggatacagccgaatgacgggcccgtcttctataaggtggacggacagcgtttcggccagaaccgcaccattaagctgctgactggctcatcatataaggtcgaggttaagatcaagccctctactttacaggtcgagaacataagcatcgggggcgtgctggtgccactggagttgaaatctaaggaacctgacggtgatcgcgttgtgtacaccggcacttacgatacagagggagtgaccccaacgaagagtggggagaggcaacctatacaaatcaccatgccagagtgcctcgagcagcgcccccaagagatcagtctcacatacgaatgcgaagaatag

SEQ ID NO: 42189 - DNA, 387 bp, Artificial Sequence
  derived and/or modified sequence
atgggagacctgcccggcctggtgcggctgagcatcgccctgcgcatccagcccaatgatggccctgtgttctacaaggtggatggccagcgcttcggccagaacagaaccatcaagctgctgaccggcagcagctacaaggtggaggtgaagatcaagcccagcaccctgcaggtggagaacatcagcatcggcggcgtgctggtgcccctggagctgaagagcaaggagccagatggagacagagtggtgtacacaggcacctatgacacagaaggagtgacccccaccaagtctggagagcggcagcccatccagatcaccatgccagaatgtctggagcagaggccccaggagatcagcctgacctatgaatgtgaggagtag

SEQ ID NO: 42190 - DNA, 387 bp, Artificial Sequence
  derived and/or modified sequence
atgggcgacctgcccggcctggtgcggctgagcatcgccctgcggatccagcccaatgacggaccagtgttttacaaagtggatggccagcgtttcggacaaaacaggactattaagctcctgacaggctccagttacaaggtcgaggtgaagatcaaaccatctacactgcaggttgaaaatataagtatcgggggcgtgctggtcccactggagctaaagtcaaaagaacccgatggtgaccgggtagtatacactggcacctacgacacagaaggcgtgaccccgactaagagcggcgagaggcagcctatacagatcactatgcccgagtgtttggagcaaagaccccaggaaatatctctgacctacgagtgcgaggaatag

SEQ ID NO: 42191 - DNA, 387 bp, Artificial Sequence
  derived and/or modified sequence
atgggcgacttgcctggcttggtacggttgtctatcgccctccgcatacaaccaaatgatgggcctgtgttttacaaagttgacggccagagattcggccagaacagaacaatcaagctgctgaccggttcaagctataaggtggaggtgaaaattaagcccagcacgctccaggtggagaacatatccatcggaggggtgttggtccctttggagcttaaatctaaagaacccgatggtgaccgcgtagtgtacaccgggacatatgacaccgagggtgttacccctaccaaaagtggagaacgtcagcccatccagatcacaatgcctgagtgtctggagcagaggccccaagagatatctctgacatatgagtgtgaggaatag

SEQ ID NO: 42192 - DNA, 644 bp, Artificial Sequence
  derived and/or modified sequence
atgggggacctgccgggcctcgtgcgcctctccatcgcgctgcgcatccagcctaatgacggcccggtcttttacaaggtggacgggcagcgcttcggccagaaccgcaccatcaagctgctcaccggctcctcctacaaggttgaggtgaagattaaacccagcacgctgcaggtcgagaatatttccattggtggtgtgcttgtcccactggaactgaagtctaaagagcctgatggggacagagttgtttatacgggtacatatgacacagaaggtgtgaccccaacgaagagtggagaacggcaacccatccagatcaccatgccggagtgcctggaacaacgaccccaagagatctctcttacatatgaatgtgaagaataagcacattcttcaatgtgtgccatcatgaggaacaaatgttcttttttttttttccaaattatttgctttgcattctaggggagggcttctcacaggccatcagaattatcggggatgcttgttaaaatgtagattcctaaactctacctttttagacctcttaaattgagcaaactctctgagagtaaatccaaagcatctgcattttattaagcactttaggtgattcttatcatattaaagtttggaaaacacta

SEQ ID NO: 42193 - protein, 157 aa, Artificial Sequence
  derived and/or modified sequence
MANIAVQRIKREFKEVLKSEETSKNQIKVDLVDENFTELRGEIAGPPDTPYEGGRYQLEIKIPETYPFNPPKVRFITKIWHPNISSVTGAICLDILKDQWAAAMTLRTVLLSLQALLAAAEPDDPQDAVVANQNAVIVALSSKSWDVETATELLLSN

SEQ ID NO: 42194 - DNA, 474 bp, Artificial Sequence
  derived and/or modified sequence
atggccaacatcgccgtgcagagaatcaagagagagttcaaggaggtgctgaagagcgaggagaccagcaagaaccagatcaaggtggacctggtggacgagaacttcaccgagctgagaggcgagatcgccggcccccccgacaccccctacgagggcggcagataccagctggagatcaagatccccgagacctaccccttcaacccccccaaggtgagattcatcaccaagatctggcaccccaacatcagcagcgtgaccggcgccatctgcctggacatcctgaaggaccagtgggccgccgccatgaccctgagaaccgtgctgctgagcctgcaggccctgctggccgccgccgagcccgacgacccccaggacgccgtggtggccaaccagaacgccgtgatcgtggccctgagcagcaagagctgggacgtggagaccgccaccgagctgctgctgagcaactag

SEQ ID NO: 42195 - DNA, 474 bp, Artificial Sequence
  derived and/or modified sequence
atggccaacatcgcagtgcagaggattaaaagagaatttaaggaagtcctgaaaagtgaggagacttcaaagaaccagataaaggtcgacttggtggatgaaaatttcacagagctccggggggagatcgcgggtcctcctgatacgccatacgaaggcgggcggtatcagctcgaaattaaaatccccgagacctaccctttcaatcccccgaaagtcaggtttatcacgaagatctggcatccaaatatctcaagtgtaactggtgccatttgtctcgacatcctcaaagatcagtgggccgccgcaatgactctacgaacggtgctgctgagcctccaggccctccttgccgcggctgagcccgacgatccccaggatgctgtggtagctaatcagaatgccgtgatagtggcgctgtcctcaaaaagctgggacgtggaaacagccacagagttgttgctgagcaattag

SEQ ID NO: 42196 - DNA, 474 bp, Artificial Sequence
  derived and/or modified sequence
atggccaacattgctgtgcagaggatcaagcgggagttcaaggaggtgctgaagtctgaggagaccagcaagaaccagatcaaggtggacctggtggatgagaacttcacagagctgcggggggagattgctggccccccagacaccccctatgaaggaggccgctaccagctggagatcaagatccctgagacctaccccttcaacccccccaaggtgcgcttcatcaccaagatctggcaccccaacatcagctctgtgactggagccatctgcctggacatcctgaaggaccagtgggccgccgccatgaccctgaggacagtgctgctgagcctgcaggccctgctggccgctgctgagccagatgacccccaggatgctgtggtggccaaccagaatgctgtgattgtggccctgagcagcaagtcctgggatgtggagacagccacagagctgctgctgagcaactag

SEQ ID NO: 42197 - DNA, 474 bp, Artificial Sequence
  derived and/or modified sequence
atggccaacatcgccgtgcagcggatcaagcgggagttcaaggaggtattaaagtcagaggaaacctccaaaaaccagattaaagtcgatttggtggatgagaacttcacagagttgcgcggtgagattgccggaccacctgataccccttatgaggggggccggtaccaactggaaattaagatccccgagacttaccctttcaacccgcctaaggtgcgatttataacaaagatttggcatcccaatatttctagcgtgacaggtgccatatgtttggacatactgaaagaccaatgggcagccgccatgacattacgaacagtgctgctgtcgttacaggctctgttagcagcagccgagccagatgacccacaggacgctgtcgtggctaatcaaaatgctgtcattgtcgcactctcaagcaagagctgggatgtggaaacggccactgagctccttctttcgaattag

SEQ ID NO: 42198 - DNA, 474 bp, Artificial Sequence
  derived and/or modified sequence
atggctaacatcgcagtgcagagaatcaagcgcgagtttaaggaggtcctgaagagtgaggaaacatcaaagaaccagatcaaagtggacctcgtggacgagaacttcaccgagctgcggggtgagatcgccggtccaccggacacaccctacgaaggcggaagataccagctggagattaagatacctgagacttaccccttcaaccctccgaaggtccggttcattaccaagatctggcacccgaatatatcctccgtgactggcgcaatttgtctggacattcttaaggaccagtgggcagcagctatgacccttcggaccgtgctgctaagtctgcaggcactcctcgcagccgcagaacccgacgatccacaggacgccgtggtcgctaatcagaatgccgttatcgtagccttgtcatctaaatcctgggacgtagaaaccgcaactgagctgttgttgagtaactag

SEQ ID NO: 42199 - DNA, 2175 bp, Artificial Sequence
  derived and/or modified sequence
ggcgagcgcggcggccggggtggtagtggcagtgttcgtgtgctcaggtctgaatcgccgagggaggaggcggtggaggaagaggtggcggcggtggcggtggtcgtagcggtggcggaggaggcgggtacgaatcagctgcgggcggagacatggccaacatcgcggtgcagcgaatcaagcgggagttcaaggaggtgctgaagagcgaggagacgagcaaaaatcaaattaaagtagatcttgtagatgagaattttacagaattaagaggagaaatagcaggacctccagacacaccatatgaaggaggaagataccaactagagataaaaataccagaaacatacccatttaatccccctaaggtccggtttatcactaaaatatggcatcctaatattagttccgtcacaggggctatttgtttggatatcctgaaagatcaatgggcagctgcaatgactctccgcacggtattattgtcattgcaagcactattggcagctgcagagccagatgatccacaggatgctgtagtagcaaatcagaatgcagtaatagtggccttgtcttcaaaatcatgggatgtagagactgcaacagaattgcttctgagtaactgaggcatagagagctgctgatatagtcaagcttgcctcttcttgaggagcaccaacatctgttatttttaggattctgcatagatttcttttaaactggcattcttgcctaatgatgttatctaggcaccattggagactgaaaaaaaaaaatccctgctctgtaaataaagctaattaaacgtctgtgtaaatttaaaaaggggaaatactttaattttttttcttaatagtgtaaaaattccctgagctaagctaaaaccatggaagaaacatgctactttagtgtttagcagtgtaccaagactagcaagagtttgcttcaggattttgttgaataattaagataatattttgagtgtgtcagggccattcaaattgttggtgttgcatcacagctaccttaactgtttttaacatggatcctctgtgcctgtgaatttacttgcatgcttgtacttgacttcttaggatgggtagctgaaaagaccaccattttaagcatttgagaattcttaaatatgaaatttattcagaattgaagatggtgacctattcagagcctttttgtccttgtcaacagactgggacagtgtctgattcccccttcaccccccccacccccgccttgccacacacagctaatattctaatggtaaatttctctgtatcaggtggggaaatgtgctgaaggacagtatgtatcccttgcttcatttttaggtcgtaggtttggaatgtcttgtcccagttcttcaaacactcttaaatttttcttaagtaatgtaaaaatggaactgccaattttatttctcttgcaaaaatagtaaatacttgatgttacattattcccaggtttaatgaaagaacccaacttagtttttcagtgaatttgacacctattttttagtgatgaaatttttctttgagaactggcaaggatgcagtcagctgtttgcagtttttagcctgattttggggtctatagagattgctttattggatacttcaagtcattcttgcttgcacttcccctattgacacatgaaagctgtgttggtgttttattgtacatacttcagatgcacataggaatagaagtgtgttataaatctagctttctttatgatgtttctgataatacgagaattgaaaactttaccttctcttgtacatagtcagactatttgtattaaatttacatttcattctaagttcaaaagtttgaaaattattagttttgcaagatcacacactaatgtaaccattttatgaaggttgaagtggatttatgcaggcagttctatatatagaaatacaattctttttaaatttttaggaccaatacaaaataacaaaaatgtaatggaatcagactgaattaaagtaaggctgtatattgaaagtcatattataaaaggtttgctttctttaagtgttatttatcttaaattataatcgttaaatgtttggaagataatttttgaatcataacgtcagcataacttcatttgacttctcaataatcttgatactagaagcaataaaagaa

SEQ ID NO: 42200 - protein, 149 aa, Artificial Sequence
  derived and/or modified sequence
MANIAVQRIKREFKEVLKSEEVRFITKIWHPNISSVTGAICLDILKDQWAAAMTLRTVLLSLQALLAAAEPDDPQDAVVANQYKQNPEMFKQTARLWAHVYAGAPVSSPEYTKKIENLCAMGFDRNAVIVALSSKSWDVETATELLLSN

SEQ ID NO: 42201 - DNA, 450 bp, Artificial Sequence
  derived and/or modified sequence
atggccaacatcgccgtgcagagaatcaagagagagttcaaggaggtgctgaagagcgaggaggtgagattcatcaccaagatctggcaccccaacatcagcagcgtgaccggcgccatctgcctggacatcctgaaggaccagtgggccgccgccatgaccctgagaaccgtgctgctgagcctgcaggccctgctggccgccgccgagcccgacgacccccaggacgccgtggtggccaaccagtacaagcagaaccccgagatgttcaagcagaccgccagactgtgggcccacgtgtacgccggcgcccccgtgagcagccccgagtacaccaagaagatcgagaacctgtgcgccatgggcttcgacagaaacgccgtgatcgtggccctgagcagcaagagctgggacgtggagaccgccaccgagctgctgctgagcaactag

SEQ ID NO: 42202 - DNA, 450 bp, Artificial Sequence
  derived and/or modified sequence
atggccaacatcgccgtgcagcggataaaacgggagttcaaggaagtgctgaagtctgaagaggttcgcttcataacaaaaatctggcaccccaacatctcttctgttactggggccatttgtctggacatactgaaggaccaatgggccgcagcgatgacactgcgcacagtgctgctaagcctgcaggctctgctggctgctgccgagcccgacgacccccaggatgcagtggtcgccaaccaatacaaacagaaccccgagatgttcaaacaaacagcgagactctgggctcatgtgtatgcgggggcgcctgtgtcttcccccgagtacacaaaaaaaatcgagaatctgtgcgcgatgggtttcgaccgcaacgccgtcatcgtggctctcagtagtaagtcctgggatgtcgaaacagccacagagctgttattgagcaactag

SEQ ID NO: 42203 - DNA, 450 bp, Artificial Sequence
  derived and/or modified sequence
atggccaacattgctgtgcagaggatcaagcgggagttcaaggaggtgctgaagtctgaggaggtgcgcttcatcaccaagatctggcaccccaacatcagctctgtgactggagccatctgcctggacatcctgaaggaccagtgggccgccgccatgaccctgaggacagtgctgctgagcctgcaggccctgctggccgctgctgagccagatgacccccaggatgctgtggtggccaaccagtacaagcagaaccctgagatgttcaagcagacagcccggctgtgggcccacgtgtatgctggggcccctgtgagcagccctgagtacaccaagaagattgagaacctgtgtgccatgggctttgacagaaatgctgtgattgtggccctgagcagcaagtcctgggatgtggagacagccacagagctgctgctgagcaactag

SEQ ID NO: 42204 - DNA, 450 bp, Artificial Sequence
  derived and/or modified sequence
atggccaacatcgccgtgcagcggatcaagcgggagttcaaggaggtacttaagtccgaggaagttcgttttattaccaaaatttggcacccgaatatcagctccgtgactggtgccatctgtcttgacatactcaaggaccagtgggctgcagctatgactctgagaacagtgctattgtcgttgcaggcgctactggccgccgcggagccagatgatcctcaagacgcagtcgtagctaaccagtataagcagaaccccgagatgttcaagcaaaccgctaggctgtgggcacatgtgtacgccggtgcgcctgtcagctcccctgaatacactaaaaagatcgaaaatctgtgtgcaatgggcttcgacaggaatgctgtgatcgtggccctctcatccaagagttgggatgtggaaacagctactgaactgctgctgtcaaactag

SEQ ID NO: 42205 - DNA, 450 bp, Artificial Sequence
  derived and/or modified sequence
atggccaacattgccgtacagcggataaaacgcgagttcaaagaggtgctgaagtccgaagaggttcgcttcatcacaaagatttggcacccgaatatctcttctgtaaccggtgcgatttgtttggatattctgaaggaccaatgggcagctgcgatgaccctcagaacagtacttctgtctctgcaggctctgctggccgcagccgagccagatgaccctcaggatgcagtggtcgcgaaccagtataaacaaaaccctgagatgtttaagcagactgcaagactctgggcacatgtgtacgccggagctccagtaagttctccagagtatacaaaaaaaatagagaacctgtgcgccatgggtttcgaccgcaacgcagtgatcgttgcgttatcaagcaaatcctgggacgtggagacggccacggaattgctgctgtctaactag

SEQ ID NO: 42206 - DNA, 891 bp, Artificial Sequence
  derived and/or modified sequence
gattccacactgaggcgagcgcggcggccggggtggtagtggcagtgttcgtgtgctcaggtctgaatcgccgagggaggaggcggtggaggaagaggtggcggcggtggcggtggtcgtagcggtggcggaggaggcgggtacgaatcagctgcgggcggagacatggccaacatcgcggtgcagcgaatcaagcgggagttcaaggaggtgctgaagagcgaggaggtccggtttatcactaaaatatggcatcctaatattagttccgtcacaggggctatttgtttggatatcctgaaagatcaatgggcagctgcaatgactctccgcacggtattattgtcattgcaagcactattggcagctgcagagccagatgatccacaggatgctgtagtagcaaatcagtacaaacaaaatcccgaaatgttcaaacagacagctcgactttgggcacatgtgtatgctggagcaccagtttctagtccagaatacaccaaaaaaatagaaaacctatgtgctatgggctttgataggaatgcagtaatagtggccttgtcttcaaaatcatgggatgtagagactgcaacagaattgcttctgagtaactgaggcatagagagctgctgatatagtcaagcttgcctcttcttgaggagcaccaacatctgttatttttaggattctgcatagatttcttttaaactggcattcttgcctaatgatgttatctaggcaccattggagactgaaaaaaaaaaatccctgctctgtaaataaagctaattaaacgtctgtgtaaatttaaaaaggggaaatactttaattttttttcttaatagtgtaaaaattccctgagctaagctaaaaccatggaagaaacatgct

SEQ ID NO: 42207 - protein, 1488 aa, Artificial Sequence
  derived and/or modified sequence
MEAGSGPPGGPGSESPNRAVEYLLELNNIIESQQQLLETQRRRIEELEGQLDQLTQENRDLREESQLHRGELHRDPHGARDSPGRESQYQNLRETQFHHRELRESQFHQAARDVGYPNREGAYQNREAVYRDKERDASYPLQDTTGYTARERDVAQCHLHHENPALGRERGGREAGPAHPGREKEAGYSAAVGVGPRPPRERGQLSRGASRSSSPGAGGGHSTSTSTSPATTLQRKSDGENSRTVSVEGDAPGSDLSTAVDSPGSQPPYRLSQLPPSSSHMGGPPAGVGLPWAQRARLQPASVALRKQEEEEIKRSKALSDSYELSTDLQDKKVEMLERKYGGSFLSRRAARTIQTAFRQYRMNKNFERLRSSASESRMSRRIILSNMRMQFSFEEYEKAQNPAYFEGKPASLDEGAMAGARSHRLERGLPYGGSCGGGIDGGGSSVTTSGEFSNDITELEDSFSKQVKSLAESIDEALNCHPSGPMSEEPGSAQLEKRESKEQQEDSSATSFSDLPLYLDDTVPQQSPERLPSTEPPPQGRPEFWAPAPLPPVPPPVPSGTREDGSREEGTRRGPGCLECRDFRLRAAHLPLLTIEPPSDSSVDLSDRSDRGSVHRQLVYEADGCSPHGTLKHKGPPGRAPIPHRHYPAPEGPAPAPPGPLPPAPNSGTGPSGVAGGRRLGKCEAAGENSDGGDNESLESSSNSNETINCSSGSSSRDSLREPPATGLCKQTYQRETRHSWDSPAFNNDVVQRRHYRIGLNLFNKKPEKGIQYLIERGFLSDTPVGVAHFILERKGLSRQMIGEFLGNRQKQFNRDVLDCVVDEMDFSSMDLDDALRKFQSHIRVQGEAQKVERLIEAFSQRYCVCNPALVRQFRNPDTIFILAFAIILLNTDMYSPSVKAERKMKLDDFIKNLRGVDNGEDIPRDLLVGIYQRIQGRELRTNDDHVSQVQAVERMIVGKKPVLSLPHRRLVCCCQLYEVPDPNRPQRLGLHQREVFLFNDLLVVTKIFQKKKILVTYSFRQSFPLVEMHMQLFQNSYYQFGIKLLSAVPGGERKVLIIFNAPSLQDRLRFTSDLRESIAEVQEMEKYRVESELEKQKGMMRPNASQPGGAKDSVNGTMARSSLEDTYGAGDGLKRGALSSSLRDLSDAGKRGRRNSVGSLDSTIEGSVISSPRPHQRMPPPPPPPPPEEYKSQRPVSNSSSFLGSLFGSKRGKGPFQMPPPPTGQASASSSSASSTHHHHHHHHHGHSHGGLGVLPDGQSKLQALHAQYCQGPGPAPPPYLPPQQPSLPPPPQQPPPLPQLGSIPPPPASAPPVGPHRHFHAHGPVPGPQHYTLGRPGRAPRRGAGGHPQFAPHGRHPLHQPTSPLPLYSPAPQHPPAHKQGPKHFIFSHHPQMMPAAGAAGGPGSRPPGGSYSHPHHPQSPLSPHSPIPPHPSYPPLPPPSPHTPHSPLPPTSPHGPLHASGPPGTANPPSANPKAKPSRISTVV

SEQ ID NO: 42208 - DNA, 4437 bp, Artificial Sequence
  derived and/or modified sequence
atggaagcggggtcagggccaccaggcggtcccggctccgaatcccccaatcgggcagttgagtacttactggagctgaacaacattattgagtctcagcagcagctcctagaaacccaaaggcggcgcattgaagagctggaaggccagctggaccagttgacacaggagaatagggacctgcgcgaagagtctcaactccatcggggggaacttcaccgtgatccccacggagcccgagactcccctggaagagaatctcaataccaaaacctgcgcgagacacaattccatcatcgcgagttgcgggaatcccagttccaccaggccgcccgagacgttggttaccctaatagggagggagcctatcaaaatcgtgaagcagtgtatcgcgataaggaacgggacgcatcctacccgcttcaggacacaacaggttacacagctagggagagggacgtcgcccagtgccacctgcaccacgagaatcctgctctagggcgggaacgcggcgggagagaagccggcccagcccacccagggcgggaaaaggaagctggatattcggcggcagtaggtgtaggacctcgccctccgcgagaaaggggacagttgagccgcggagcttcccgtagttcttctccgggagcaggtggcggccattcaacctccacctccacatccccagctactactctgcagcgtaacgtagagggtgacgcacccggctcagacttatctaccgcagtggactcccctggctctcagccaccgtaccgactttcgcagctgcccccgtcttcttcacatatgggcggcccgcccgctggggtgggactcccttgggcccagagagccagactgcagccggcatccgtcgcactgcgaaagcaggaggaggaagaaataaagcgcagtaaggcattgtccgacagttacgagttatccacggaccttcaggacaaaaaagtcgaaatgttggagaggaagtacggaggaagctttctgagtaggcgggctgctaggacaattcagaccgcttttcggcaatatagaatgaataagaacttcgaacgtctcaggagcagtgcgtccgaaagtaggatgtcgcgcagaatcatattgagcaacatgagaatgcaattttcctttgaggaatacgagaaagcccagaaccctgcatattttgaaggcaagccagcctccctggacgaaggggcaatggctggggcacgcagccaccgactcgagcgtggactcccttatggcggctcttgtggcggcgggattgatggcggcggtagctctgttactacttccggagaattcagtaacgacataaccgagctggaagactcctttagtaagcaggtgaagtcactggctgaaagcatagatgaggcactgaattgccacccgagcggaccgatgtctgaggagcctggctccgctcagcttgaaaaaagagagtcaaaagagcaacaagaggatagttccgccacaagcttttccgatctgccgttgtacctcgatgatacagtgccgcagcagagcccggagagacttccctctactgaaccgccgccccagggacgcccagaattctgggcccctgcccctctcccacctgttcctccacctgtgccttctggcactagggaggatgggtctcgggaggagggaacccgccgcggacccggctgtctagagtgccgggactttaggttgcgagccgcccacttgcccctattgacaatcgagcctccaagtgattcatccgtggatttgtccgatcgtagtgatagaggcagcgtacatcgacagcttgtctatgaggccgatggttgtagtcctcacggcactcttaagcacaaagggccacctgggcgggccccgatacctcaccgtcactaccctgcccctgaaggccccgctcccgctccaccgggaccactgccaccagcaccaaatagcgggactggcccctcgggggttgcgggaggaaggcggctgggaaagtgcgaggcagccggtgaaaatagtgatggcggggataatgagtcactggagtcctcttctaacagcaatgaaaccattaattgtagcagtggctcctcctccagagattctctgcgggagcctcccgcaacaggcctctgcaagcagacataccagagagagacgcgacactcctgggattctccggcctttaacaacgacgtcgtacagagaaggcactatcgcattggccttaacctgttcaataagaaacctgagaaaggtatacaatatctgattgagcggggcttcctgagtgatacaccggtgggtgtggcacacttcatcctagaaagaaagggcctatctcgacagatgatcggagaatttcttggcaaccggcagaagcagttcaaccgggacgtgctagattgcgtggtggatgagatggacttcagtagcatggacttggacgatgctctgaggaaattccagagccatattagggttcagggcgaggcccagaaggttgaacgactcatagaggcctttagtcagcgatactgcgtttgcaacccagctctagtgagacagtttagaaaccccgatacaatctttatccttgcttttgccattatcctccttaacacggatatgtattcacccagcgtaaaggcagagagaaaaatgaagctggacgattttatcaagaatctgcgcggagtggacaacggggaggatataccgagggaccttctcgtggggatttaccagcgaatccaagggagagagttgaggaccaatgacgatcacgtaagccaggtgcaagctgtagagagaatgattgtgggcaagaagccagtcctgagcctgccacatcgaaggctggtatgctgctgccagctgtatgaggtcccagatccaaatcggccacaaaggcttgggcttcaccagcgtgaggtttttctgtttaatgatttgctggtggtcaccaagatctttcaaaaaaagaaaattcttgttacttactccttccggcagagttttcccctggtggaaatgcacatgcaactctttcagaattcctattaccaattcggaattaaactgttatctgccgtgcccggcggagagcgaaaggtattgattatttttaacgctccttccctccaggacaggttacggtttactagcgatttgcgagagtcaatcgcagaggtacaggaaatggagaaatatagggtcgaaagtgagctggaaaagcagaaggggatgatgcgcccaaacgcatcccagccagggggcgctaaggactctgtgaatggaactatggcgaggtcttctttagaagacacgtatggagcgggggacggactcaaacggggagctcttagttctagtctcagggatctctcagatgcagggaagaggggtcgccgtaactccgtggggtctttggattccactatagagggcagcgtaatcagcagcccacgaccacaccaaagaatgccaccccctcctccaccaccccctccggaagaatataagagtcaacgccctgtaagcaatagctcttcattccttggttccctgttcggatcaaaacgagggaagggccccttccaaatgccccctcccccgacaggtcaggccagtgcaagctcgtcttccgcgtcctcaacccaccaccaccaccatcatcaccatcatggacattctcacggcggactgggggtgctgcccgacggacagagcaaactgcaagcactacacgcccaatactgtcagggccccggtcctgccccgcccccttacttgcctccacaacagcctagcctgcctcctccaccacagcaaccaccgcccttgccgcaacttggaagtatccccccaccacctgcctcagcacctcccgtcgggccacatcgacactttcacgcccatgggcccgttcctgggccacaacactacacccttggaaggccaggccgagctcctcggaggggggctggaggccacccccagttcgcaccccatggtcgccaccccctccaccagccaacgtccccacttcctctctacagtcctgctccacaacatcccccggcccacaagcagggacctaagcactttattttttcgcatcacccccagatgatgcccgccgccggggcggcgggaggcccgggatctcgacccccaggagggagctattcccaccctcaccacccccagagcccgctcagtccacattctccaatcccgccccatccctcctaccccccgctgcctcctcctagccctcatacgccccactcgcctctgcctcctacaagtcctcacgggccattgcacgcttcaggtcctccaggcaccgcgaatcccccgtctgccaaccccaaggcaaagccatcaaggatctccaccgttgtgtag

SEQ ID NO: 42209 - DNA, 4467 bp, Artificial Sequence
  derived and/or modified sequence
atggaggctggcagcgggcctcccggcggccccggtagcgagtctcctaatcgcgccgttgagtacttgctcgagcttaataacattatagagtcccaacagcagctgttagaaacgcagcggcgaagaatcgaagagttggaaggacagcttgatcagctaactcaggagaaccgggacctgcgcgaagagtcacaacttcaccgcggcgagctgcatagggaccctcacggagcccgagacagtcctggaagagaaagtcagtaccagaatttgagagagacgcagtttcaccaccgggaacttcgggaaagtcagttccaccaggcagccagggacgtgggttacccaaatagggaaggcgcatatcaaaaccgggaggcagtctacagggacaaagagagagatgcaagttaccctctgcaggacactacaggctacacagcccgggaacgggacgtggcccagtgtcatctgcatcacgagaatccagctctggggcgcgagagaggcgggcgtgaagctggaccagcacaccctggccgggagaaggaggcagggtacagcgcggccgtgggagtgggcccgagaccgccccgagagcgcggtcagttgtcaaggggggcatcgcgcagctctagcccaggggctgggggtggtcactctacctcgacctccactagcccagctacaactctacagcggaaaagcgatggcgagaattcaaggaccgtcagcgtcgagggtgatgcgcctgggtcagatttgagtacagctgtcgactcgccggggtcccaacctccctatcgtctgtcccaactcccaccatcttccagtcacatgggcggacctccagccggtgtaggcctcccctgggctcagagagcccggctgcagccggctagcgtagctctgaggaagcaagaggaagaggaaattaaaagatccaaggctctcagcgatagctatgaactgagtaccgatctccaggacaaaaaagttgaaatgctggaaagaaagtatggagggagttttctgagcaggagagccgcaagaactatccaaacggcattccggcagtatcggatgaataagaattttgagagattgagaagtagcgcatctgaaagtaggatgtcaaggagaattatcctctctaacatgcgtatgcagttctcttttgaggagtacgagaaagcgcaaaatccggcatacttcgaaggaaagcctgccagcctagacgagggtgccatggcaggggcacgttcccacaggttggaacggggactcccgtatggcggcagctgtggaggcgggatcgatggtggcggctctagcgtcaccaccagtggagaatttagtaacgatattaccgaattggaagatagcttctctaagcaggtcaagtccctggccgagtcaattgacgaggctcttaactgtcaccccagcggacctatgagcgaagagcccggttcagcgcaactagaaaagagagaatccaaagagcagcaagaagactcttctgctacctctttctcagatttacccctatatcttgatgataccgtccctcaacagagcccagagcgcttgccttctaccgagcctccacctcagggaagaccagagttttgggcccccgcaccattaccacctgtgcctccacccgtgccgtctggcacccgagaagacggcagccgggaggagggcacccgcaggggacccgggtgcttagagtgcagagacttcagactgcgagctgctcacctgcctcttctgactattgagcctccaagcgacagttccgtcgacctgtccgatcgatccgatagaggcagtgtgcacaggcagctagtttacgaggcagacgggtgcagccctcacggcaccttaaaacacaaggggcccccggggagagctcctatcccacacagacactaccccgccccagaaggacctgctcccgctcctcctggcccactcccacccgccccaaactcaggcaccggcccatccggagtcgccgggggcaggcggttagggaagtgcgaggcagccggcgagaacagcgacggtggggataacgaatccctggagagctcctcaaattctaacgaaaccattaattgttccagtggctctagctcccgtgattccttgagggagccacctgcaaccgggctatgtaaacagacttatcagagagagacgcgtcacagctgggattcccccgcattcaataatgacgtggtgcaaagaagacactatcgtatcgggctgaacctgttcaacaaaaagccagagaagggaatccaatacctgatagagaggggctttttatcggatacccctgtcggtgtggcacatttcatccttgagagaaaaggcctgtcacggcaaatgattggcgaattcctcggtaacagacagaagcagttcaacagagacgtgctggattgcgtcgtggatgagatggacttttcaagcatggacttagacgacgctcttagaaaattccagtcccacatccgcgttcagggggaagctcagaaagtggagagactgatcgaggctttttcccaacgatattgcgtttgcaaccccgctctggtgaggcagttccggaatcccgataccatttttatccttgcatttgccattattttactgaacactgatatgtatagcccctcagttaaggcagagcggaagatgaagctggacgactttatcaagaacctgaggggtgtcgataacggcgaggatatcccacgggatctactcgtgggcatctatcaacggatacagggccgggagctgagaactaatgacgaccatgtgagccaagtgcaggccgtagagcgaatgatcgtcggaaagaagcctgtcctgagcttgccgcatcggcggctggtttgctgctgtcagctctacgaagtgccagatcccaataggccacagaggctgggactgcaccagcgtgaggtcttcttgttcaacgaccttctggtggtcacgaagattttccagaagaagaagatcctggtaacctattctttcaggcagtcattccccctggttgagatgcacatgcagctctttcaaaactcctactaccagtttggaatcaagctcctgagtgccgtgcctggaggtgagcggaaggttttgataatcttcaatgctcctagcctccaggaccggctgcgattcacaagtgatctccgggagagtatcgccgaagtccaggagatggaaaagtacagggtcgaatcagaactagaaaaacagaaagggatgatgcggccaaatgctagtcaaccgggaggcgctaaggatagtgtgaatggaactatggccagatcgtctctggaggatacctatggtgcaggtgatggtctgaagcggggcgctctcagctcttcactcagggatttgagcgacgccggtaaacgaggcagacggaactctgtggggtctctagatagcactatcgaaggctctgtcatcagctcgccccggcctcaccaaagaatgccgcctcccccacctcctccacctccagaagagtacaagagtcagagacctgtgtccaactccagctcttttctgggcagcctctttggctctaagaggggtaagggacccttccagatgccacctccacccaccggtcaggcatcagcatcttcaagtagcgccagttccactcaccatcatcatcaccatcatcatcacgggcattctcatggcggcctaggcgtgctgccggatgggcagagcaagctccaagcattgcatgcccagtactgtcagggacctggacccgccccacccccgtacctgcccccacaacaacccagtctgccccctccccctcaacagccacccccgctgccacagctgggctcaatccctccaccacccgccagtgctcctccggtcggtccccaccggcattttcatgcacacggtccagtgccggggccacagcactacaccctcgggaggccagggagggcacctcgccggggggcaggcgggcacccccagtttgctccccatggccgacatccactgcaccagccaactagtccactgcccctatactctcctgcgccacaacaccccccggctcacaagcagggacctaagcactttatctttagtcatcaccctcagatgatgccagccgcaggtgcagctggggggcccggtagcagaccacccggaggcagctattcccaccctcaccaccctcagtccccactaagtccccattcgcctatccctccacatcccagctatcctcccttgccccccccttccccccacacgccccactcccctctgcctcctacatcaccacacggacctctccatgcctccggaccgccggggacagcaaatcctccaagtgccaatcccaaagcaaagccttctcgaatttcaactgtcgtttag

SEQ ID NO: 42210 - DNA, 5980 bp, Artificial Sequence
  derived and/or modified sequence
cggcagcctcagctcctgctccccgtgccgccggccccagcgctgtctcccgggccccctagggcccccgggccctcaagcccggtgcgcgccctcgcgtcccgccggccccctcccccggctgggcccgggggagggtggcgccgtgagagagcggggacagggctctcctgcccgttcccctgcccctgggccgccaggatggaggcggggtcggggcccccgggcggcccgggatccgagagcccaaatcgggccgtggagtacctgctggagctgaacaacatcatcgagagccagcagcagctgctggaaacccagcggcggcgcatcgaggagctggagggccagctggaccagctcacccaggagaaccgcgacctgcgagaggagagccagctgcaccgcggggagctgcaccgggacccccacggcgcgcgggatagcccgggccgcgagagccagtaccagaacctgcgcgagacccagttccaccaccgcgagctgcgggagagccagttccaccaggcggcccgggacgtgggctacccgaaccgggaaggcgcctaccagaatcgggaggctgtgtatcgggacaaggagcgggacgcctcctacccgctccaggacactaccggttacacagcccgcgagcgtgacgtggcccagtgccacctgcaccacgagaacccagccctgggtcgcgagcgtggcgggcgggaggccgggccggcgcacccgggccgcgagaaggaagcgggctattcggcggcggtgggcgtggggccgcggccaccgcgggagcggggccagctgagccgtggcgcatccaggagctccagtcccggcgccggcggaggccacagcaccagtaccagcaccagcccggccacgaccctccagagaaatgtggagggtgatgccccaggcagtgacctgagcacagcggttgatagtcctgggagccaacccccctaccggctgagccagctgcccccctccagcagccacatggggggcccccctgctggagtgggccttccctgggctcagcgggcacgcctccagccagccagtgtcgccctgaggaagcaggaggaggaggagataaagcgctccaaggccctatcggacagctatgaactctccacagacctgcaggacaagaaggtggaaatgctggagaggaagtatgggggctccttcctgagccgcagggctgccaggaccatccagacagccttccgccagtaccgcatgaacaagaactttgagcggctacgcagctcagcctcagagagccgcatgtcccgccgcatcatcctttccaacatgcggatgcagttctcctttgaggagtatgagaaggcacagaaccccgcgtacttcgagggcaagcctgcctcgctggacgagggtgccatggctggtgcccggagccaccggcttgaacgggggctcccatatggaggctcctgtggtgggggcatcgatggtggtggaagctccgtcaccacatctggagagttttctaatgacatcacagaacttgaggactccttctccaaacaggtaaagtctctggctgaatccatcgacgaagccctgaactgccacccgtcagggcccatgtctgaggagccagggtcagcccagctggagaagcgggagtcaaaggaacagcaagaggacagctcagccacatccttcagtgatcttcccctctacctggatgacacagttccccaacaatcccctgagcgactgcccagcacagaacccccaccccagggccggcccgagttctgggcgccagcccctctcccgccagttcctccaccagtgccatcaggaacccgggaagacggtagccgtgaggaaggcactcgcaggggtcccgggtgcttggagtgccgggatttccggctgcgggctgcccaccttcccctgcttaccattgagcctcctagtgacagctccgtggacctgagtgaccgctcagatcgcggctctgtccaccgccagctggtgtatgaggctgatggctgcagcccccatgggaccctgaagcacaaggggccaccaggcagggccccgatcccacaccgccactacccagcccctgaaggcccagccccagccccaccagggcccctgccaccagcccccaacagtggcactgggcccagtggtgtggctgggggtcggaggttggggaagtgcgaggcagcaggcgagaactctgatggtggagataacgagagccttgagagctccagcaattccaatgagaccatcaactgcagctccggctcctcttctcgggacagtctaagggagcctccggctaccggcctgtgcaagcagacttaccagcgggagacaaggcatagctgggactcgccagctttcaacaatgatgtggtccagaggcggcactaccgaatcggcctcaacctcttcaacaagaagccagagaagggtatccagtatctgatcgagcggggcttcctgtcagacacaccggtgggagtggctcacttcatcctggagcggaaaggcctcagccggcagatgataggggaattcctagggaaccggcagaagcagttcaacagagacgtgttggactgtgtggtggatgagatggacttctcctccatggatctggatgatgcgctccggaagttccagtcccatatccgggttcagggtgaggcccagaaagtggagcgactcatcgaagccttcagccagcggtactgtgtctgtaacccagccctcgtgcgccagttccggaacccagacaccatcttcatccttgcttttgccatcatcctcctcaataccgacatgtacagtcccagcgtcaaagctgaacgaaagatgaaactagatgacttcatcaagaacctgagaggggttgacaatggtgaagacatcccccgagacctcctggtgggcatctaccagcgcatccaggggcgtgaactgcggaccaacgatgaccatgtgtcccaggtgcaggctgtggagcgcatgattgttggaaagaaaccagtcctgtctctccctcaccgtcgactggtttgctgctgccagctctacgaggtgccagatccaaaccgcccccagaggctagggttgcatcagcgggaggtcttcctcttcaatgatctccttgtggtcaccaaaattttccagaagaagaagatcttggtgacgtacagtttccgtcagtctttccccctcgtggaaatgcacatgcagctcttccagaattcatattaccagtttgggatcaagttgctgtctgcagtacctggtggggagcgaaaagtcctcatcatcttcaatgcccccagcctccaggaccggctgcgctttacatccgacctgcgcgagtccattgcggaggtgcaggagatggagaaataccgtgtggagtcggagctggagaagcagaaaggtatgatgcggcctaacgcctcacagcctggaggggccaaggactcagtgaatgggacgatggcccgcagtagcctggaggacacttacggggcaggcgatgggctcaaacggggcgcactcagcagttccctgcgagacctctctgatgcagggaagcgggggcggcgtaacagcgtgggatcgctggacagcaccatcgaagggtctgttattagcagtccacgccctcaccagaggatgccacctccgcccccacccccgccgccagaggagtacaagagccagaggcccgtctccaactcctcatccttcctgggctccctatttggaagcaagcggggcaaggggcccttccagatgccaccaccgccaacaggccaggcctctgcctcctcttcatctgcttcttccacgcaccaccaccaccaccaccaccatcatggccatagccacggtggcctgggggtgctgcctgatgggcagtccaagctccaggccctgcatgcccagtattgccaaggaccgggccctgccccgccaccctacctcccaccccagcagccctctcttcccccacctccccagcagcccccacccttgccccagctgggctccattccaccgcctcccgcctcagccccacctgtggggccacatcgccacttccacgcccatggcccagtcccagggccccaacactataccttgggccggccaggcagggcacccagacggggggctggaggacaccctcagtttgctccacatggccgccaccccctgcaccagcccacatccccactgcccctgtacagtcctgccccccagcaccctccagcccacaaacagggccctaagcacttcatcttcagccaccacccacagatgatgccagcagcaggcgcggctgggggccctggatcccggccaccagggggctcctactcccacccccaccacccccagtcaccattgtcaccacactcacccatcccaccccacccctcctatccacccctccccccaccctcccctcacaccccgcactcaccccttccacccacctccccccatggcccgctgcacgcctctgggccccctggcacagccaacccccccagtgcaaaccccaaggccaagccaagccggatcagcaccgtggtctgatgaatggagagagtgagctggggaacaggaaagtctggggagccacaggagagggaccttgcaccctctttgcttcctcggttttttcaaaaatatatatacacatagcaatgtcctcctccccatgtcctccctgccttgggacccgtcctctcacccccagcagttgccatggggtttccttccagattcgaggatccttgccacttgaagcctggactcagggtgctccagcgctggggagtggtgagggccttccagagatcctcgtactctttctcccgtcttcttcttccccacttttccctggaggtctagctctgtggcctcagacctctgggcctgtgtgagctctctgtgagctctggctggcggagaagggcaggtgtccggagctgtcggggtgaaggcttccctggggctcctctggccgtgtggggctaggagagcgctctgtagagttgtggccaaacttcagctggcttggccctctctctgacctcagggcctggccacacacttccatgtgtctttttgcctgctggaggacacggaccattgatgcacttggtgggtgggaccctgcttgtgttggccccacgtggggcagtgcttcctctctcgagccagtctatgccctttctccagtaggccccagcccagacctcttcggcttcaggaacttgcctcgccctgcaacgttcttatcctgatcaaagtccagacaggttttggggggggctcaggtctgggatgagaagggcactgccctccctcacccatattgcatgcccccccgccattcccttacacctaccccacctacaactgaagacaatgcactttacagatatcacccacacacacctcgctggggcaggggcacccagcatcagccctggggagagaggctcccaaagggccaccatgagcccaagatatccttcctgaggcagagattgaagccatcagagctggggttgggagccagaatgcctgagtccttctgtccgtcagaatctccgctgcctctccagcccttttgcagccctgtttatttattataaatatattttttacaagccccagctcctcttcttgccccgcatatccagctcctcactcagctcctgcctccctctcccctctccaccatgggctgcagtatagacagacagatggaccctggctgtacgaagggccagggccactggggcttgggggcgggggagggtggcagtgggaggggctgtatggagaggagctggggttcaggcattgtcttttttcctccttgtatataagaatgtatatttgatgcctcataaaagaccttgtgctc

SEQ ID NO: 42211 - DNA, 6011 bp, Artificial Sequence
  derived and/or modified sequence
cggcagcctcagctcctgctccccgtgccgccggccccagcgctgtctcccgggccccctagggcccccgggccctcaagcccggtgcgcgccctcgcgtcccgccggccccctcccccggctgggcccgggggagggtggcgccgtgagagagcggggacagggctctcctgcccgttcccctgcccctgggccgccaggatggaggcggggtcggggcccccgggcggcccgggatccgagagcccaaatcgggccgtggagtacctgctggagctgaacaacatcatcgagagccagcagcagctgctggaaacccagcggcggcgcatcgaggagctggagggccagctggaccagctcacccaggagaaccgcgacctgcgagaggagagccagctgcaccgcggggagctgcaccgggacccccacggcgcgcgggatagcccgggccgcgagagccagtaccagaacctgcgcgagacccagttccaccaccgcgagctgcgggagagccagttccaccaggcggcccgggacgtgggctacccgaaccgggaaggcgcctaccagaatcgggaggctgtgtatcgggacaaggagcgggacgcctcctacccgctccaggacactaccggttacacagcccgcgagcgtgacgtggcccagtgccacctgcaccacgagaacccagccctgggtcgcgagcgtggcgggcgggaggccgggccggcgcacccgggccgcgagaaggaagcgggctattcggcggcggtgggcgtggggccgcggccaccgcgggagcggggccagctgagccgtggcgcatccaggagctccagtcccggcgccggcggaggccacagcaccagtaccagcaccagcccggccacgaccctccagagaaaatctgatggtgagaattccagaacagtcagtgtggagggtgatgccccaggcagtgacctgagcacagcggttgatagtcctgggagccaacccccctaccggctgagccagctgcccccctccagcagccacatggggggcccccctgctggagtgggccttccctgggctcagcgggcacgcctccagccagccagtgtcgccctgaggaagcaggaggaggaggagataaagcgctccaaggccctatcggacagctatgaactctccacagacctgcaggacaagaaggtggaaatgctggagaggaagtatgggggctccttcctgagccgcagggctgccaggaccatccagacagccttccgccagtaccgcatgaacaagaactttgagcggctacgcagctcagcctcagagagccgcatgtcccgccgcatcatcctttccaacatgcggatgcagttctcctttgaggagtatgagaaggcacagaaccccgcgtacttcgagggcaagcctgcctcgctggacgagggtgccatggctggtgcccggagccaccggcttgaacgggggctcccatatggaggctcctgtggtgggggcatcgatggtggtggaagctccgtcaccacatctggagagttttctaatgacatcacagaacttgaggactccttctccaaacaggtaaagtctctggctgaatccatcgacgaagccctgaactgccacccgtcagggcccatgtctgaggagccagggtcagcccagctggagaagcgggagtcaaaggaacagcaagaggacagctcagccacatccttcagtgatcttcccctctacctggatgacacagttccccaacaatcccctgagcgactgcccagcacagaacccccaccccagggccggcccgagttctgggcgccagcccctctcccgccagttcctccaccagtgccatcaggaacccgggaagacggtagccgtgaggaaggcactcgcaggggtcccgggtgcttggagtgccgggatttccggctgcgggctgcccaccttcccctgcttaccattgagcctcctagtgacagctccgtggacctgagtgaccgctcagatcgcggctctgtccaccgccagctggtgtatgaggctgatggctgcagcccccatgggaccctgaagcacaaggggccaccaggcagggccccgatcccacaccgccactacccagcccctgaaggcccagccccagccccaccagggcccctgccaccagcccccaacagtggcactgggcccagtggtgtggctgggggtcggaggttggggaagtgcgaggcagcaggcgagaactctgatggtggagataacgagagccttgagagctccagcaattccaatgagaccatcaactgcagctccggctcctcttctcgggacagtctaagggagcctccggctaccggcctgtgcaagcagacttaccagcgggagacaaggcatagctgggactcgccagctttcaacaatgatgtggtccagaggcggcactaccgaatcggcctcaacctcttcaacaagaagccagagaagggtatccagtatctgatcgagcggggcttcctgtcagacacaccggtgggagtggctcacttcatcctggagcggaaaggcctcagccggcagatgataggggaattcctagggaaccggcagaagcagttcaacagagacgtgttggactgtgtggtggatgagatggacttctcctccatggatctggatgatgcgctccggaagttccagtcccatatccgggttcagggtgaggcccagaaagtggagcgactcatcgaagccttcagccagcggtactgtgtctgtaacccagccctcgtgcgccagttccggaacccagacaccatcttcatccttgcttttgccatcatcctcctcaataccgacatgtacagtcccagcgtcaaagctgaacgaaagatgaaactagatgacttcatcaagaacctgagaggggttgacaatggtgaagacatcccccgagacctcctggtgggcatctaccagcgcatccaggggcgtgaactgcggaccaacgatgaccatgtgtcccaggtgcaggctgtggagcgcatgattgttggaaagaaaccagtcctgtctctccctcaccgtcgactggtttgctgctgccagctctacgaggtgccagatccaaaccgcccccagaggctagggttgcatcagcgggaggtcttcctcttcaatgatctccttgtggtcaccaaaattttccagaagaagaagatcttggtgacgtacagtttccgtcagtctttccccctcgtggaaatgcacatgcagctcttccagaattcatattaccagtttgggatcaagttgctgtctgcagtacctggtggggagcgaaaagtcctcatcatcttcaatgcccccagcctccaggaccggctgcgctttacatccgacctgcgcgagtccattgcggaggtgcaggagatggagaaataccgtgtggagtcggagctggagaagcagaaaggtatgatgcggcctaacgcctcacagcctggaggggccaaggactcagtgaatgggacgatggcccgcagtagcctggaggacacttacggggcaggcgatgggctcaaacggggcgcactcagcagttccctgcgagacctctctgatgcagggaagcgggggcggcgtaacagcgtgggatcgctggacagcaccatcgaagggtctgttattagcagtccacgccctcaccagaggatgccacctccgcccccacccccgccgccagaggagtacaagagccagaggcccgtctccaactcctcatccttcctgggctccctatttggaagcaagcggggcaaggggcccttccagatgccaccaccgccaacaggccaggcctctgcctcctcttcatctgcttcttccacgcaccaccaccaccaccaccaccatcatggccatagccacggtggcctgggggtgctgcctgatgggcagtccaagctccaggccctgcatgcccagtattgccaaggaccgggccctgccccgccaccctacctcccaccccagcagccctctcttcccccacctccccagcagcccccacccttgccccagctgggctccattccaccgcctcccgcctcagccccacctgtggggccacatcgccacttccacgcccatggcccagtcccagggccccaacactataccttgggccggccaggcagggcacccagacggggggctggaggacaccctcagtttgctccacatggccgccaccccctgcaccagcccacatccccactgcccctgtacagtcctgccccccagcaccctccagcccacaaacagggccctaagcacttcatcttcagccaccacccacagatgatgccagcagcaggcgcggctgggggccctggatcccggccaccagggggctcctactcccacccccaccacccccagtcaccattgtcaccacactcacccatcccaccccacccctcctatccacccctccccccaccctcccctcacaccccgcactcaccccttccacccacctccccccatggcccgctgcacgcctctgggccccctggcacagccaacccccccagtgcaaaccccaaggccaagccaagccggatcagcaccgtggtctgatgaatggagagagtgagctggggaacaggaaagtctggggagccacaggagagggaccttgcaccctctttgcttcctcggttttttcaaaaatatatatacacatagcaatgtcctcctccccatgtcctccctgccttgggacccgtcctctcacccccagcagttgccatggggtttccttccagattcgaggatccttgccacttgaagcctggactcagggtgctccagcgctggggagtggtgagggccttccagagatcctcgtactctttctcccgtcttcttcttccccacttttccctggaggtctagctctgtggcctcagacctctgggcctgtgtgagctctctgtgagctctggctggcggagaagggcaggtgtccggagctgtcggggtgaaggcttccctggggctcctctggccgtgtggggctaggagagcgctctgtagagttgtggccaaacttcagctggcttggccctctctctgacctcagggcctggccacacacttccatgtgtctttttgcctgctggaggacacggaccattgatgcacttggtgggtgggaccctgcttgtgttggccccacgtggggcagtgcttcctctctcgagccagtctatgccctttctccagtaggccccagcccagacctcttcggcttcaggaacttgcctcgccctgcaacgttcttatcctgatcaaagtccagacaggttttggggggggctcaggtctgggatgagaagggcactgccctccctcacccatattgcatgcccccccgccattcccttacacctaccccacctacaactgaagacaatgcactttacagatatcacccacacacacctcgctggggcaggggcacccagcatcagccctggggagagaggctcccaaagggccaccatgagcccaagatatccttcctgaggcagagattgaagccatcagagctggggttgggagccagaatgcctgagtccttctgtccgtcagaatctccgctgcctctccagcccttttgcagccctgtttatttattataaatatattttttacaagccccagctcctcttcttgccccgcatatccagctcctcactcagctcctgcctccctctcccctctccaccatgggctgcagtatagacagacagatggaccctggctgtacgaagggccagggccactggggcttgggggcgggggagggtggcagtgggaggggctgtatggagaggagctggggttcaggcattgtcttttttcctccttgtatataagaatgtatatttgatgcctcataaaagaccttgtgctca

SEQ ID NO: 42212 - DNA, 4437 bp, Artificial Sequence
  derived and/or modified sequence
atggaggccggcagcggccccccaggcggccctggcagcgagagccccaacagagctgtggagtacctgctggagctgaacaacatcatcgagagccagcagcagctgctggagacccagaggcggcgcatcgaggagctggagggccagctggaccagctgacccaggagaacagagacctgcgggaggagagccagctgcacagaggagagctgcaccgggacccccatggagcccgggacagccctggccgggagagccagtaccagaacctgcgggagacccagttccaccaccgggagctgcgggagagccagttccaccaggccgccagagatgtgggctaccccaaccgggagggcgcctaccagaaccgggaggccgtgtacagagacaaggagagagatgccagctaccccctgcaggacaccaccggctacacagcccgggagagagatgtggcccagtgccacctgcaccacgagaacccagccctgggccgggagcggggcggccgggaggccggccctgcccaccctggccgggagaaggaggccggctacagcgctgctgtgggcgtgggcccccggcccccccgggagcggggccagctgagcagaggagccagccgcagcagcagccctggagctgggggcggccacagcaccagcaccagcaccagccctgccaccaccctgcagagaaatgtggagggagatgcccctggcagtgacctgagcacagctgtggacagccctggcagccagcccccctaccgcctgagccagctgccccccagcagcagccacatgggcggccccccagctggggtgggcctgccctgggcccagagggcccggctgcagcctgcctctgtggccctgaggaagcaggaggaggaggagatcaagaggagcaaggccctgagtgacagctatgagctgagcacagacctgcaggacaagaaggtggagatgctggagaggaaatatggaggcagcttcctgagccggcgggccgcccggaccatccagacagccttccggcagtacaggatgaacaagaactttgagcggctgcggagcagcgccagcgagagcaggatgagccgccgcatcatcctgagcaacatgaggatgcagttctcctttgaggagtatgagaaggcccagaacccagcctactttgagggcaagccagccagcctggatgagggcgccatggccggggcccggagccaccggctggagcggggcctgccctacggcggcagctgtggcggcggcattgatggcggcggcagctctgtgaccaccagcggggagttcagcaatgacatcacagagctggaggacagcttcagcaagcaggtgaagagcctggccgagagcattgatgaggccctgaactgccaccccagcggccccatgtctgaggagcccggcagcgcccagctggagaagcgggagagcaaggagcagcaggaggacagcagcgccaccagcttcagtgacctgcccctgtacctggatgacacagtgccccagcagagccctgagcggctgcccagcacagagcccccaccccagggccggcctgagttctgggccccagcccccctgccccctgtgcccccacctgtgcccagcggcacccgggaggatggcagccgggaggagggcacccggcggggccctggctgcctggagtgccgggacttccggctgcgggccgcccacctgcccctgctgaccatcgagccccccagcgacagctctgtggacctgagtgacagaagtgaccggggctctgtgcaccggcagctggtgtatgaagcagatggctgcagcccccacggcaccctgaagcacaagggccccccaggccgggcccccatcccccaccgccactacccagcccctgagggccctgccccagcccctcctggccccctgcccccagcccccaacagcggcaccggccccagcggcgtggccggcggccgccgcctgggcaaatgtgaggccgctggagaaaattctgatggaggagacaatgaaagcctggagagcagcagcaacagcaatgagaccatcaactgcagcagcggcagcagcagccgggacagcctgcgggagcccccagccaccggcctgtgcaagcagacctaccagcgggagaccaggcacagctgggacagccctgccttcaacaatgatgtggtgcagaggaggcactacagaattggcctgaacctcttcaacaagaagccagagaagggcatccagtacctgattgaaagaggcttcctgagtgacacccctgtgggcgtggcccacttcatcctggagaggaagggcctgagccggcagatgattggagagttcctgggcaaccggcagaagcagttcaacagagatgtgctggactgtgtggtggatgagatggacttcagctccatggacctggatgatgccctgaggaagttccagagccacatccgggtgcagggcgaggcccagaaggtggagcggctgattgaggccttcagccagcgctactgtgtgtgcaacccagccctggtgcggcagttcaggaacccagacaccatcttcatcctggcctttgccatcatcctgctgaacacagacatgtacagccccagcgtgaaggccgagaggaagatgaagctggatgacttcatcaagaacctgcggggcgtggacaacggggaggacatcccccgggacctgctggtgggcatctaccagaggatccagggccgggagctgcggaccaatgatgaccacgtgtcccaggtgcaggccgtggagaggatgattgtgggcaagaagcctgtgctgagcctgccccaccggcggctggtgtgctgctgccagctgtatgaggtgcctgaccccaaccggccccagaggctgggcctgcaccagcgggaggtgttcctgttcaatgacctgctggtggtgaccaagatcttccagaagaagaagatcctggtgacctacagcttccggcagagcttccccctggtggagatgcacatgcagctgttccagaacagctactaccagtttggcatcaagctgctgtctgctgtgcctggaggagagaggaaggtgctgatcatcttcaatgcccccagcctgcaggaccggctgcgcttcaccagtgacctgcgggagagcattgctgaggtgcaggagatggagaagtacagagtggagagcgagctggagaagcagaagggcatgatgaggcccaatgccagccagcctggaggagccaaggacagcgtgaatggcaccatggcccggagcagcctggaggacacctatggagctggagatggcctgaagagaggagccctgagcagcagcctgcgggacctgagtgatgctgggaagagaggaagaagaaacagcgtgggcagcctggacagcaccatcgagggcagcgtcatcagcagcccccggccccaccagaggatgcctcctcctcctcctcctcctcctcctgaggagtacaagagccagaggcctgtgagcaacagcagcagcttcctgggcagcctgtttggcagcaagaggggcaagggccccttccagatgcctcctccacccaccggccaggccagcgccagcagcagcagcgccagcagcacccaccaccaccaccaccaccaccaccacggccacagccatggaggcctgggcgtgctgcctgatggccagagcaagctgcaggccctgcacgcccagtactgccagggccctggccctgcccccccaccctacctgcccccccagcagcccagcctgcccccaccaccccagcagcccccacccctgccccagctgggcagcatccccccacctccagccagcgcccctcctgtgggcccccaccgccacttccacgcccacggccctgtgcccggcccccagcactacaccctgggccggcccggccgggcccccaggagaggagctgggggccacccccagtttgccccccacggccgccaccccctgcaccagcccaccagccccctgcccctgtacagccctgccccccagcaccccccagcccacaagcagggccccaagcacttcatcttcagccaccacccccagatgatgcctgctgctggagctgctgggggccctggcagccggcccccaggcggcagctacagccacccccaccacccccagagccccctgagcccccacagccccatccccccccaccccagctacccacccctgcccccacccagcccccacaccccccacagccccctgccccccaccagcccccacggccccctgcacgccagcggccccccaggcacagccaacccccccagcgccaaccccaaggccaagcccagccgcatcagcacagtggtgtag

SEQ ID NO: 42213 - DNA, 4467 bp, Artificial Sequence
  derived and/or modified sequence
atggaggccggcagcggccccccaggcggccctggcagcgagagccccaacagagctgtggagtacctgctggagctgaacaacatcatcgagagccagcagcagctgctggagacccagaggcggcgcatcgaggagctggagggccagctggaccagctgacccaggagaacagagacctgcgggaggagagccagctgcacagaggagagctgcaccgggacccccatggagcccgggacagccctggccgggagagccagtaccagaacctgcgggagacccagttccaccaccgggagctgcgggagagccagttccaccaggccgccagagatgtgggctaccccaaccgggagggcgcctaccagaaccgggaggccgtgtacagagacaaggagagagatgccagctaccccctgcaggacaccaccggctacacagcccgggagagagatgtggcccagtgccacctgcaccacgagaacccagccctgggccgggagcggggcggccgggaggccggccctgcccaccctggccgggagaaggaggccggctacagcgctgctgtgggcgtgggcccccggcccccccgggagcggggccagctgagcagaggagccagccgcagcagcagccctggagctgggggcggccacagcaccagcaccagcaccagccctgccaccaccctgcagaggaagagtgatggagagaacagcaggacagtgtctgtggagggagatgcccctggcagtgacctgagcacagctgtggacagccctggcagccagcccccctaccgcctgagccagctgccccccagcagcagccacatgggcggccccccagctggggtgggcctgccctgggcccagagggcccggctgcagcctgcctctgtggccctgaggaagcaggaggaggaggagatcaagaggagcaaggccctgagtgacagctatgagctgagcacagacctgcaggacaagaaggtggagatgctggagaggaaatatggaggcagcttcctgagccggcgggccgcccggaccatccagacagccttccggcagtacaggatgaacaagaactttgagcggctgcggagcagcgccagcgagagcaggatgagccgccgcatcatcctgagcaacatgaggatgcagttctcctttgaggagtatgagaaggcccagaacccagcctactttgagggcaagccagccagcctggatgagggcgccatggccggggcccggagccaccggctggagcggggcctgccctacggcggcagctgtggcggcggcattgatggcggcggcagctctgtgaccaccagcggggagttcagcaatgacatcacagagctggaggacagcttcagcaagcaggtgaagagcctggccgagagcattgatgaggccctgaactgccaccccagcggccccatgtctgaggagcccggcagcgcccagctggagaagcgggagagcaaggagcagcaggaggacagcagcgccaccagcttcagtgacctgcccctgtacctggatgacacagtgccccagcagagccctgagcggctgcccagcacagagcccccaccccagggccggcctgagttctgggccccagcccccctgccccctgtgcccccacctgtgcccagcggcacccgggaggatggcagccgggaggagggcacccggcggggccctggctgcctggagtgccgggacttccggctgcgggccgcccacctgcccctgctgaccatcgagccccccagcgacagctctgtggacctgagtgacagaagtgaccggggctctgtgcaccggcagctggtgtatgaagcagatggctgcagcccccacggcaccctgaagcacaagggccccccaggccgggcccccatcccccaccgccactacccagcccctgagggccctgccccagcccctcctggccccctgcccccagcccccaacagcggcaccggccccagcggcgtggccggcggccgccgcctgggcaaatgtgaggccgctggagaaaattctgatggaggagacaatgaaagcctggagagcagcagcaacagcaatgagaccatcaactgcagcagcggcagcagcagccgggacagcctgcgggagcccccagccaccggcctgtgcaagcagacctaccagcgggagaccaggcacagctgggacagccctgccttcaacaatgatgtggtgcagaggaggcactacagaattggcctgaacctcttcaacaagaagccagagaagggcatccagtacctgattgaaagaggcttcctgagtgacacccctgtgggcgtggcccacttcatcctggagaggaagggcctgagccggcagatgattggagagttcctgggcaaccggcagaagcagttcaacagagatgtgctggactgtgtggtggatgagatggacttcagctccatggacctggatgatgccctgaggaagttccagagccacatccgggtgcagggcgaggcccagaaggtggagcggctgattgaggccttcagccagcgctactgtgtgtgcaacccagccctggtgcggcagttcaggaacccagacaccatcttcatcctggcctttgccatcatcctgctgaacacagacatgtacagccccagcgtgaaggccgagaggaagatgaagctggatgacttcatcaagaacctgcggggcgtggacaacggggaggacatcccccgggacctgctggtgggcatctaccagaggatccagggccgggagctgcggaccaatgatgaccacgtgtcccaggtgcaggccgtggagaggatgattgtgggcaagaagcctgtgctgagcctgccccaccggcggctggtgtgctgctgccagctgtatgaggtgcctgaccccaaccggccccagaggctgggcctgcaccagcgggaggtgttcctgttcaatgacctgctggtggtgaccaagatcttccagaagaagaagatcctggtgacctacagcttccggcagagcttccccctggtggagatgcacatgcagctgttccagaacagctactaccagtttggcatcaagctgctgtctgctgtgcctggaggagagaggaaggtgctgatcatcttcaatgcccccagcctgcaggaccggctgcgcttcaccagtgacctgcgggagagcattgctgaggtgcaggagatggagaagtacagagtggagagcgagctggagaagcagaagggcatgatgaggcccaatgccagccagcctggaggagccaaggacagcgtgaatggcaccatggcccggagcagcctggaggacacctatggagctggagatggcctgaagagaggagccctgagcagcagcctgcgggacctgagtgatgctgggaagagaggaagaagaaacagcgtgggcagcctggacagcaccatcgagggcagcgtcatcagcagcccccggccccaccagaggatgcctcctcctcctcctcctcctcctcctgaggagtacaagagccagaggcctgtgagcaacagcagcagcttcctgggcagcctgtttggcagcaagaggggcaagggccccttccagatgcctcctccacccaccggccaggccagcgccagcagcagcagcgccagcagcacccaccaccaccaccaccaccaccaccacggccacagccatggaggcctgggcgtgctgcctgatggccagagcaagctgcaggccctgcacgcccagtactgccagggccctggccctgcccccccaccctacctgcccccccagcagcccagcctgcccccaccaccccagcagcccccacccctgccccagctgggcagcatccccccacctccagccagcgcccctcctgtgggcccccaccgccacttccacgcccacggccctgtgcccggcccccagcactacaccctgggccggcccggccgggcccccaggagaggagctgggggccacccccagtttgccccccacggccgccaccccctgcaccagcccaccagccccctgcccctgtacagccctgccccccagcaccccccagcccacaagcagggccccaagcacttcatcttcagccaccacccccagatgatgcctgctgctggagctgctgggggccctggcagccggcccccaggcggcagctacagccacccccaccacccccagagccccctgagcccccacagccccatccccccccaccccagctacccacccctgcccccacccagcccccacaccccccacagccccctgccccccaccagcccccacggccccctgcacgccagcggccccccaggcacagccaacccccccagcgccaaccccaaggccaagcccagccgcatcagcacagtggtgtag

SEQ ID NO: 42214 - DNA, 4437 bp, Artificial Sequence
  derived and/or modified sequence
atggaggccggcagcggcccccccggcggccccggcagcgagagccccaatcgggccgttgaatatctcctggagttaaataacattatcgagtcccagcagcagctactggaaacacagcgccggaggatcgaggagctggaaggccagctggaccagcttacacaggaaaacagagatctccgggaggagtctcagctccatagaggcgagcttcacagagatccacatggtgctagggactcccctggaagagagagtcagtatcaaaatctgcgggagactcaatttcaccatcgggagctaagagaaagtcaattccatcaggccgccagggacgtgggctatccaaatcgtgagggcgcttatcagaatcgtgaggccgtttatcgcgataaagaacgcgatgcatcctatccactccaggacacaacaggctacaccgcaagagagcgcgacgttgcccagtgtcatctccatcatgaaaacccggccctaggtcgagaacgtggtgggcgggaagctggaccagctcacccaggacgggagaaggaggccggttactcagctgccgttggggtgggaccacgtccccccagagagcgcggacagctgtctcgcggggctagtcgatcctcttcgccaggggccggcggaggacactcaacaagcactagcactagcccagctacaaccttacagaggaacgtggaaggagatgccccagggagcgacctttctaccgcagtagattctcccggatcgcagccaccgtatcgactttcccagcttccgccgagcagttcccatatgggtggccctccagcaggggtaggtttgccttgggcgcagcgggctagactacaaccagctagcgtggctttgaggaagcaggaagaagaggaaatcaaaagaagtaaggcgctgagcgactcctatgagctgtccaccgacctccaagataaaaaggtggaaatgttggagcggaagtatgggggtagctttctgagcagacgtgccgctagaactatacaaacagcatttcggcagtatagaatgaataagaacttcgagagactgcgcagctccgcttccgagtcccgcatgtccagaagaattatcctatcaaacatgcggatgcaattttccttcgaagaatacgagaaggcccagaatccagcctacttcgaagggaaaccagccagcctagacgagggagccatggctggagccagatcacatcgattggaacgcggcctcccctacgggggaagttgcggaggaggaatcgacgggggcggatcaagtgtaactacctccggagaattttccaatgacatcacagaactggaggatagctttagcaagcaagtaaagagcctagcagagagcatagacgaggccttaaattgtcatccctcaggtcccatgagcgaggaaccaggcagcgcccagctcgagaagcgcgaatccaaggagcaacaggaagactcaagcgctacatctttttcggatctgccactctacctggatgacacagtgcctcagcaatcgccggagcgcctcccctcaacagaaccccccccccagggccggccagagttttgggcgccagcccccctgccacccgtcccgccacccgtgccctctggaacgagagaggatggcagtcgagaggagggaaccaggcggggaccgggctgtctcgagtgcagagacttcagactgcgggccgcccacctaccactgctgactattgagcctccttcagattctagtgtggatctttctgatagaagcgatcgcggcagcgtccatcgtcagcttgtctacgaagcggatggctgcagcccccatgggactctaaagcacaagggtcccccaggtagagcccccatccctcaccgacactaccctgctccagaggggcccgcccccgctccacccggtcctctgcctcccgcaccaaacagcggcactggaccctccggagtggcagggggacgccgtcttggtaagtgtgaggctgccggcgagaattccgacggtggggacaacgaaagcttagagtcatcgtcaaattccaacgagaccattaactgttctagtggatcctcttcaagagactcactgagggagcccccagcaaccggcctctgtaaacagacctatcagagggagacaaggcactcctgggactctccagcttttaataacgatgtggtccagaggcgacattatcgcatcggcctgaatctcttcaataagaagcctgagaagggcatacaatatctgattgaaaggggattcctgtccgacacccctgtgggagttgctcattttatcttagaaagaaagggcctcagcagacaaatgatcggcgaattcctggggaatcgacagaagcagtttaatagggatgtcctcgactgcgtcgtggacgaaatggatttttcaagtatggacctcgatgacgctctccgcaagtttcagtcacatatcagagtgcagggtgaggcgcagaaagtcgaaagactcattgaagctttcagccaacgatattgcgtgtgtaatcctgctcttgtgcgtcagtttagaaacccagacactatttttatcttggcattcgcaatcatcctgttgaacaccgacatgtactccccatctgtgaaggcggaacgcaagatgaagctggatgacttcattaaaaatctgcgtggtgtcgacaatggggaggatattcctcgggatctccttgttggaatttaccagcggatacagggccgcgagctgcgcaccaacgacgaccatgtttcccaagtacaagccgtcgagcggatgattgtggggaaaaagcctgtgctctctctccctcatcgaaggctcgtgtgttgctgccagctttatgaagtccctgaccccaataggccccagcgacttggcctgcaccagagagaagtatttctgtttaatgatctgctggtcgtgactaagatcttccagaagaagaagatccttgtgacctactcattcaggcagtcttttcctctggtggagatgcatatgcagctattccagaactcctattaccagtttgggattaaattactgtcagccgtccctggcggggaacggaaagtcctgattattttcaacgctccatcattacaggacaggcttagattcacttctgatctgagggaatcgattgcggaagtccaggaaatggagaagtatcgagtcgagtccgaactcgagaagcagaaagggatgatgcgtcctaatgcaagccaacccggcggagctaaggactccgtcaacgggacaatggctagatccagcctggaggatacctatggcgcgggcgacggcctcaagaggggagctttgagttcttcgctccgagatctgtcggacgcgggtaaacgcggacggcgcaatagcgtgggctcgctggattccaccatcgaaggatcggtgataagcagtccaagaccacaccagagaatgccccccccccctcccccccctcctcctgaggagtacaaatcccaacgccctgtctccaacagcagcagttttctgggttcacttttcggctccaaaaggggcaagggcccatttcagatgcctccccccccgacaggccaggcaagcgcatccagctcatccgcctcctcaactcatcatcatcaccaccaccatcaccacggccactcacacggaggcctgggagtgttacccgatggacaaagcaagctgcaggctcttcacgctcagtattgtcaaggacctggcccggctcctcccccttacctccctcctcagcaaccttcattgccgccacctccgcaacagccccctcctctaccacagttaggtagtatccctccaccgccagcgtcagcaccacctgtggggcctcaccgtcacttccatgcccacggcccagtgcccgggccccagcactatactctcggtcgacctgggagggcacctaggagaggcgctgggggtcatccacagttcgctcctcatggacgtcacccactccatcagccgacgtcaccactccccctctactctccggcaccccagcaccctcccgcccataagcaggggcctaaacacttcatcttctctcatcatccgcagatgatgcccgccgccggcgctgcaggtggcccagggagtagaccacccgggggatcatactcccatccccaccaccctcagtctcccctttccccgcactccccaattcctccccacccatcctacccgcctttgcctcccccctcccctcacactccacattcgccactgccacctacctccccacatgggcccttgcacgcctccgggcctccaggcaccgcaaacccaccctctgccaaccctaaggcgaagcctagtaggatctcaactgtcgtgtag

SEQ ID NO: 42215 - DNA, 4467 bp, Artificial Sequence
  derived and/or modified sequence
atggaggccggcagcggcccccccggcggccccggcagcgagagccccaaccgggcagtcgaatacttgttagaacttaacaacataatcgaatcccagcagcagctgttggagactcaacgtaggcgcattgaggagctggagggccagctggatcagctgacgcaggaaaatagggacctgcgcgaggagtctcagttacacaggggagaactgcatagagacccccatggtgcaagagactcgcctggccgggaatcacagtatcagaatctcagagaaactcagtttcatcacagagaattacgtgagagtcagttccatcaggccgcacgtgatgtgggatatcccaatagagaaggagcctaccagaatcgtgaagctgtgtacagggataaagagcgggacgcgtcttacccactccaggatacaaccggatatacagctcgcgagcgcgacgtagcccagtgtcatctccaccacgaaaacccagccctggggagagagcgagggggcagagaggccggtcccgcacaccctggacgggaaaaggaagcaggctattcagctgcagtgggagtgggccccaggccccctcgggagcggggccagctgtcccgaggtgcatcgcgctccagcagtcccggcgctggcggaggccattcaacctctaccagcacctctccagcgaccacgctgcagcgaaagagtgacggtgaaaacagccggacggtcagtgtcgagggggacgcgcccggctctgacctcagtacagcggtagactctccaggatctcagcccccataccggctcagccagttacctccaagctcctctcatatggggggacctccagccggggtaggcctgccctgggcacagagggctcggttgcagccggcgtcagtggctctgcgaaaacaggaggaagaggagatcaagagatcaaaggctctctcggactcttatgagttaagtaccgacctccaggacaagaaggtcgagatgctggagagaaaatatggcggcagttttttaagccgccgcgctgcacgcaccatccaaacagccttccggcagtacaggatgaataaaaactttgagcgacttcgctccagcgcatcagagtcacggatgtctagaaggattatactctccaatatgagaatgcagttcagttttgaagagtacgagaaggcccagaaccctgcatactttgagggtaaacctgcttccttagacgagggagccatggcgggggccaggtcccaccgcctggaacgggggctcccgtacgggggatcttgtggcgggggcatcgacggagggggatcctccgtgactacctcaggagaattctcaaacgatattacagagcttgaagactccttttctaagcaggtcaaaagcctggctgagagcatagacgaagccttaaattgtcatccatctgggcccatgagcgaggaacccggctcagcccaactggagaagcgggaatccaaagaacagcaggaggactcttctgccacatcttttagcgacctcccgttgtatctggatgacaccgttccacagcaaagcccagagaggctgccatctacggagccaccccctcagggacggcctgaattttgggcccctgctccccttcccccggtcccgcctcccgtgccttcgggcactagggaagacgggtctagagaggaaggcactcgaagagggcccggctgtctggagtgtagggatttccggctacgcgcggctcatctgcccctgcttactatcgagcctccgtcagactcttctgtggatctgtcagaccgttccgaccgtggttcagtccataggcagttggtgtacgaggctgatggctgcagcccccatgggaccctgaagcataaaggaccgccagggagagcccccatcccacatcggcactatcctgctcccgaagggcctgcacccgctcctccgggccccttgccccctgcgccaaactctggtacaggtccaagcggggtggctggcgggcgccgactgggtaaatgcgaagccgctggtgagaattcagatgggggagataatgaatcccttgagtcttcctccaactccaatgagaccatcaattgttcttcagggagcagttccagggactcccttcgagagccccccgctacaggcctatgcaaacagacctatcagagagaaacccgacattcctgggactctccggcttttaacaacgatgtggtgcagaggcgacactatagaattggcctcaatttatttaacaaaaagccagagaagggcattcaatacttgattgagagggggttcctttccgacaccccagttggggttgcacatttcatcctagaacgtaaggggctgagcagacaaatgatcggggaatttctgggcaataggcagaaacaattcaaccgtgacgtccttgactgtgtggttgatgaaatggacttttctagcatggatctggacgacgcactgcgcaaattccagagtcacattagggtccagggcgaggcacagaaggtggagagactgatcgaggctttctcccagcgatactgcgtctgcaacccagcactcgtgaggcagtttaggaaccccgatacaatattcatactggcatttgcgattattctactcaacacggatatgtacagccccagcgtgaaggctgagcgaaagatgaagctggacgattttataaagaacttgcggggtgtcgacaacggggaggacattcctcgtgacctgctcgttggtatttaccagcggatccagggccgcgaactgagaacaaatgatgaccacgtgagccaggtgcaggctgtcgagagaatgatcgtggggaaaaaaccagttctatctctcccccatcgcaggctcgtatgttgttgtcagctgtacgaggtaccagaccctaatagaccccagcggctcgggctgcaccagcgcgaagtttttctttttaatgacttactggttgtgacgaaaattttccagaagaagaagatcctggttacatatagcttccgccagtcatttcctctggtcgagatgcacatgcagctcttccagaatagttattatcagttcggcataaaactactcagcgccgtgcctggcggagaacgaaaggtattaattatctttaacgcgccctcacttcaggaccgactccggttcacttcagacctgagggaatccattgctgaggtgcaggagatggagaagtacagagtcgagtcggagctggaaaaacagaagggtatgatgcgtcccaatgccagccagcctgggggcgctaaggatagcgtaaacgggaccatggctcgctcttctctcgaggatacgtatggagccggagatgggttgaagcggggtgctctaagctcaagtttgagggacctgagcgatgccggaaaaagagggagaaggaactctgtgggtagcctggactccactattgagggtagcgtgatttctagtcctaggcctcatcaaagaatgccacctccaccaccaccaccacctccagaagagtataagtctcagaggcctgtgtccaattccagttcctttctgggcagtctattcggctctaaaaggggaaaagggcctttccagatgcccccaccaccgaccggtcaagctagcgccagcagctcaagtgcatcctccacgcatcaccaccatcatcaccatcaccacggacatagtcacggcggcctgggagtgctgccagatggacagtcgaaactgcaggctttgcacgcacagtattgtcagggccctggacccgccccacccccgtacctgccaccacagcagccatcgttgccgccccctccacaacagccaccgcctctacctcagttgggaagcatacccccaccgcccgccagtgcccctcccgttggccctcaccgacatttccacgcacatggcccagtacccggtccacagcattatacactcggacgaccggggcgtgcgcctcgtagaggcgcaggaggtcacccccagtttgcccctcacggccggcaccccctgcaccagccaacctcgcctcttccactctactctcccgcccctcagcatccccccgcgcacaaacaaggcccaaagcattttattttctcccatcatccgcaaatgatgcccgcagctggcgcagccggggggcctggctcacggccaccaggtggaagctactcgcacccgcatcacccacagagccccctgtcaccccactcgcctattccaccacatcctagttaccctcccctgccacctccctctccccacaccccacactcccccttgcctccaacgtccccccacggccctcttcacgcatccgggcctcccgggacagccaacccccccagcgcgaacccaaaagccaagccgtcacgtatctcaaccgtagtgtag

SEQ ID NO: 42216 - DNA, 4437 bp, Artificial Sequence
  derived and/or modified sequence
atggaggcgggatccggaccgccaggaggacccggttctgaaagcccaaaccgggctgtggaatacttgctggagttaaataatattatcgagtctcaacagcaactgctagaaacccagcggaggcgaattgaggagttggaaggacagctagaccagcttacacaagagaatcgggatctgcgggaggagtcccagctgcaccggggtgagctacatcgcgacccccacggagccagggatagcccaggtagagagagccagtaccagaacctaagggagacccagttccaccaccgagagttacgggagagccagttccatcaggccgcacgagatgtcggatatcctaaccgggagggcgcataccagaatagagaagcagtgtacagagacaaagagagagatgcatcgtaccccctccaggacacgacgggttacacggccagagaaagggatgtggctcaatgccaccttcaccacgaaaaccccgctctgggcagggagagaggcggtcgggaggctggcccagctcatcctggcagagagaaagaagcgggttattcagccgcagtcggagtgggccctcggccacctagggagcgagggcaattaagccgaggagccagtcgtagctcttctccaggagcgggtggcggacatagcacaagcaccagcacatcccctgctacaactctgcagcggaatgtggaaggggatgctcccggtagtgatttgtctacagctgtcgatagtcctggttcacagcctccgtatcgtttgagtcagcttcctccatcctcctctcatatgggagggcctcctgccggtgtgggcctaccctgggcacagagagcaaggctccagccggcaagcgttgctttgcgcaagcaggaggaagaggagattaaaagatcaaaagctttatcagactcatacgagttgagtacagatcttcaagataaaaaagtggaaatgctggaacggaaatatggtggcagctttctatctcgccgtgctgcgaggaccattcaaaccgcatttagacagtatcgaatgaataagaatttcgaacgcctacgatcaagcgcatctgaatcccgaatgagtcgaagaattatattgtcaaacatgaggatgcagttctctttcgaggagtacgagaaggcacagaaccctgcatattttgaaggcaaacctgccagcttggatgaaggagccatggctggagcacgttcccatagacttgaacggggattgccttacgggggttcctgcgggggtgggatcgacgggggaggtagctccgtaaccactagtggcgaattttcaaatgacattactgaattggaagattcattctcaaagcaagtcaagagccttgccgagtcgatcgacgaggcactgaactgtcacccttcgggtcctatgagtgaagaacctgggtctgcgcagctcgagaagcgggagtccaaggagcagcaggaagattcttcagcaacttccttcagcgacctgccactgtaccttgatgatacagtgcctcaacaaagtcctgagcggctgccctcaacagaaccgccaccccaggggaggcctgagttctgggccccagctccattgccgccagtcccccctcctgtgccaagcggaactcgggaggacggcagtcgcgaggaagggactcggaggggacctgggtgtctggaatgtagggacttccgcctcagggctgcccacttgccattgctgaccatcgagccaccatccgattcctccgtcgacttgagcgatagatctgatcgagggtccgtgcacaggcagctggtttacgaggcagacggatgctccccccacggcacattaaaacacaaaggtcccccaggacgtgcaccgatcccccatcgccattatcccgctccagagggcccagctcctgctccgccagggcctctgccaccagctcctaactctggaaccggaccttccggcgttgctggaggtcgcagactggggaaatgcgaggctgctggcgagaacagtgacggcggagataacgaatccttggaatcaagttcaaactcaaatgaaaccattaactgcagcagcggctcctcgagtcgggactcactccgagagcccccagcgacaggattatgcaagcagacctatcaacgagagacccgccattcgtgggactcgcctgcctttaataacgacgtcgtacagcgtcgtcactatcggatcggcctgaatctgtttaacaagaaaccagagaaagggatacagtacctgattgaaaggggctttctgtccgacactccagtgggcgtggcccactttatcctcgaaagaaaggggctttcgaggcagatgataggcgagtttctgggtaatcgacagaaacagttcaaccgggacgtactcgactgtgtcgtcgacgagatggacttcagtagcatggatctcgatgacgccctgcgcaaatttcaatctcacattagagtgcagggcgaggcacagaaggtcgagagactcatcgaggcattctctcagagatactgcgtatgcaatcccgctctggtgcggcaatttcggaacccagacactatctttatccttgcctttgctatcattcttctgaacacagacatgtacagcccctcagtaaaggcggaaaggaagatgaaacttgacgattttatcaaaaatttgcgtggagtggataacggcgaggatattcccagagacctgctggtggggatatatcaacgtattcaggggagagagctgcgcaccaacgacgaccatgtctcgcaggtgcaggctgtcgagcgtatgattgtcggaaagaagcccgtgttgtccctgcctcataggcgcctggtctgctgttgccagttgtacgaggtgcctgatccgaatagaccacaacgcctcggcttacatcagcgcgaggtctttcttttcaacgacttactggtcgtgacaaaaattttccagaaaaaaaaaatactagtgacatacagctttcggcagtccttcccactagttgagatgcatatgcagctgtttcagaacagttactaccaatttggcattaaactcctgtccgcagtgcctggcggtgaaaggaaggtgctaatcatctttaacgcacccagtctccaggacagactgcgctttacttcagaccttagagagagtatcgccgaggtgcaagaaatggaaaagtatcgcgtcgaatcagaactcgaaaaacagaagggtatgatgcggccaaacgcaagtcagcccggtggagcgaaagactctgtcaatgggaccatggcacggagctccttggaggacacctacggtgctggggacgggctgaaaaggggtgccttatcatccagcctcagagatctttcagacgccggtaaacggggaagaagaaactctgtcgggtccctggacagcaccatagagggatcagttatcagctctccaagaccacatcagcgaatgccccctccacctcctccgcctccacccgaggagtataagtcacagcgacccgtgtcaaatagttcctcatttctgggttccctgttcggttcaaaacgagggaaggggccattccagatgccccctccccctactggccaggcgtccgcgagttcttcttccgcatctagtacccaccaccatcatcaccaccaccatcatggccactctcatgggggacttggggttctgcccgatggacagtctaagctgcaggccctgcacgctcagtactgccaaggaccgggaccagcccctccaccttatctgccaccacagcagccatccctgcccccaccccctcaacagcctcctcccctgccacagctcggctctataccacctccccctgcctccgcccctcccgtcggtcctcataggcatttccacgctcacggtccagtcccaggcccacaacattacaccttgggacggccaggtcgggctcccagacggggagctggaggccatcctcaattcgcccctcacgggaggcacccgctgcaccaacccacaagtcccctacccctgtactcccccgcaccacaacatcctcctgcccacaaacagggaccgaagcatttcatcttctcacatcaccctcagatgatgccagccgctggggcagcgggaggcccagggtcacgcccacccggaggctcatacagtcaccctcaccaccctcagagtcccttatcccctcactcccccatccctccacatccctcctaccctcccttgcctcctccctctcctcatactccacattctccactgccccctactagtccccatggtccactccacgcatccggccctcccggaactgctaacccaccatctgcaaacccaaaggctaagccctctaggattagcacagtggtgtag

SEQ ID NO: 42217 - DNA, 4467 bp, Artificial Sequence
  derived and/or modified sequence
atggaggcaggatccgggcctccaggcggacctgggtccgagtccccaaacagagccgtcgagtatctcctggagctgaacaacatcatagaatcccagcagcagctattagagacccagcgcagaaggattgaggaactggaaggccagctggaccagctcacgcaggaaaaccgcgaccttcgcgaagaaagtcaacttcatcgcggtgaactgcacagggatcctcatggggcacgcgattcaccgggtagggaatcacaataccagaatctgcgcgaaacccagtttcaccatagggaactcagagagagtcagttccaccaggccgctcgtgacgtgggatatccaaatcgtgagggtgcctaccagaatagggaagccgtttatcgggataaagaacgcgatgcctcatatccgctgcaggataccactggatatacagcaagagagcgcgacgtggcacagtgtcacttgcatcatgagaaccccgcactcggaagggagagaggcggtcgcgaggcaggcccagcgcaccctgggagggaaaaagaggccggatacagcgcagctgtaggggtgggccctaggccaccaagggaacggggacagctctcccgcggtgcctcccgaagctcaagtcccggagctggtgggggacatagcacttctacctctactagtcccgctacgaccctgcagaggaaaagcgacggcgaaaactcccggactgtgtccgtcgaaggcgatgcccctggatccgacctgagtaccgctgttgacagcccaggcagtcagccaccttaccggctgtcacagctccctccctcatctagccacatgggaggccctcctgctggagtcggacttccatgggcccagcgtgcacgcctgcagccagccagtgttgccttgcgaaagcaggaagaagaggagatcaagcggtccaaggctctgtccgactcctacgagctcagtacggatctgcaagataagaaggtggagatgctcgaacggaagtacggagggtcttttctttcaaggcgggctgccaggaccatccagaccgcttttcgacagtatcgcatgaacaagaatttcgagcgccttcgatcttcagcatctgagagtcggatgtctcgccgtatcatcctttcaaatatgcggatgcaattctccttcgaggagtacgaaaaggctcagaaccctgcctacttcgagggcaagcccgcttctctcgacgaaggagcaatggctggggcaaggtcccaccggctggagaggggactgccctatggtggctcatgcggcggagggatcgatggcggtggttcatctgtcaccacgtccggcgagttcagcaacgacatcaccgaactggaggatagcttttccaaacaagtgaaaagtttggccgaatcaatagacgaggcactcaactgtcatccaagcggccctatgtccgaagaaccgggaagcgcccagttggagaagcgagagtcaaaagagcaacaggaggacagtagcgctactagcttcagcgacctgcccctgtatctcgatgacaccgtgccacagcagtccccagagcggcttccttccactgagcccccaccccagggaaggccagagttctgggcgccagcaccgctcccgccagtcccccctcccgtgcccagcggcactagggaggacggatcccgcgaagagggtaccaggaggggccctggctgcctcgaatgtagagattttcgtttaagagctgcacacttaccattgctcaccatcgagccaccgtctgactcttcagtggacttatctgataggtcagacagaggctccgtgcacaggcagctcgtctatgaagcagacggctgctcgcctcacgggacgctcaagcacaagggacctccgggaagggcccctattccccaccggcattatcccgcaccagagggcccagccccagccccacctggaccactgcctcccgctcccaactctgggactgggccttccggggtggctgggggtcgcaggctggggaagtgcgaggccgcaggtgagaacagcgatggtggtgataatgagtcgctcgagtcctcttctaacagcaatgagacaattaattgtagttcaggcagctcatcacgcgacagtctccgggagccccctgcgaccggcctatgcaagcagacttatcagcgcgagacccgccatagttgggatagtcctgcattcaataacgatgtggttcagcgcaggcattacaggatcggactaaatctcttcaataaaaagccagaaaaaggcattcagtacttgatcgaacggggttttctttctgatacgccagtgggcgtggcccactttattctcgaacgcaaaggcctctcccgtcagatgattggagagtttctggggaacagacagaagcagttcaatcgggacgtcctcgactgcgtggtggacgaaatggattttagttccatggatctggacgacgccttgagaaaatttcagagccacatcagggtgcaaggtgaagcccagaaagtggagagattgattgaggctttttcgcagcgttactgtgtgtgcaatcccgctttagtgaggcagtttcggaatccggacactatcttcatccttgccttcgccatcatactacttaataccgatatgtattctccttcagtaaaggcagaacgtaagatgaagctcgacgactttattaagaacctgcggggagtggataacggggaagacatcccacgggatctgctcgtcggaatttaccaaaggatccaagggagagaattgcgcactaacgatgaccatgtgtcacaggttcaggcagttgagcgcatgatcgtgggcaaaaagccggtactgagcctgccgcacaggcgcttagtgtgctgctgccagctgtacgaagtgcccgatccaaacaggccacagcggctcgggctgcaccagagggaggtcttcctgtttaatgacttgttggttgttaccaagattttccagaaaaagaagattctcgtgacctactctttccggcaaagctttccactggtggagatgcatatgcagctctttcaaaactcatactaccagttcggaattaaattgctgagcgccgtcccgggaggagagcgtaaagtccttattatatttaatgctccctcattacaggaccggctgaggtttacaagcgacctcagagagagtatcgcggaagtgcaggagatggagaagtatcgggtggaaagtgagctagagaagcagaaggggatgatgagacctaatgctagccagcctgggggagccaaggactctgtcaacgggaccatggctcggtctagcctcgaagatacctatggagctggtgacgggctcaagcggggagcactatcgagttccctgcgagacctctctgatgccggaaagcggggaagaaggaattccgtgggcagtcttgatagcaccatcgaaggatccgtcattagtagccctagaccccaccaacgcatgcccccaccccctcctcctcctccacccgaagagtacaaaagtcagcggcctgtctcaaattcctcgtctttcctaggatcgctgtttggttccaagagagggaaaggtccattccaaatgccaccaccacctaccggtcaggctagcgcctcttcaagtagcgcttcgtcaacccaccatcaccatcaccatcaccaccacgggcatagccacggtggcctcggcgtcctgccagatggccagagtaaactccaagccctgcacgcccaatactgtcaaggccctggacctgcacctcctccatacctgcctccacagcagccaagcctgccacctccacctcagcagccccctcccctgccgcagctgggaagcattccgcctccccctgccagtgcccctcctgtgggccctcaccggcactttcacgcacacggcccagtgcccggtccccagcactacactctcggaagaccaggtcgtgcccctcgacgcggagccggaggacacccccagttcgcacctcatggcaggcatcctctccaccagccaacttccccactgcctctgtacagtccggctccccaacatccccctgctcacaaacagggaccaaaacatttcatctttagtcatcacccgcaaatgatgccagctgccggagcagccggaggaccagggtctcgaccgccagggggatcttattcccatccgcatcatccccagtcacctctttctccgcacagcccaattcctccacacccatcttatccgccacttccacccccatcacctcataccccccattccccgctgccccctacgtccccccacggccctctacacgccagcggtcctcccggaacagcaaacccaccgagtgccaatcccaaggccaagccttctagaatcagtaccgtggtatag

SEQ ID NO: 42218 - DNA, 4437 bp, Artificial Sequence
  derived and/or modified sequence
atggaggccggcagcggcccccccggcggccccggcagcgagagccccaacagagccgtggagtacctgctggagctgaacaacatcatcgagagccagcagcagctgctggagacccagagaagaagaatcgaggagctggagggccagctggaccagctgacccaggagaacagagacctgagagaggagagccagctgcacagaggcgagctgcacagagacccccacggcgccagagacagccccggcagagagagccagtaccagaacctgagagagacccagttccaccacagagagctgagagagagccagttccaccaggccgccagagacgtgggctaccccaacagagagggcgcctaccagaacagagaggccgtgtacagagacaaggagagagacgccagctaccccctgcaggacaccaccggctacaccgccagagagagagacgtggcccagtgccacctgcaccacgagaaccccgccctgggcagagagagaggcggcagagaggccggccccgcccaccccggcagagagaaggaggccggctacagcgccgccgtgggcgtgggccccagaccccccagagagagaggccagctgagcagaggcgccagcagaagcagcagccccggcgccggcggcggccacagcaccagcaccagcaccagccccgccaccaccctgcagagaaacgtggagggcgacgcccccggcagcgacctgagcaccgccgtggacagccccggcagccagcccccctacagactgagccagctgccccccagcagcagccacatgggcggcccccccgccggcgtgggcctgccctgggcccagagagccagactgcagcccgccagcgtggccctgagaaagcaggaggaggaggagatcaagagaagcaaggccctgagcgacagctacgagctgagcaccgacctgcaggacaagaaggtggagatgctggagagaaagtacggcggcagcttcctgagcagaagagccgccagaaccatccagaccgccttcagacagtacagaatgaacaagaacttcgagagactgagaagcagcgccagcgagagcagaatgagcagaagaatcatcctgagcaacatgagaatgcagttcagcttcgaggagtacgagaaggcccagaaccccgcctacttcgagggcaagcccgccagcctggacgagggcgccatggccggcgccagaagccacagactggagagaggcctgccctacggcggcagctgcggcggcggcatcgacggcggcggcagcagcgtgaccaccagcggcgagttcagcaacgacatcaccgagctggaggacagcttcagcaagcaggtgaagagcctggccgagagcatcgacgaggccctgaactgccaccccagcggccccatgagcgaggagcccggcagcgcccagctggagaagagagagagcaaggagcagcaggaggacagcagcgccaccagcttcagcgacctgcccctgtacctggacgacaccgtgccccagcagagccccgagagactgcccagcaccgagccccccccccagggcagacccgagttctgggcccccgcccccctgccccccgtgcccccccccgtgcccagcggcaccagagaggacggcagcagagaggagggcaccagaagaggccccggctgcctggagtgcagagacttcagactgagagccgcccacctgcccctgctgaccatcgagccccccagcgacagcagcgtggacctgagcgacagaagcgacagaggcagcgtgcacagacagctggtgtacgaggccgacggctgcagcccccacggcaccctgaagcacaagggcccccccggcagagcccccatcccccacagacactaccccgcccccgagggccccgcccccgccccccccggccccctgccccccgcccccaacagcggcaccggccccagcggcgtggccggcggcagaagactgggcaagtgcgaggccgccggcgagaacagcgacggcggcgacaacgagagcctggagagcagcagcaacagcaacgagaccatcaactgcagcagcggcagcagcagcagagacagcctgagagagccccccgccaccggcctgtgcaagcagacctaccagagagagaccagacacagctgggacagccccgccttcaacaacgacgtggtgcagagaagacactacagaatcggcctgaacctgttcaacaagaagcccgagaagggcatccagtacctgatcgagagaggcttcctgagcgacacccccgtgggcgtggcccacttcatcctggagagaaagggcctgagcagacagatgatcggcgagttcctgggcaacagacagaagcagttcaacagagacgtgctggactgcgtggtggacgagatggacttcagcagcatggacctggacgacgccctgagaaagttccagagccacatcagagtgcagggcgaggcccagaaggtggagagactgatcgaggccttcagccagagatactgcgtgtgcaaccccgccctggtgagacagttcagaaaccccgacaccatcttcatcctggccttcgccatcatcctgctgaacaccgacatgtacagccccagcgtgaaggccgagagaaagatgaagctggacgacttcatcaagaacctgagaggcgtggacaacggcgaggacatccccagagacctgctggtgggcatctaccagagaatccagggcagagagctgagaaccaacgacgaccacgtgagccaggtgcaggccgtggagagaatgatcgtgggcaagaagcccgtgctgagcctgccccacagaagactggtgtgctgctgccagctgtacgaggtgcccgaccccaacagaccccagagactgggcctgcaccagagagaggtgttcctgttcaacgacctgctggtggtgaccaagatcttccagaagaagaagatcctggtgacctacagcttcagacagagcttccccctggtggagatgcacatgcagctgttccagaacagctactaccagttcggcatcaagctgctgagcgccgtgcccggcggcgagagaaaggtgctgatcatcttcaacgcccccagcctgcaggacagactgagattcaccagcgacctgagagagagcatcgccgaggtgcaggagatggagaagtacagagtggagagcgagctggagaagcagaagggcatgatgagacccaacgccagccagcccggcggcgccaaggacagcgtgaacggcaccatggccagaagcagcctggaggacacctacggcgccggcgacggcctgaagagaggcgccctgagcagcagcctgagagacctgagcgacgccggcaagagaggcagaagaaacagcgtgggcagcctggacagcaccatcgagggcagcgtgatcagcagccccagaccccaccagagaatgcccccccccccccccccccccccccccgaggagtacaagagccagagacccgtgagcaacagcagcagcttcctgggcagcctgttcggcagcaagagaggcaagggccccttccagatgccccccccccccaccggccaggccagcgccagcagcagcagcgccagcagcacccaccaccaccaccaccaccaccaccacggccacagccacggcggcctgggcgtgctgcccgacggccagagcaagctgcaggccctgcacgcccagtactgccagggccccggccccgccccccccccctacctgcccccccagcagcccagcctgcccccccccccccagcagcccccccccctgccccagctgggcagcatcccccccccccccgccagcgccccccccgtgggcccccacagacacttccacgcccacggccccgtgcccggcccccagcactacaccctgggcagacccggcagagcccccagaagaggcgccggcggccacccccagttcgccccccacggcagacaccccctgcaccagcccaccagccccctgcccctgtacagccccgccccccagcacccccccgcccacaagcagggccccaagcacttcatcttcagccaccacccccagatgatgcccgccgccggcgccgccggcggccccggcagcagaccccccggcggcagctacagccacccccaccacccccagagccccctgagcccccacagccccatccccccccaccccagctacccccccctgcccccccccagcccccacaccccccacagccccctgccccccaccagcccccacggccccctgcacgccagcggcccccccggcaccgccaacccccccagcgccaaccccaaggccaagcccagcagaatcagcaccgtggtgtag

SEQ ID NO: 42219 - DNA, 4467 bp, Artificial Sequence
  derived and/or modified sequence
atggaggccggcagcggcccccccggcggccccggcagcgagagccccaacagagccgtggagtacctgctggagctgaacaacatcatcgagagccagcagcagctgctggagacccagagaagaagaatcgaggagctggagggccagctggaccagctgacccaggagaacagagacctgagagaggagagccagctgcacagaggcgagctgcacagagacccccacggcgccagagacagccccggcagagagagccagtaccagaacctgagagagacccagttccaccacagagagctgagagagagccagttccaccaggccgccagagacgtgggctaccccaacagagagggcgcctaccagaacagagaggccgtgtacagagacaaggagagagacgccagctaccccctgcaggacaccaccggctacaccgccagagagagagacgtggcccagtgccacctgcaccacgagaaccccgccctgggcagagagagaggcggcagagaggccggccccgcccaccccggcagagagaaggaggccggctacagcgccgccgtgggcgtgggccccagaccccccagagagagaggccagctgagcagaggcgccagcagaagcagcagccccggcgccggcggcggccacagcaccagcaccagcaccagccccgccaccaccctgcagagaaagagcgacggcgagaacagcagaaccgtgagcgtggagggcgacgcccccggcagcgacctgagcaccgccgtggacagccccggcagccagcccccctacagactgagccagctgccccccagcagcagccacatgggcggcccccccgccggcgtgggcctgccctgggcccagagagccagactgcagcccgccagcgtggccctgagaaagcaggaggaggaggagatcaagagaagcaaggccctgagcgacagctacgagctgagcaccgacctgcaggacaagaaggtggagatgctggagagaaagtacggcggcagcttcctgagcagaagagccgccagaaccatccagaccgccttcagacagtacagaatgaacaagaacttcgagagactgagaagcagcgccagcgagagcagaatgagcagaagaatcatcctgagcaacatgagaatgcagttcagcttcgaggagtacgagaaggcccagaaccccgcctacttcgagggcaagcccgccagcctggacgagggcgccatggccggcgccagaagccacagactggagagaggcctgccctacggcggcagctgcggcggcggcatcgacggcggcggcagcagcgtgaccaccagcggcgagttcagcaacgacatcaccgagctggaggacagcttcagcaagcaggtgaagagcctggccgagagcatcgacgaggccctgaactgccaccccagcggccccatgagcgaggagcccggcagcgcccagctggagaagagagagagcaaggagcagcaggaggacagcagcgccaccagcttcagcgacctgcccctgtacctggacgacaccgtgccccagcagagccccgagagactgcccagcaccgagccccccccccagggcagacccgagttctgggcccccgcccccctgccccccgtgcccccccccgtgcccagcggcaccagagaggacggcagcagagaggagggcaccagaagaggccccggctgcctggagtgcagagacttcagactgagagccgcccacctgcccctgctgaccatcgagccccccagcgacagcagcgtggacctgagcgacagaagcgacagaggcagcgtgcacagacagctggtgtacgaggccgacggctgcagcccccacggcaccctgaagcacaagggcccccccggcagagcccccatcccccacagacactaccccgcccccgagggccccgcccccgccccccccggccccctgccccccgcccccaacagcggcaccggccccagcggcgtggccggcggcagaagactgggcaagtgcgaggccgccggcgagaacagcgacggcggcgacaacgagagcctggagagcagcagcaacagcaacgagaccatcaactgcagcagcggcagcagcagcagagacagcctgagagagccccccgccaccggcctgtgcaagcagacctaccagagagagaccagacacagctgggacagccccgccttcaacaacgacgtggtgcagagaagacactacagaatcggcctgaacctgttcaacaagaagcccgagaagggcatccagtacctgatcgagagaggcttcctgagcgacacccccgtgggcgtggcccacttcatcctggagagaaagggcctgagcagacagatgatcggcgagttcctgggcaacagacagaagcagttcaacagagacgtgctggactgcgtggtggacgagatggacttcagcagcatggacctggacgacgccctgagaaagttccagagccacatcagagtgcagggcgaggcccagaaggtggagagactgatcgaggccttcagccagagatactgcgtgtgcaaccccgccctggtgagacagttcagaaaccccgacaccatcttcatcctggccttcgccatcatcctgctgaacaccgacatgtacagccccagcgtgaaggccgagagaaagatgaagctggacgacttcatcaagaacctgagaggcgtggacaacggcgaggacatccccagagacctgctggtgggcatctaccagagaatccagggcagagagctgagaaccaacgacgaccacgtgagccaggtgcaggccgtggagagaatgatcgtgggcaagaagcccgtgctgagcctgccccacagaagactggtgtgctgctgccagctgtacgaggtgcccgaccccaacagaccccagagactgggcctgcaccagagagaggtgttcctgttcaacgacctgctggtggtgaccaagatcttccagaagaagaagatcctggtgacctacagcttcagacagagcttccccctggtggagatgcacatgcagctgttccagaacagctactaccagttcggcatcaagctgctgagcgccgtgcccggcggcgagagaaaggtgctgatcatcttcaacgcccccagcctgcaggacagactgagattcaccagcgacctgagagagagcatcgccgaggtgcaggagatggagaagtacagagtggagagcgagctggagaagcagaagggcatgatgagacccaacgccagccagcccggcggcgccaaggacagcgtgaacggcaccatggccagaagcagcctggaggacacctacggcgccggcgacggcctgaagagaggcgccctgagcagcagcctgagagacctgagcgacgccggcaagagaggcagaagaaacagcgtgggcagcctggacagcaccatcgagggcagcgtgatcagcagccccagaccccaccagagaatgcccccccccccccccccccccccccccgaggagtacaagagccagagacccgtgagcaacagcagcagcttcctgggcagcctgttcggcagcaagagaggcaagggccccttccagatgccccccccccccaccggccaggccagcgccagcagcagcagcgccagcagcacccaccaccaccaccaccaccaccaccacggccacagccacggcggcctgggcgtgctgcccgacggccagagcaagctgcaggccctgcacgcccagtactgccagggccccggccccgccccccccccctacctgcccccccagcagcccagcctgcccccccccccccagcagcccccccccctgccccagctgggcagcatcccccccccccccgccagcgccccccccgtgggcccccacagacacttccacgcccacggccccgtgcccggcccccagcactacaccctgggcagacccggcagagcccccagaagaggcgccggcggccacccccagttcgccccccacggcagacaccccctgcaccagcccaccagccccctgcccctgtacagccccgccccccagcacccccccgcccacaagcagggccccaagcacttcatcttcagccaccacccccagatgatgcccgccgccggcgccgccggcggccccggcagcagaccccccggcggcagctacagccacccccaccacccccagagccccctgagcccccacagccccatccccccccaccccagctacccccccctgcccccccccagcccccacaccccccacagccccctgccccccaccagcccccacggccccctgcacgccagcggcccccccggcaccgccaacccccccagcgccaaccccaaggccaagcccagcagaatcagcaccgtggtgtag

SEQ ID NO: 42220 - protein, 306 aa, Artificial Sequence [sequence omitted]

SEQ ID NO: 42221 - protein, 619 aa, Artificial Sequence
  derived and/or modified sequence
MKPPDRPAPGRTDRILGVMGGMLRACALPGQEGPPRRSPLGLVGTEPESERTEGDHRRDREHEVLAGALQPESYSIAGSEGSISASAASGLAAPSGPSSGLSSGPCSPGPPGPVSGLRRWLDHSKHCLSVETEADSGQAGPYENWMLEPALATGEELPELTLLTTLLEGPGDKTQPPEEETLSQAPESEEEQKKKALERSMYVLSELVETEKMYVDDLGQIVEGYMATMAAQGVPESLRGRDRIVFGNIQQIYEWHRDYFLQELQRCLKDPDWLAQLFIKHERRLHMYVVYCQNKPKSEHVVSEFGDSYFEELRQQLGHRLQLNDLLIKPVQRIMKYQLLLKDFLKYYNRAGMDTADLEQAVEVMCFVPKRCNDMMTLGRLRGFEGKLTAQGKLLGQDTFWVTEPEAGGLLSSRGRERRVFLFEQIIIFSEALGGGVRGGTQPGYVYKNSIKVSCLGLEGNLQGDPCRFALTSRGPEGGIQRYVLQAADPAISQAWIKHVAQILESQRDFLNALQSPIEYQRRESQTNSLGRPRGPGVGSPGRIQLGDQAQGSTHTPINGSLPSLLLSPKGEVARALLPLDKQALGDIPQAPHDSPPVSPTPKTPPCQARLAKLDEDEL

SEQ ID NO: 42222 - DNA, 1860 bp, Artificial Sequence
  derived and/or modified sequence
atgaagccccccgacagacccgcccccggcagaaccgacagaatcctgggcgtgatgggcggcatgctgagagcctgcgccctgcccggccaggagggcccccccagaagaagccccctgggcctggtgggcaccgagcccgagagcgagagaaccgagggcgaccacagaagagacagagagcacgaggtgctggccggcgccctgcagcccgagagctacagcatcgccggcagcgagggcagcatcagcgccagcgccgccagcggcctggccgcccccagcggccccagcagcggcctgagcagcggcccctgcagccccggcccccccggccccgtgagcggcctgagaagatggctggaccacagcaagcactgcctgagcgtggagaccgaggccgacagcggccaggccggcccctacgagaactggatgctggagcccgccctggccaccggcgaggagctgcccgagctgaccctgctgaccaccctgctggagggccccggcgacaagacccagccccccgaggaggagaccctgagccaggcccccgagagcgaggaggagcagaagaagaaggccctggagagaagcatgtacgtgctgagcgagctggtggagaccgagaagatgtacgtggacgacctgggccagatcgtggagggctacatggccaccatggccgcccagggcgtgcccgagagcctgagaggcagagacagaatcgtgttcggcaacatccagcagatctacgagtggcacagagactacttcctgcaggagctgcagagatgcctgaaggaccccgactggctggcccagctgttcatcaagcacgagagaagactgcacatgtacgtggtgtactgccagaacaagcccaagagcgagcacgtggtgagcgagttcggcgacagctacttcgaggagctgagacagcagctgggccacagactgcagctgaacgacctgctgatcaagcccgtgcagagaatcatgaagtaccagctgctgctgaaggacttcctgaagtactacaacagagccggcatggacaccgccgacctggagcaggccgtggaggtgatgtgcttcgtgcccaagagatgcaacgacatgatgaccctgggcagactgagaggcttcgagggcaagctgaccgcccagggcaagctgctgggccaggacaccttctgggtgaccgagcccgaggccggcggcctgctgagcagcagaggcagagagagaagagtgttcctgttcgagcagatcatcatcttcagcgaggccctgggcggcggcgtgagaggcggcacccagcccggctacgtgtacaagaacagcatcaaggtgagctgcctgggcctggagggcaacctgcagggcgacccctgcagattcgccctgaccagcagaggccccgagggcggcatccagagatacgtgctgcaggccgccgaccccgccatcagccaggcctggatcaagcacgtggcccagatcctggagagccagagagacttcctgaacgccctgcagagccccatcgagtaccagagaagagagagccagaccaacagcctgggcagacccagaggccccggcgtgggcagccccggcagaatccagctgggcgaccaggcccagggcagcacccacacccccatcaacggcagcctgcccagcctgctgctgagccccaagggcgaggtggccagagccctgctgcccctggacaagcaggccctgggcgacatcccccaggccccccacgacagcccccccgtgagccccacccccaagacccccccctgccaggccagactggccaagctggacgaggacgagctgtag

SEQ ID NO: 42223 - DNA, 1860 bp, Artificial Sequence
  derived and/or modified sequence
atgaaacctccagatcgtcccgcacctggccggactgatcggattttgggagtgatgggaggaatgctgagagcctgcgctctgcccggccaagagggacccccaaggcgcagccccctcggactcgtgggaactgaaccggagtctgagagaactgaaggagatcataggcgagatagagaacatgaagtgctcgccggcgcattgcagcccgagtcctattctatcgctggctctgagggatccatctctgcatccgctgccagcggactggccgcgccgtcaggtccaagcagcgggctctcgtctgggccctgcagtccggggcctcccggaccagtgtccgggctccgaagatggctggaccactcaaagcactgtctcagtgtggagacagaagcggattccgggcaggcgggcccttatgagaactggatgctagaaccggcactggccacgggggaggaactgcccgagttaaccctgttaacaaccctcctggaagggcctggtgacaaaacccaacccccagaggaggagactctatctcaggcacccgagagcgaagaagaacaaaaaaagaaggctttggagcggagtatgtacgtactgagcgaactggtggagactgagaaaatgtatgttgacgaccttgggcagatcgtcgaggggtacatggcgacgatggctgcacagggggtgcccgaaagtttgcgcggtcgcgacaggatcgtgttcggcaatattcagcaaatttacgagtggcaccgggactatttcctccaagaactgcagcgctgtcttaaggacccagactggttggcccagctgttcatcaagcatgagcgacgtctccatatgtacgtggtgtattgtcagaataaacccaaaagcgaacacgtggttagtgaattcggcgattcctatttcgaggaattaaggcagcagttaggacataggcttcagctcaacgatctgttgattaagcccgtgcagagaataatgaaataccagcttctgttgaaagacttcttgaaatactataatcgggctgggatggacacagcagatctggaacaagccgtggaggttatgtgtttcgtacccaagcggtgtaatgacatgatgacgctggggcggctgcgcggttttgaaggcaagctgactgctcaaggcaaattactggggcaggacacgttttgggtcaccgagccagaagcaggcggactgctgtcaagtaggggcagagaacggagagtgttcctttttgaacagattattatattctccgaggccctcgggggtggtgtgaggggcggcactcagccaggctatgtttacaagaactctatcaaagtttcctgtctcggactcgagggcaacttacagggtgatccatgtagatttgctttaacctcccgcgggccagagggagggattcagagatacgtgcttcaggccgccgaccccgccatatcccaggcctggatcaagcatgtggcacaaatcctggaatcccaacgagacttcttgaacgcgctccagagccccatcgagtaccagcgccgcgagagccagaccaactcccttggtcggcctcgggggcccggggtcggtagccctggcaggatccaactaggtgaccaggcccagggttccacacacacccctattaacggctctctcccttctctgcttcttagcccgaagggagaagtagcccgcgctctcttaccgttagacaaacaggcattgggtgacataccacaggcgccacacgacagcccacctgttagccctacccctaagactcccccttgtcaagctaggctagcaaagctggacgaggacgagctgtag

SEQ ID NO: 42224 - DNA, 1860 bp, Artificial Sequence
  derived and/or modified sequence
atgaagcccccagacaggcctgcccctggccgcacagaccgcatcctgggcgtgatgggcggcatgctgcgggcctgtgccctgcccggccaggagggccccccccggcgcagccccctgggcctggtgggcacagagcctgagagcgagaggacagaaggagaccacagaagagaccgggagcacgaggtgctggccggggccctgcagcctgagagctacagcattgctggcagcgagggcagcatcagcgccagcgctgccagcggcctggccgcccccagcggccccagcagcggcctgagcagcggcccctgcagccctggccccccaggccctgtgtctggcctgcggcgctggctggaccacagcaagcactgcctgtctgtggagacagaggccgacagcggccaggccggcccctatgagaactggatgctggagcccgccctggccactggagaggagctgcctgagctgaccctgctgaccaccctgctggagggccctggggacaagacccagcccccagaggaggagaccctgagccaggcccctgagagcgaggaggagcagaagaagaaggccctggagaggtccatgtatgtgctgtctgagctggtggagacagagaagatgtatgtggatgacctgggccagatcgtggagggctacatggccaccatggccgcccagggcgtgcctgagagcctgcggggccgggaccgcatcgtgtttggaaacatccagcagatctatgagtggcaccgggactacttcctgcaggagctgcagcgctgcctgaaggaccctgactggctggcccagctgttcatcaagcatgaaagaaggctgcacatgtatgtggtgtactgccagaacaagcccaagtctgagcacgtggtgtctgaatttggagacagctactttgaggagctgcggcagcagctgggccaccggctgcagctgaatgacctgctgatcaagcctgtgcagaggatcatgaagtaccagctgctgctgaaggacttcctgaagtactacaacagagctggcatggacacagctgacctggagcaggccgtggaggtgatgtgctttgtgcccaagcgctgcaatgacatgatgaccctgggccgcctgcggggctttgagggcaagctgacagcccagggcaagctgctgggccaggacaccttctgggtgacagagcctgaggccggcggcctgctgagcagccggggccgggagcggcgggtcttcctgtttgagcagatcatcatcttcagcgaggccctgggcggcggcgtgcggggcggcacccagcccggctacgtgtacaagaacagcatcaaggtgtcctgcctgggcctggagggcaacctgcagggcgacccctgccgctttgccctgaccagccggggccctgagggcggcatccagagatatgtgctgcaggccgctgaccctgccatcagccaggcctggatcaagcacgtggcccagatcctggagagccagagggacttcctgaatgccctgcagagccccatcgagtaccagaggcgggagagccagaccaacagcctgggccggccccggggccctggggtgggcagccctggccgcatccagctgggggaccaggcccagggcagcacccacacccccatcaatggcagcctgcccagcctgctgctgagccccaagggggaggtggcccgggccctgctgcccctggacaagcaggccctgggggacatcccccaggcccctcatgacagcccccctgtgagccccacccccaagaccccaccctgccaggcccggctggccaagctggatgaagatgagctgtag

SEQ ID NO: 42225 - DNA, 1860 bp, Artificial Sequence
  derived and/or modified sequence
atgaagccccccgaccggcccgcccccggccggaccgaccggatccttggagtaatgggtgggatgctgagagcttgcgcgctccccgggcaagagggaccccctagacgcagccccctgggccttgtaggtactgagcctgaatccgagaggacggaaggcgaccaccgccgggatagggagcatgaggtattagccggagctctgcagccggagtcctattcaattgcaggaagcgagggaagcatatccgcctcggctgcatctggactggccgcaccctcaggaccttcctccgggctgagttctgggccctgctcacccgggcccccaggaccagttagtggccttcggcggtggcttgaccattcaaagcactgtctgtctgtggaaaccgaggcggactcaggccaagcaggaccatacgaaaattggatgttagagcccgcactggctaccggcgaagaactgcctgaactgacgctgcttaccacactcttagaaggtcccggggataagacacagcccccagaagaagagaccctgagccaagcaccagaatcagaggaggaacagaaaaaaaaggccttagaacgctctatgtacgttctctctgaactcgttgagacagaaaaaatgtacgtggacgacctgggccagatcgtggaagggtacatggctaccatggcagctcagggcgtgcccgaaagtctgagaggcagagatcgaatagtatttggtaatatccagcaaatctacgaatggcatcgagattatttcctgcaagagctccagcgctgccttaaagaccccgactggctggcacagctttttatcaaacatgagcgacggctccacatgtatgttgtttactgccaaaacaaaccaaagtccgaacacgtggtgagtgaattcggcgactcatactttgaggagttaaggcaacagctgggtcaccgactgcagcttaacgatttgctaatcaaacccgtccagcgcattatgaaatatcagctcctcctgaaggacttcctgaaatactacaatcgcgccgggatggatactgccgatctggagcaagccgtggaggtgatgtgcttcgttcctaaaagatgcaatgacatgatgacacttggccgtctgaggggctttgaaggaaaactgactgctcagggcaagctgctaggtcaggacaccttctgggtgacggaaccagaggcagggggccttctttcttctcgaggccgagagaggagggtgttcctgttcgaacaaattattatcttttccgaagcactcggcggaggcgttagaggaggcacacagcccggttatgtttataagaactccataaaggtgtcctgtctgggtcttgagggcaaccttcagggcgacccctgccggtttgccttgacttcacggggtcctgaaggggggatccaacgctatgtgctccaggctgcagacccagccatctctcaggcctggataaagcatgtggcccagatcttggagagtcagcgagatttcctgaacgccctgcagtctcccattgagtaccagcgcagggagagtcagacaaattccttagggaggcctaggggtccaggcgtgggtagtccaggccgaatccaactgggcgatcaggcgcagggatcgacccacactcctatcaatggttccctgccatcccttctgctaagccccaaaggagaggtggccagggctctcctcccgctcgacaagcaggcattgggggacataccgcaagctccccacgattcccctccagtgtcacctactccaaagacgcccccttgccaggccagactggccaagctggacgaagacgagttgtag

SEQ ID NO: 42226 - DNA, 1860 bp, Artificial Sequence
  derived and/or modified sequence
atgaaacccccagacagaccggcaccagggaggaccgatcgcattctgggggttatggggggtatgctgagagcttgcgctcttcccggacaggaggggccaccaaggcgtagtccactcgggctcgtcggaaccgagccagagtctgagcgcacagaaggagatcaccggagggatagggagcatgaggtgctagccggagcattgcagcctgaaagctactctattgctggctctgagggctccattagcgcttccgcagcgtctggactggccgctccctctggacctagctcaggtttgtcctccggcccatgtagcccagggccacctggacctgtgtccggcctgcgccgttggcttgaccatagcaaacattgcttgtccgtcgagacagaggcagactcaggccaggcaggcccttacgagaattggatgcttgaacctgccctggccactggcgaagagcttccagagctgactttattgaccaccctcttggaaggcccaggcgacaagactcagccaccagaggaggaaacgctgtcacaggccccagaatccgaagaggagcagaagaaaaaggccctggagcggtcgatgtatgtgctgtccgagctggtcgagaccgaaaagatgtatgtggatgatttgggtcagatcgtagagggatacatggccacaatggccgctcaaggcgtacccgaaagccttcggggaagagatcgtatagtgttcggaaatatccaacagatctatgagtggcaccgcgattacttcttacaagaactacagagatgccttaaagaccccgactggcttgcgcaactgtttattaagcacgagcgaagattgcacatgtatgtggtctattgccagaataaacccaagagtgagcacgtggtttcagaattcggtgacagttattttgaagagctgagacaacaactgggccaccggcttcaattgaatgatctgctaataaagccagtgcaacggataatgaaatatcagctactgctcaaggatttcctgaagtattataatcgcgcagggatggacactgcggacctggaacaggcagtcgaagtgatgtgctttgttcccaagcgatgtaacgacatgatgaccctgggccgtttacggggattcgagggaaaactcacagcgcagggaaagctcctgggacaggatacattctgggtgaccgagcccgaagcgggtggtctgctgtcatccagggggagagaacggagagtgtttctgttcgagcagatcattatcttttccgaggccctggggggaggggtgagggggggtactcagccagggtacgtgtataagaatagcattaaggtctcttgccttgggttggagggcaatttgcagggggacccgtgtcggttcgccctgacatccagagggcctgagggtgggatccagcggtacgtgctccaggcggctgaccctgctatttcacaggcatggattaagcatgtggcgcagatcttagaaagccagagagacttcctgaatgctctgcagagcccaatcgagtaccagcgtagagagtctcagaccaattctctcggccgacccagaggtccaggggttggaagccccggtcgcatacaattgggggatcaggcccagggatccactcacacgcccattaacggaagcttaccctccttgttgctctcaccaaagggcgaggttgcgagagcacttctcccattagacaagcaggcgttgggcgacatccctcaggcccctcacgactcacccccagtatctcctacacctaagacccctccttgtcaggccagactggccaaattggacgaggatgaactctag

SEQ ID NO: 42227 - DNA, 2246 bp, Artificial Sequence
  derived and/or modified sequence
ctcgaccctgaaacttggagcagggtgggggttcagtatgaagcccccggaccgccccgcccctggccgcactgaccggatactgggggtcatggggggcatgctgcgcgcatgcgccctccctgggcaggaggggcccccaaggagaagccctctagggttggtgggtaccgagccagagtctgaacgtacggagggagatcacagaagggatcgcgaacatgaggtcctcgccggggctctgcagcccgaatcctattccattgcgggcagtgaggggagtatatcggcttctgctgcctccggtctggctgccccctctggccccagctctggcctcagctctggcccctgttccccaggccccccagggcccgtcagtggcctgaggagatggttggatcattccaaacattgtctcagtgtggaaactgaggcagacagtggtcaggcaggaccatatgagaactggatgttggagccagctctagccacaggagaggagctgccggaactgaccttgctgaccacactgttggagggccctggagataagacgcagccacctgaagaggagactttgtcccaagcccctgagagtgaggaggaacagaagaagaaggctctggaaaggagtatgtatgtcctgagtgaactggtagaaacagagaaaatgtacgtggacgacttggggcagattgtggagggttatatggccaccatggctgctcagggggtccccgagagtcttcgaggccgtgacaggattgtgtttgggaatatccagcaaatctatgagtggcaccgagactatttcttgcaagagctacaacggtgtctgaaagatcctgattggctggctcagctattcatcaaacacgagcgccggctgcatatgtatgtggtgtactgtcagaataagcccaagtcagagcatgtggtgtcagagtttggggacagctactttgaggagctccggcagcagctggggcaccgcctgcagctgaacgacctcctcatcaaacctgtgcagcggatcatgaaataccagctgctgctcaaggattttctcaagtattacaatagagctgggatggatactgcagacctagagcaagctgtggaggtcatgtgctttgtgcccaagcgctgcaacgatatgatgacgctggggagattgcggggatttgagggcaaactgactgctcaggggaagctcttgggccaggacactttctgggtcaccgagcctgaggctggagggctgctgtcttcccgaggtcgagagaggcgcgtcttcctctttgagcaaatcatcatcttcagtgaagccctgggaggaggagtgagaggtggaacacagcctggatatgtatacaagaacagcattaaggtgagctgcctgggactggaggggaacctccaaggtgacccttgccgctttgcactgacctccagagggccagagggtgggatccagcgctatgtcctgcaggctgcagaccctgctatcagtcaggcctggatcaagcatgtggctcagatcttggagagccaacgggacttcctcaacgcattgcagtcacccattgagtaccagagacgggagagccagaccaacagcctggggcggccaagagggcctggagtggggagccctggaagaattcagcttggagatcaggcccagggcagcacacacacacccatcaatggctctctcccctctctgctgctgtcacccaaaggggaggtggccagagccctcttgccactggataaacaggcccttggtgacatcccccaggctccccatgactctcctccagtctctccaactccaaaaacccctccctgccaagccagacttgccaagctggatgaagatgagctgtaactggtgaaaaccatgggggtggtgctgactcagccgcctattccccaaggagcttcagggcagtccttctggcactgctccagaattcctccttcttggtgtgtctggagggtgggcaaggctgggagggatatcaacttggaggagaacacctagacccaaggacttttttctgcccaaggaacacagtttccttcagctcccatccctatgcatgcatcatggtccccccaaaaggaggatatgtgggtgggtgggagggctggggcaggggccagatagaaattattggttttgttttttaattttgtttttcctgttttctgagaataaaggttttgttatatca

SEQ ID NO: 42228 - protein, 195 aa, Artificial Sequence
  derived and/or modified sequence
MGKISSLPTQLFKCCFCDFLKVKMHTMSSSHLFYLALCLLTFTSSATAGPETLCGAELVDALQFVCGDRGFYFNKPTGYGSSSRRAPQTGIVDECCFRSCDLRRLEMYCAPLKPAKSARSVRAQRHTDMPKTQKYQPPSTNKNTKSQRRKGWPKTHPGGEQKEGTEASLQIRGKKKEQRREIGSRNAECRGKKGK

SEQ ID NO: 42229 - protein, 158 aa, Artificial Sequence
  derived and/or modified sequence
MGKISSLPTQLFKCCFCDFLKVKMHTMSSSHLFYLALCLLTFTSSATAGPETLCGAELVDALQFVCGDRGFYFNKPTGYGSSSRRAPQTGIVDECCFRSCDLRRLEMYCAPLKPAKSARSVRAQRHTDMPKTQKYQPPSTNKNTKSQRRKGSTFEERK

SEQ ID NO: 42230 - protein, 139 aa, Artificial Sequence
  derived and/or modified sequence
LKVKMHTMSSSHLFYLALCLLTFTSSATAGPETLCGAELVDALQFVCGDRGFYFNKPTGYGSSSRRAPQTGIVDECCFRSCDLRRLEMYCAPLKPAKSARSVRAQRHTDMPKTQKYQPPSTNKNTKSQRRKGSTFEERK

SEQ ID NO: 42231 - DNA, 7370 bp, Artificial Sequence
  derived and/or modified sequence
ttttgtagataaatgtgaggattttctctaaatccctcttctgtttgctaaatctcactgtcactgctaaattcagagcagatagagcctgcgcaatggaataaagtcctcaaaattgaaatgtgacattgctctcaacatctcccatctctctggatttctttttgcttcattattcctgctaaccaattcattttcagactttgtacttcagaagcaatgggaaaaatcagcagtcttccaacccaattatttaagtgctgcttttgtgatttcttgaaggtgaagatgcacaccatgtcctcctcgcatctcttctacctggcgctgtgcctgctcaccttcaccagctctgccacggctggaccggagacgctctgcggggctgagctggtggatgctcttcagttcgtgtgtggagacaggggcttttatttcaacaagcccacagggtatggctccagcagtcggagggcgcctcagacaggcatcgtggatgagtgctgcttccggagctgtgatctaaggaggctggagatgtattgcgcacccctcaagcctgccaagtcagctcgctctgtccgtgcccagcgccacaccgacatgcccaagacccagaagtatcagcccccatctaccaacaagaacacgaagtctcagagaaggaaaggaagtacatttgaagaacgcaagtagagggagtgcaggaaacaagaactacaggatgtaggaagaccctcctgaggagtgaagagtgacatgccaccgcaggatcctttgctctgcacgagttacctgttaaactttggaacacctaccaaaaaataagtttgataacatttaaaagatgggcgtttcccccaatgaaatacacaagtaaacattccaacattgtctttaggagtgatttgcaccttgcaaaaatggtcctggagttggtagattgctgttgatcttttatcaataatgttctatagaaaagaaaaaaaaaatatatatatatatatatcttagtccctgcctctcaagagccacaaatgcatgggtgttgtatagatccagttgcactaaattcctctctgaatcttggctgctggagccattcattcagcaaccttgtctaagtggtttatgaattgtttccttatttgcacttctttctacacaactcgggctgtttgttttacagtgtctgataatcttgttagtctatacccaccacctcccttcataacctttatatttgccgaatttggcctcctcaaaagcagcagcaagtcgtcaagaagcacaccaattctaacccacaagattccatctgtggcatttgtaccaaatataagttggatgcattttattttagacacaaagctttatttttccacatcatgcttacaaaaaagaataatgcaaatagttgcaactttgaggccaatcatttttaggcatatgttttaaacatagaaagtttcttcaactcaaaagagttccttcaaatgatgagttaatgtgcaacctaattagtaactttcctctttttattttttccatatagagcactatgtaaatttagcatatcaattatacaggatatatcaaacagtatgtaaaactctgttttttagtataatggtgctattttgtagtttgttatatgaaagagtctggccaaaacggtaatacgtgaaagcaaaacaataggggaagcctggagccaaagatgacacaaggggaagggtactgaaaacaccatccatttgggaaagaaggcaaagtccccccagttatgccttccaagaggaacttcagacacaaaagtccactgatgcaaattggactggcgagtccagagaggaaactgtggaatggaaaaagcagaaggctaggaattttagcagtcctggtttctttttctcatggaagaaatgaacatctgccagctgtgtcatggactcaccactgtgtgaccttgggcaagtcacttcacctctctgtgcctcagtttcctcatctgcaaaatgggggcaatatgtcatctacctacctcaaaggggtggtataaggtttaaaaagataaagattcagattttttttaccctgggttgctgtaagggtgcaacatcagggcgcttgagttgctgagatgcaaggaattctataaataacccattcatagcatagctagagattggtgaattgaatgctcctgacatctcagttcttgtcagtgaagctatccaaataactggccaactagttgttaaaagctaacagctcaatctcttaaaacacttttcaaaatatgtgggaagcatttgattttcaatttgattttgaattctgcatttggttttatgaatacaaagataagtgaaaagagagaaaggaaaagaaaaaggagaaaaacaaagagatttctaccagtgaaaggggaattaattactctttgttagcactcactgactcttctatgcagttactacatatctagtaaaacctcgtttaatactataaataatattctattcattttgaaaaacacaatgattccttcttttctaggcaatataaggaaagtgatccaaaatttgaaatattaaaataatatctaataaaaagtcacaaagttatcttctttaacaaactttactcttattcttagctgtatatacatttttttaaaagtttgttaaaatatgcttgactagagtttccagttgaaaggcaaaaacttccatcacaacaagaaatttcccatgcctgctcagaagggtagcccctagctctctgtgaatgtgttttatccattcaactgaaaattggtatcaagaaagtccactggttagtgtactagtccatcatagcctagaaaatgatccctatctgcagatcaagattttctcattagaacaatgaattatccagcattcagatctttctagtcaccttagaactttttggttaaaagtacccaggcttgattatttcatgcaaattctatattttacattcttggaaagtctatatgaaaaacaaaaataacatcttcagtttttctcccactgggtcacctcaaggatcagaggccaggaaaaaaaaaaaaaagactccctggatctctgaatatatgcaaaaagaaggccccatttagtggagccagcaatcctgttcagtcaacaagtattttaactctcagtccaacattatttgaattgagcacctcaagcatgcttagcaatgttctaatcactatggacagatgtaaaagaaactatacatcatttttgccctctgcctgttttccagacatacaggttctgtggaataagatactggactcctcttcccaagatggcacttctttttatttcttgtccccagtgtgtaccttttaaaattattccctctcaacaaaactttataggcagtcttctgcagacttaacgtgttttctgtcatagttagatgtgataattctaagagtgtctatgacttatttccttcacttaattctatccacagtcaaaaatcccccaaggaggaaagctgaaagatgcactgccatattatctttcttaactttttccaacacataatcctctccaactggattataaataaattgaaaataactcattataccaattcactattttattttttaatgaattaaaactagaaaacaaattgatgcaaaccctggaagtcagttgattactatatactacagcagaatgactcagatttcatagaaaggagcaaccaaaatgtcacaacccaaaactttacaagctttgcttcagaattagattgctttataattcttgaatgaggcaatttcaagatatttgtaaaagaacagtaaacattggtaagaatgagctttcaactcataggcttatttccaatttaattgaccatactggatacttaggtcaaatttctgttctctcttccccaaataatattaaagtattatttgaactttttaagatgaggcagttcccctgaaaaagttaatgcagctctccatcagaatccactcttctagggatatgaaaatctcttaacacccaccctacatacacagacacacacacacacacacacacacacacacacacacacattcaccctaaggatccaatggaatactgaaaagaaatcacttccttgaaaattttattaaaaaacaaacaaacaaacaaaaagcctgtccacccttgagaatccttcctctccttggaacgtcaatgtttgtgtagatgaaaccatctcatgctctgtggctccagggtttctgttactattttatgcacttgggagaaggcttagaataaaagatgtagcacattttgctttcccatttattgtttggccagctatgccaatgtggtgctattgtttctttaagaaagtacttgactaaaaaaaaaagaaaaaaagaaaaaaaagaaagcatagacatatttttttaaagtataaaaacaacaattctatagatagatggcttaataaaatagcattaggtctatctagccaccaccacctttcaactttttatcactcacaagtagtgtactgttcaccaaattgtgaatttgggggtgcaggggcaggagttggaaattttttaaagttagaaggctccattgttttgttggctctcaaacttagcaaaattagcaatatattatccaatcttctgaacttgatcaagagcatggagaataaacgcgggaaaaaagatcttataggcaaatagaagaatttaaaagataagtaagttccttattgatttttgtgcactctgctctaaaacagatattcagcaagtggagaaaataagaacaaagagaaaaaatacatagatttacctgcaaaaaatagcttctgccaaatcccccttgggtattctttggcatttactggtttatagaagacattctcccttcacccagacatctcaaagagcagtagctctcatgaaaagcaatcactgatctcatttgggaaatgttggaaagtatttccttatgagatgggggttatctactgataaagaaagaatttatgagaaattgttgaaagagatggctaacaatctgtgaagattttttgtttcttgtttttgttttttttttttttttactttatacagtctttatgaatttcttaatgttcaaaatgacttggttcttttcttctttttttatatcagaatgaggaataataagttaaacccacatagactctttaaaactataggctagatagaaatgtatgtttgacttgttgaagctataatcagactatttaaaatgttttgctatttttaatcttaaaagattgtgctaatttattagagcagaacctgtttggctctcctcagaagaaagaatctttccattcaaatcacatggctttccaccaatattttcaaaagataaatctgatttatgcaatggcatcatttattttaaaacagaagaattgtgaaagtttatgcccctcccttgcaaagaccataaagtccagatctggtaggggggcaacaacaaaaggaaaatgttgttgattcttggttttggattttgttttgttttcaatgctagtgtttaatcctgtagtacatatttgcttattgctattttaatattttataagaccttcctgttaggtattagaaagtgatacatagatatcttttttgtgtaatttctatttaaaaaagagagaagactgtcagaagctttaagtgcatatggtacaggataaagatatcaatttaaataaccaattcctatctggaacaatgcttttgttttttaaagaaacctctcacagataagacagaggcccaggggatttttgaagctgtctttattctgcccccatcccaacccagcccttattattttagtatctgcctcagaattttatagagggctgaccaagctgaaactctagaattaaaggaacctcactgaaaacatatatttcacgtgttccctctttttttttttcctttttgtgagatggggtctcgcactgtcccccaggctggagtgcagtggcatgatctcggctcactgcaacctccacctcctgggtttaagcgattctcctgcctcagcctcctgagtagctgggattacaggcacccaccactatgcccggctaattttttggatttttaatagagacggggttttaccatgttggccaggttggtctcaaactcctgaccttgtgatttgcccgcctcagcctcccaaattgctgggattacaggcatgagccaccacaccctgcccatgtgttccctcttaatgtatgattacatggatcttaaacatgatccttctctcctcattcttcaactatctttgatggggtctttcaaggggaaaaaaatccaagcttttttaaagtaaaaaaaaaaaaagagaggacacaaaaccaaatgttactgctcaactgaaatatgagttaagatggagacagagtttctcctaataaccggagctgaattacctttcactttcaaaaacatgaccttccacaatccttagaatctgcctttttttatattactgaggcctaaaagtaaacattactcattttattttgcccaaaatgcactgatgtaaagtaggaaaaataaaaacagagctctaaaatccctttcaagccacccattgaccccactcaccaactcatagcaaagtcacttctgttaatcccttaatctgattttgtttggatatttatcttgtacccgctgctaaacacactgcaggagggactctgaaacctcaagctgtctacttacatcttttatctgtgtctgtgtatcatgaaaatgtctattcaaaatatcaaaacctttcaaatatcacgcagcttatattcagtttacataaaggccccaaataccatgtcagatctttttggtaaaagagttaatgaactatgagaattgggattacatcatgtattttgcctcatgtatttttatcacacttataggccaagtgtgataaataaacttacagacactgaattaatttcccctgctactttgaaaccagaaaataatgactggccattcgttacatctgtcttagttgaaaagcatattttttattaaattaattctgattgtatttgaaattattattcaattcacttatggcagaggaatatcaatcctaatgacttctaaaaatgtaactaattgaatcattatcttacatttactgtttaataagcatattttgaaaatgtatggctagagtgtcataataaaatggtatatctttctttagtaattacattaaaattagtcatgtttgattaattagttc

SEQ ID NO: 42232 - DNA, 949 bp, Artificial Sequence
  derived and/or modified sequence
ttttgtagataaatgtgaggattttctctaaatccctcttctgtttgctaaatctcactgtcactgctaaattcagagcagatagagcctgcgcaatggaataaagtcctcaaaattgaaatgtgacattgctctcaacatctcccatctctctggatttctttttgcttcattattcctgctaaccaattcattttcagactttgtacttcagaagcaatgggaaaaatcagcagtcttccaacccaattatttaagtgctgcttttgtgatttcttgaaggtgaagatgcacaccatgtcctcctcgcatctcttctacctggcgctgtgcctgctcaccttcaccagctctgccacggctggaccggagacgctctgcggggctgagctggtggatgctcttcagttcgtgtgtggagacaggggcttttatttcaacaagcccacagggtatggctccagcagtcggagggcgcctcagacaggcatcgtggatgagtgctgcttccggagctgtgatctaaggaggctggagatgtattgcgcacccctcaagcctgccaagtcagctcgctctgtccgtgcccagcgccacaccgacatgcccaagacccagaagtatcagcccccatctaccaacaagaacacgaagtctcagagaaggaaaggttggccaaagacacatccaggaggggaacagaaggaggggacagaagcaagtctgcagatcagaggaaagaagaaagagcagaggagggagattggaagtagaaatgctgaatgcagaggcaaaaaaggaaaatgaaggacaggaggattaaacagacagaggcaaggatgatgagagaggagcagacagcaagaatgaaaagcagaaaatacaatagaggaaatgaagaaaagtaggcctgctggagctagatgatgatgtgatggaaatagaagta

SEQ ID NO: 42233 - DNA, 588 bp, Artificial Sequence
  derived and/or modified sequence
atgggcaagatcagcagcctgcccacccagctgttcaagtgctgcttctgcgacttcctgaaggtgaagatgcacaccatgagcagcagccacctgttctacctggccctgtgcctgctgaccttcaccagcagcgccaccgccggccccgagaccctgtgcggcgccgagctggtggacgccctgcagttcgtgtgcggcgacagaggcttctacttcaacaagcccaccggctacggcagcagcagcagaagagccccccagaccggcatcgtggacgagtgctgcttcagaagctgcgacctgagaagactggagatgtactgcgcccccctgaagcccgccaagagcgccagaagcgtgagagcccagagacacaccgacatgcccaagacccagaagtaccagccccccagcaccaacaagaacaccaagagccagagaagaaagggctggcccaagacccaccccggcggcgagcagaaggagggcaccgaggccagcctgcagatcagaggcaagaagaaggagcagagaagagagatcggcagcagaaacgccgagtgcagaggcaagaagggcaagtag

SEQ ID NO: 42234 - DNA, 477 bp, Artificial Sequence
  derived and/or modified sequence
atgggcaagatcagcagcctgcccacccagctgttcaagtgctgcttctgcgacttcctgaaggtgaagatgcacaccatgagcagcagccacctgttctacctggccctgtgcctgctgaccttcaccagcagcgccaccgccggccccgagaccctgtgcggcgccgagctggtggacgccctgcagttcgtgtgcggcgacagaggcttctacttcaacaagcccaccggctacggcagcagcagcagaagagccccccagaccggcatcgtggacgagtgctgcttcagaagctgcgacctgagaagactggagatgtactgcgcccccctgaagcccgccaagagcgccagaagcgtgagagcccagagacacaccgacatgcccaagacccagaagtaccagccccccagcaccaacaagaacaccaagagccagagaagaaagggcagcaccttcgaggagagaaagtag

SEQ ID NO: 42235 - DNA, 420 bp, Artificial Sequence
  derived and/or modified sequence
ctgaaggtgaagatgcacaccatgagcagcagccacctgttctacctggccctgtgcctgctgaccttcaccagcagcgccaccgccggccccgagaccctgtgcggcgccgagctggtggacgccctgcagttcgtgtgcggcgacagaggcttctacttcaacaagcccaccggctacggcagcagcagcagaagagccccccagaccggcatcgtggacgagtgctgcttcagaagctgcgacctgagaagactggagatgtactgcgcccccctgaagcccgccaagagcgccagaagcgtgagagcccagagacacaccgacatgcccaagacccagaagtaccagccccccagcaccaacaagaacaccaagagccagagaagaaagggcagcaccttcgaggagagaaagtag

SEQ ID NO: 42236 - DNA, 588 bp, Artificial Sequence
  derived and/or modified sequence
atgggcaaaatctcatccctccctactcagttatttaagtgttgtttctgcgactttttgaaagtgaagatgcatactatgtccagttctcacctgttttacttggcgctgtgtctgcttactttcaccagttccgcaactgctggaccagagactctgtgtggagctgagctggtagacgctctgcagttcgtgtgtggagaccgggggttttattttaacaaacccactggatacggttcttcatcgcgtcgggccccccagacagggattgtggatgagtgctgttttcggagctgcgacctgcgaaggctggaaatgtattgcgcacccttaaagccagctaaatccgcgcggtccgtccgcgcgcagcgacacacagacatgcccaagacgcagaaataccagcccccttcaaccaataagaacaccaagtcccagagaaggaagggttggcctaagacacatcctggcggcgaacagaaggagggcaccgaagcatcgctgcaaatccggggaaaaaagaaggagcaaagacgggaaatagggtctcggaatgccgagtgtagaggtaaaaagggaaagtag

SEQ ID NO: 42237 - DNA, 477 bp, Artificial Sequence
  derived and/or modified sequence
atggggaagatttcctccctcccaacccagctgtttaagtgctgtttttgcgatttcctgaaggtgaagatgcacaccatgtcctcctctcacctgttttacctcgccctgtgcctcctaactttcacatcctccgcaactgccgggcccgagacgctctgtggagctgaattggtggacgcccttcagtttgtatgtggggatcgcggcttctactttaataagccaaccggctacggatcttcgagtagacgagcaccacaaaccggaatcgtcgatgagtgctgtttccgatcatgtgatctccgcagactggagatgtattgcgcacctctcaagccagccaagtccgcaaggtcggtgcgcgcccagcggcacaccgacatgcctaagacacagaaatatcagcccccctcaacaaataaaaacactaaaagtcaacgtcgcaaaggcagcactttcgaagagcgcaaatag

SEQ ID NO: 42238 - DNA, 420 bp, Artificial Sequence
  derived and/or modified sequence
ttgaaggtgaaaatgcacaccatgagctcttcacacctcttctatctcgccctgtgcctgctcaccttcacgagttctgccaccgccggaccagaaaccctgtgcggcgcggagctcgtggatgcactgcagttcgtttgcggcgacagagggttctattttaataaaccaaccggatacgggtcttcctcccgaagagctccgcagacaggcatcgtggacgagtgctgtttccgatcatgtgatttacgacggctggagatgtactgcgcaccgctgaagcctgccaagtccgctagatctgtacgtgcccagcgccacacagacatgccaaaaacccagaagtatcagccgccatccacgaataagaacaccaaaagccagaggagaaagggcagcacattcgaagagcggaagtag

SEQ ID NO: 42239 - DNA, 477 bp, Artificial Sequence
  derived and/or modified sequence
atgggtaaaatcagcagcctccccacacagctctttaagtgttgtttttgtgacttcttaaaggtgaaaatgcacaccatgtcatctagtcatcttttctacctagccctttgcttactcacctttacaagcagcgccactgctggtccggagaccctgtgtggcgctgagctagtcgacgcactgcagttcgtctgcggggataggggcttttactttaacaaacctaccggatacggatcttcttctcggcgtgcgccccaaactgggatcgttgacgaatgttgttttcgaagttgtgatctgagacgcttagagatgtattgtgcgcccctcaagcctgctaagtctgctcggagcgtgcgtgcccagcgccacactgacatgccgaagacacagaagtaccaacccccctctaccaacaagaacaccaaaagccagcggaggaaaggcagcacctttgaagagagaaaatag

SEQ ID NO: 42240 - DNA, 588 bp, Artificial Sequence
  derived and/or modified sequence
atgggcaagatcagcagcctgcccacccagctgttcaagtgctgcttctgtgacttcctgaaggtgaagatgcacaccatgagcagcagccacctgttctacctggccctgtgcctgctgaccttcaccagcagcgccacagctggccctgagaccctgtgtggggctgagctggtggatgccctgcagtttgtgtgtggggaccggggcttctacttcaacaagcccaccggctacggcagcagcagccggcgggccccccagacaggaattgtggatgagtgctgcttccgcagctgtgacctgcggcggctggagatgtactgtgcccccctgaagccagccaagagcgcccggtctgtgcgggcccagaggcacacagacatgcccaagacccagaagtaccagccccccagcaccaacaagaacaccaagagccagaggaggaagggctggcccaagacccaccctggaggagagcagaaggagggcacagaggccagcctgcagatccggggcaagaagaaggagcagaggcgggagatcggcagcagaaatgctgagtgccggggcaagaagggcaagtag

SEQ ID NO: 42241 - DNA, 477 bp, Artificial Sequence
  derived and/or modified sequence
atgggcaagatcagcagcctgcccacccagctgttcaagtgctgcttctgtgacttcctgaaggtgaagatgcacaccatgagcagcagccacctgttctacctggccctgtgcctgctgaccttcaccagcagcgccacagctggccctgagaccctgtgtggggctgagctggtggatgccctgcagtttgtgtgtggggaccggggcttctacttcaacaagcccaccggctacggcagcagcagccggcgggccccccagacaggaattgtggatgagtgctgcttccgcagctgtgacctgcggcggctggagatgtactgtgcccccctgaagccagccaagagcgcccggtctgtgcgggcccagaggcacacagacatgcccaagacccagaagtaccagccccccagcaccaacaagaacaccaagagccagaggaggaagggcagcacctttgaggagaggaagtag

SEQ ID NO: 42242 - DNA, 420 bp, Artificial Sequence
  derived and/or modified sequence
ctgaaggtgaagatgcacaccatgagcagcagccacctgttctacctggccctgtgcctgctgaccttcaccagcagcgccacagctggccctgagaccctgtgtggggctgagctggtggatgccctgcagtttgtgtgtggggaccggggcttctacttcaacaagcccaccggctacggcagcagcagcagaagagccccccagacaggcatcgtggatgagtgctgcttccgcagctgtgacctgcggcggctggagatgtactgtgcccccctgaagccagccaagagcgcccggtctgtgcgggcccagaggcacacagacatgcccaagacccagaagtaccagccccccagcaccaacaagaacaccaagagccagaggaggaagggcagcacctttgaggagaggaagtag

SEQ ID NO: 42243 - DNA, 1097 bp, Artificial Sequence
  derived and/or modified sequence
cttctgtttgctaaatctcactgtcactgctaaattcagagcagatagagcctgcgcaatggaataaagtcctcaaaattgaaatgtgacattgctctcaacatctcccatctctctggatttctttttgcttcattattcctgctaaccaattcattttcagactttgtacttcagaagcaatgggaaaaatcagcagtcttccaacccaattatttaagtgctgcttttgtgatttcttgaaggtgaagatgcacaccatgtcctcctcgcatctcttctacctggcgctgtgcctgctcaccttcaccagctctgccacggctggaccggagacgctctgcggggctgagctggtggatgctcttcagttcgtgtgtggagacaggggcttttatttcaacaagcccacagggtatggctccagcagtcggagggcgcctcagacaggcatcgtggatgagtgctgcttccggagctgtgatctaaggaggctggagatgtattgcgcacccctcaagcctgccaagtcagctcgctctgtccgtgcccagcgccacaccgacatgcccaagacccagaagtatcagcccccatctaccaacaagaacacgaagtctcagagaaggaaaggttggccaaagacacatccaggaggggaacagaaggaggggacagaagcaagtctgcagatcagaggaaagaagaaagagcagaggagggagattggaagtagaaatgctgaatgcagaggcaaaaaaggaaaatgaaggacaggaggattaaacagacagaggcaaggatgatgagagaggagcagacagcaagaatgaaaagcagaaaatacaatagaggaaatgaagaaaagtaggcctgctggagctagatgatgatgtgatggaaatagaagtaaccttttagagaatctcgctaagaaacatggagaaaacggaaaagaaaaatgtaatgccctagaaagcgcaaagaaagacagtggcaaaaatgaaaaaaaaaaataaaaattataaaagaggcaaaaaaagacacactattctctgcctctaaaacacaattaaataaaagaatttaaataaaaa

SEQ ID NO: 42244 - DNA, 761 bp, Artificial Sequence
  derived and/or modified sequence
aatgttcccccagctgtttcctgtctacagtgtctgtgttttgtagataaatactttgtacttcagaagcaatgggaaaaatcagcagtcttccaacccaattatttaagtgctgcttttgtgatttcttgaaggtgaagatgcacaccatgtcctcctcgcatctcttctacctggcgctgtgcctgctcaccttcaccagctctgccacggctggaccggagacgctctgcggggctgagctggtggatgctcttcagttcgtgtgtggagacaggggcttttatttcaacaagcccacagggtatggctccagcagtcggagggcgcctcagacaggcatcgtggatgagtgctgcttccggagctgtgatctaaggaggctggagatgtattgcgcacccctcaagcctgccaagtcagctcgctctgtccgtgcccagcgccacaccgacatgcccaagacccagaagtatcagcccccatctaccaacaagaacacgaagtctcagagaaggaaaggaagtacatttgaagaacgcaagtagagggagtgcaggaaacaagaactacaggatgtaggaagaccctcctgaggagtgaagagtgacatgccaccgcaggatcctttgctctgcacgagttacctgttaaactttggaacacctaccaaaaaataagtttgataacatttaaaagatgggcgtttcccccaatgaaatacacaagtaaacattccaacattgtctttaggagtgatt

SEQ ID NO: 42245 - DNA, 444 bp, Artificial Sequence
  derived and/or modified sequence
ttgaaggtgaagatgcacaccatgtcctcctcgcatctcttctacctggcgctgtgcctgctcaccttcaccagctctgccacggctggaccggagacgctctgcggggctgagctggtggatgctcttcagttcgtgtgtggagacaggggcttttatttcaacaagcccacagggtatggctccagcagtcggagggcgcctcagacaggcatcgtggatgagtgctgcttccggagctgtgatctaaggaggctggagatgtattgcgcacccctcaagcctgccaagtcagctcgctctgtccgtgcccagcgccacaccgacatgcccaagacccagaagtatcagcccccatctaccaacaagaacacgaagtctcagagaaggaaaggaagtacatttgaagaacgcaagtagagggagtgcaggaaacaagaacta

SEQ ID NO: 42246 - DNA, 588 bp, Artificial Sequence
  derived and/or modified sequence
atgggcaagatcagcagcctgcccacccagctgttcaagtgctgcttctgcgacttcctgaaggtcaagatgcacacaatgtcgagtagccatctgttctatctcgcactctgtctcttaacctttacctctagcgccactgccggtcccgagactttatgcggagctgaactggtggacgcgttgcagttcgtttgtggagatcgggggttttattttaataagccaactggatacgggagcagcagcagaagagctccgcagaccggtatcgttgacgagtgctgtttcaggtcatgtgacctacgacgcctcgagatgtactgcgcgcctcttaaaccagcaaaatcagctcgaagtgtccgagcccagagacacactgacatgccaaaaacccagaaataccagccgccctccaccaataaaaacacgaagtcccagaggaggaagggctggcccaaaacacacccaggcggtgagcagaaggagggcacagaagcatcactgcagatcaggggaaagaaaaaggagcagcgtcgcgagataggctccaggaatgccgaatgtcgcggaaagaaaggcaagtag

SEQ ID NO: 42247 - DNA, 477 bp, Artificial Sequence
  derived and/or modified sequence
atgggcaagatcagcagcctgcccacccagctgttcaagtgctgcttctgcgattttctgaaggtcaagatgcacactatgagctcatcacatctcttctacttggcgctgtgtctgttgactttcaccagtagcgcgaccgccgggcccgagacactgtgcggggcagagctagtggacgcactccaattcgtgtgcggtgaccgcgggttttactttaataagccgactggttatgggtctagctcgaggagagccccgcagactggcatcgtagatgagtgttgttttcgctcctgtgatctcagacggttagaaatgtattgcgctccactgaagccggctaagtctgcccgctccgtgcgcgctcagcggcacacagatatgcctaagacccaaaaatatcagccaccttcaaccaataagaacacaaagagtcagcgcaggaagggctcaacattcgaggagagaaagtag

SEQ ID NO: 42248 - DNA, 420 bp, Artificial Sequence
  derived and/or modified sequence
ctgaaggtgaagatgcacaccatgagcagcagccacctgttctacctcgcactttgcctgctgacattcaccagctccgccaccgccggtccagaaactctctgcggcgctgaactggtggatgctcttcaattcgtgtgcggcgatcgcggattttacttcaataaacctaccgggtatggcagcagttcgagacgggcacctcagacaggaattgtagacgagtgctgtttccggagttgcgatctacggaggctggaaatgtactgcgctcccctcaagccagcgaagagcgcaagatccgtacgcgcccagagacataccgatatgcccaaaacgcaaaagtaccaacccccgtccacgaacaagaacacaaagagtcagaggcgcaaagggtccacattcgaagaacggaaatag

SEQ ID NO: 42249 - DNA, 477 bp, Artificial Sequence
  derived and/or modified sequence
atgggcaagatcagcagcctgcccacccagctgttcaagtgctgcttctgcgacttcttgaaagttaagatgcacaccatgtcgagcagtcacctgttctacctggccctgtgcttattgacctttacttcaagtgcgactgcgggaccggagacactctgtggggcagagctcgtcgatgccctgcaattcgtatgcggcgatagagggttttacttcaataaaccaacaggatatggatcgagcagcagaagagccccgcagacaggcattgtagatgaatgctgtttccggtcctgcgatttgaggagactggaaatgtactgtgctcctctgaaacctgccaaatcagcccgtagtgtgagggctcagagacacactgacatgcctaagacccagaaatatcagcccccttccaccaataaaaatacgaaaagccagaggcggaaggggagtacctttgaggaaaggaagtag

SEQ ID NO: 42250 - DNA, 588 bp, Artificial Sequence
  derived and/or modified sequence
atgggtaaaatctcaagtctgcctactcagttattcaaatgctgcttttgtgactttcttaaagttaagatgcatacaatgtcttctagccacctgttttacctggcgctgtgtctccttacgttcactagctctgctaccgcgggacctgagactctgtgcggagccgagctggtagacgcattgcaattcgtctgcggggatcggggattctacttcaacaaaccaacaggttatggaagttctagtcgcagagccccacaaaccggaattgtggacgaatgctgctttcggagctgcgatctcaggagactggagatgtattgtgcacctctgaaacctgccaagagcgccaggagtgtcagggcacaacgacataccgatatgccgaagacccagaagtaccagcccccatctacaaataagaatactaagtctcagcgaagaaagggctggcctaaaacacacccgggaggggaacagaaggaaggaacagaggcgtccctgcagatccgcggtaagaagaaggagcagcgacgggaaatcggatctaggaatgccgaatgccgcggtaagaaaggaaaatag

SEQ ID NO: 42251 - DNA, 477 bp, Artificial Sequence
  derived and/or modified sequence
atgggtaaaatttcttccctacctacccagctgttcaagtgctgcttttgtgactttcttaaagtgaaaatgcacactatgtcatcttctcacctcttttacttggccttgtgtctgcttacattcacaagctctgccactgcaggcccagaaaccctttgcggtgctgaactggtggacgccttgcagtttgtctgtggtgaccgcggtttttactttaacaagcccacaggctacggaagctccagccgcagagcaccacagacagggatagttgatgagtgttgctttcggagttgcgaccttcgaagacttgaaatgtactgcgccccactgaagcccgctaaaagcgccagatccgtcagggcgcagcggcatacagatatgcctaagacgcagaaatatcagcccccttccacaaataagaacaccaagagtcagcgaaggaaaggaagcaccttcgaggaacgcaagtag

SEQ ID NO: 42252 - DNA, 420 bp, Artificial Sequence
  derived and/or modified sequence
ctaaaagtgaaaatgcatactatgtcgtcctcacatctgttttatctggccctctgtttgcttacttttacctcgtctgctactgcaggcccagagacgctgtgcggcgcagaactggtcgacgcacttcaatttgtatgtggtgaccggggtttctattttaataagcccacagggtatggaagtagtagtagacgggcacctcagacaggcattgtggatgagtgttgcttccgatcatgcgacttgaggcggctagaaatgtactgtgcacccctcaaaccagccaaatcggcaaggagcgttagggcccaaagacatacggatatgcccaaaacgcaaaagtatcaaccgccaagtactaacaagaataccaagtctcagcgacggaaggggagcactttcgaggaacggaagtag

SEQ ID NO: 42253 - DNA, 477 bp, Artificial Sequence
  derived and/or modified sequence
atgggaaagatttcttccctgccgacccagctgtttaagtgttgcttttgcgactttttaaaagtgaagatgcatacaatgagcagcagccacctgttttaccttgccttatgtttgctcacatttacgtcttccgctaccgccggtcccgagactctctgcggggcagaattggttgatgcactccagttcgtttgtggtgatcgtggattttactttaataaaccaacagggtacggatccagctctcggagagcaccacaaacaggtattgttgacgagtgttgcttccgttcttgcgacctccgcaggctagagatgtattgcgctcccttgaaacctgctaagtctgctcggtctgtccgcgctcaaaggcataccgacatgcctaaaacccagaagtatcagcccccttccaccaacaaaaacacgaaatctcagcggcgaaaaggttcaactttcgaagaaaggaaatag

SEQ ID NO: 42254 - DNA, 588 bp, Artificial Sequence
  derived and/or modified sequence
atgggcaaaatctcatctctgcccactcagctgttcaaatgctgcttttgtgacttcctgaaagtcaagatgcatacaatgagcagtagccacttattctacctagccttgtgtctgttgacgttcacatcaagcgctacagctggccctgaaaccctgtgcggtgctgagttagtggacgcccttcagttcgtgtgtggggatcggggattctatttcaataaacccaccggctatggttccagctcacgtcgcgctccccagactggcatcgtcgatgaatgttgctttcggtcgtgtgatttaagacgcctggagatgtattgtgctccactcaaacccgctaaaagtgcaagatcagtaagggcacagcggcacacagatatgcctaagacacagaagtatcagcccccctccactaacaaaaacactaagtctcagagaagaaaggggtggccaaagacccatcctggcggcgagcagaaagaggggacggaggctagtctgcagattaggggcaaaaaaaaagaacaacggagggagatcggcagtcggaacgcggagtgtcgaggcaaaaaaggcaagtag

SEQ ID NO: 42255 - DNA, 477 bp, Artificial Sequence
  derived and/or modified sequence
atgggaaagatcagtagccttccaacacaacttttcaagtgttgtttttgcgacttccttaaagtgaagatgcacactatgtctagctcccacctcttttacctggcactctgcctcctgacgtttacatcatctgcaactgctggcccagagacactttgtggagccgaactggtggacgccttacagtttgtttgcggggatcgggggttctactttaacaagccgacaggatatggatcatcatccaggcgagctccccagactggtattgtggacgaatgctgcttcagatcatgtgatctgagacgactcgaaatgtactgcgccccactcaaacccgctaaaagcgcgcgcagtgtacgagctcagcgccatacagacatgcccaaaacccaaaaatatcaaccaccaagtacgaacaagaacaccaaaagtcagagaaggaagggatcaactttcgaggagcgcaagtag

SEQ ID NO: 42256 - DNA, 420 bp, Artificial Sequence
  derived and/or modified sequence
ctgaaagtgaaaatgcacaccatgagtagttcacatctgttttacctggccctgtgtctgttgacctttaccagcagcgctacagcgggacccgagaccctctgcggcgccgaactggtcgatgcccttcagtttgtgtgcggggataggggattttatttcaataagccaacaggctacggatcctcatcaagaagggccccacaaacaggaattgtggacgagtgctgcttccgcagctgcgacctgagaagattggagatgtactgtgcgccactaaaacccgccaagtccgccagaagcgtccgagcacaacgccacaccgacatgccaaagacccaaaagtaccaaccaccttcgactaacaagaacaccaaatctcaaagacgaaagggatcgacatttgaggagcgcaaatag

SEQ ID NO: 42257 - DNA, 477 bp, Artificial Sequence
  derived and/or modified sequence
atgggaaagattagtagcttaccgacccagttgtttaagtgctgtttctgcgattttctcaaagtcaaaatgcacaccatgtcttcctctcacctgttctatctcgctctctgtcttctgacttttacaagctctgcaactgccggtcccgaaacactgtgtggtgctgagctggttgatgctctacagtttgtttgtggagaccgaggcttttatttcaacaaacccaccggttacggttcaagctcaagacgggccccccagacagggatcgttgacgaatgttgtttccgttcctgcgatttgcgcagacttgagatgtactgtgccccacttaaacctgccaagtccgcccgatccgtcagggcccagcgtcatactgacatgccaaagacacaaaaatatcaacctccctctaccaataaaaatacaaaatctcagaggagaaaaggctctaccttcgaagagcgtaaatag

SEQ ID NO: 42258 - DNA, 588 bp, Artificial Sequence
  derived and/or modified sequence
atgggaaaaatctcatctttaccaacacagctctttaaatgttgtttctgtgatttcctcaaggtgaagatgcatacaatgtcctcatcacatctgttttatctggcactttgcctcttgacttttacctctagcgccaccgccggtcccgagacactctgcggcgcagagctcgttgacgccctgcagtttgtttgtggagatagaggattttatttcaataaacccaccgggtacggttcctcttccagacgggcccctcagacaggcattgttgacgaatgttgttttagaagctgcgatctgaggagattggaaatgtactgcgcgccccttaagcctgccaaatccgcaagaagcgtcagggcccagaggcacaccgatatgcctaagacccagaagtatcagccacctagcacaaacaagaacaccaaaagccaacgaaggaagggctggccaaaaacccatccaggcggcgaacaaaaagagggtacagaggcgtccttacagatcagagggaagaagaaggaacaacgccgtgaaattggatcaaggaacgcagaatgtcgcggaaaaaaaggtaaatag

SEQ ID NO: 42259 - DNA, 477 bp, Artificial Sequence
  derived and/or modified sequence
atggggaaaatcagtagcttgccaacccaacttttcaagtgttgtttttgtgactttcttaaggtgaaaatgcacaccatgtcatctagccacctgttctatcttgccctttgtcttctcacattcaccagttccgcaacagccgggcctgagacattgtgtggggctgaactagtcgacgccctccagttcgtctgtggcgaccgtggattctacttcaataagccgacaggatatggctcatcctccaggcgcgctccgcaaacaggtatcgtggacgaatgctgctttagatcgtgcgatctgagaaggctggagatgtattgcgccccattgaaacccgctaaatcagcgagaagcgtgcgtgcccagagacatacagacatgcctaaaacacagaagtatcagccccctagcacgaataagaatacaaaatctcagcgtcgaaaaggaagcacttttgaggagagaaagtag

SEQ ID NO: 42260 - DNA, 420 bp, Artificial Sequence
  derived and/or modified sequence
ctgaaggtgaaaatgcacactatgtcatccagccatctgttctacctcgcgctctgcctattgactttcacatccagtgccactgccggacccgagaccctctgtggtgccgaactggtggacgccttgcagtttgtgtgtggcgatcggggcttctacttcaataagccgacgggctatggctcctccagcaggcgtgctcctcaaaccggaatcgtagatgagtgctgcttccgatcatgcgacttacgaaggctagagatgtactgcgccccattaaaaccggccaagtccgcacggtcagtcagggcccaacgccacaccgatatgcctaaaacacagaagtaccaaccccctagtactaacaagaatacaaagtcccagcgtagaaaaggaagtacatttgaagaacggaagtag

SEQ ID NO: 42261 - DNA, 477 bp, Artificial Sequence
  derived and/or modified sequence
atgggaaagattagtagcttaccgacccagttgtttaagtgctgtttctgcgattttctcaaagtcaaaatgcacaccatgtcttcctctcacctgttctatctcgctctctgtcttctgacttttacaagctctgcaactgccggtcccgaaacactgtgtggtgctgagctggttgatgctctacagtttgtttgtggagaccgaggcttttatttcaacaaacccaccggttacggttcaagctcaagacgggccccccagacagggatcgttgacgaatgttgtttccgttcctgcgacctgcgacgactggagatgtactgtgcacctctcaagccggctaagtccgctcgatcagtacgcgcccagagacatacagacatgccaaaaacccaaaaataccagccgccttccactaacaagaacaccaagagccaacggaggaaaggatctactttcgaggagagaaaatag

SEQ ID NO: 42262 - RNA, 588 nt, Artificial Sequence
  derived and/or modified sequence
augggcaaaaucucaucucugcccacucagcuguucaaaugcugcuuuugugacuuccugaaagucaagaugcauacaaugagcaguagccacuuauucuaccuagccuugugucuguugacguucacaucaagcgcuacagcuggcccugaaacccugugcggugcugaguuaguggacgcccuucaguucguguguggggaucggggauucuauuucaauaaacccaccggcuaugguuccagcucacgucgcgcuccccagacuggcaucgucgaugaauguugcuuucggucgugugauuuaagacgccuggagauguauugugcuccacucaaacccgcuaaaagugcaagaucaguaagggcacagcggcacacagauaugccuaagacacagaaguaucagccccccuccacuaacaaaaacacuaagucucagagaagaaagggguggccaaagacccauccuggcggcgagcagaaagaggggacggaggcuagucugcagauuaggggcaaaaaaaaagaacaacggagggagaucggcagucggaacgcggagugucgaggcaaaaaaggcaaguag

SEQ ID NO: 42263 - RNA, 477 nt, Artificial Sequence
  derived and/or modified sequence
augggaaagaucaguagccuuccaacacaacuuuucaaguguuguuuuugcgacuuccuuaaagugaagaugcacacuaugucuagcucccaccucuuuuaccuggcacucugccuccugacguuuacaucaucugcaacugcuggcccagagacacuuuguggagccgaacugguggacgccuuacaguuuguuugcggggaucggggguucuacuuuaacaagccgacaggauauggaucaucauccaggcgagcuccccagacugguauuguggacgaaugcugcuucagaucaugugaucugagacgacucgaaauguacugcgccccacucaaacccgcuaaaagcgcgcgcaguguacgagcucagcgccauacagacaugcccaaaacccaaaaauaucaaccaccaaguacgaacaagaacaccaaaagucagagaaggaagggaucaacuuucgaggagcgcaaguag

SEQ ID NO: 42264 - RNA, 420 nt, Artificial Sequence
  derived and/or modified sequence
cugaaagugaaaaugcacaccaugaguaguucacaucuguuuuaccuggcccugugucuguugaccuuuaccagcagcgcuacagcgggacccgagacccucugcggcgccgaacuggucgaugcccuucaguuugugugcggggauaggggauuuuauuucaauaagccaacaggcuacggauccucaucaagaagggccccacaaacaggaauuguggacgagugcugcuuccgcagcugcgaccugagaagauuggagauguacugugcgccacuaaaacccgccaaguccgccagaagcguccgagcacaacgccacaccgacaugccaaagacccaaaaguaccaaccaccuucgacuaacaagaacaccaaaucucaaagacgaaagggaucgacauuugaggagcgcaaauag

SEQ ID NO: 42265 - RNA, 477 nt, Artificial Sequence
  derived and/or modified sequence
augggaaagauuaguagcuuaccgacccaguuguuuaagugcuguuucugcgauuuucucaaagucaaaaugcacaccaugucuuccucucaccuguucuaucucgcucucugucuucugacuuuuacaagcucugcaacugccggucccgaaacacuguguggugcugagcugguugaugcucuacaguuuguuuguggagaccgaggcuuuuauuucaacaaacccaccgguuacgguucaagcucaagacgggccccccagacagggaucguugacgaauguuguuuccguuccugcgauuugcgcagacuugagauguacugugccccacuuaaaccugccaaguccgcccgauccgucagggcccagcgucauacugacaugccaaagacacaaaaauaucaaccucccucuaccaauaaaaauacaaaaucucagaggagaaaaggcucuaccuucgaagagcguaaauag

SEQ ID NO: 42266 - RNA, 588 nt, Artificial Sequence
  derived and/or modified sequence
augggaaaaaucucaucuuuaccaacacagcucuuuaaauguuguuucugugauuuccucaaggugaagaugcauacaauguccucaucacaucuguuuuaucuggcacuuugccucuugacuuuuaccucuagcgccaccgccggucccgagacacucugcggcgcagagcucguugacgcccugcaguuuguuuguggagauagaggauuuuauuucaauaaacccaccggguacgguuccucuuccagacgggccccucagacaggcauuguugacgaauguuguuuuagaagcugcgaucugaggagauuggaaauguacugcgcgccccuuaagccugccaaauccgcaagaagcgucagggcccagaggcacaccgauaugccuaagacccagaaguaucagccaccuagcacaaacaagaacaccaaaagccaacgaaggaagggcuggccaaaaacccauccaggcggcgaacaaaaagaggguacagaggcguccuuacagaucagagggaagaagaaggaacaacgccgugaaauuggaucaaggaacgcagaaugucgcggaaaaaaagguaaauag

SEQ ID NO: 42267 - RNA, 477 nt, Artificial Sequence
  derived and/or modified sequence
auggggaaaaucaguagcuugccaacccaacuuuucaaguguuguuuuugugacuuucuuaaggugaaaaugcacaccaugucaucuagccaccuguucuaucuugcccuuugucuucucacauucaccaguuccgcaacagccgggccugagacauuguguggggcugaacuagucgacgcccuccaguucgucuguggcgaccguggauucuacuucaauaagccgacaggauauggcucauccuccaggcgcgcuccgcaaacagguaucguggacgaaugcugcuuuagaucgugcgaucugagaaggcuggagauguauugcgccccauugaaacccgcuaaaucagcgagaagcgugcgugcccagagacauacagacaugccuaaaacacagaaguaucagcccccuagcacgaauaagaauacaaaaucucagcgucgaaaaggaagcacuuuugaggagagaaaguag

SEQ ID NO: 42268 - RNA, 420 nt, Artificial Sequence
  derived and/or modified sequence
cugaaggugaaaaugcacacuaugucauccagccaucuguucuaccucgcgcucugccuauugacuuucacauccagugccacugccggacccgagacccucuguggugccgaacugguggacgccuugcaguuuguguguggcgaucggggcuucuacuucaauaagccgacgggcuauggcuccuccagcaggcgugcuccucaaaccggaaucguagaugagugcugcuuccgaucaugcgacuuacgaaggcuagagauguacugcgccccauuaaaaccggccaaguccgcacggucagucagggcccaacgccacaccgauaugccuaaaacacagaaguaccaacccccuaguacuaacaagaauacaaagucccagcguagaaaaggaaguacauuugaagaacggaaguag

SEQ ID NO: 42269 - RNA, 477 nt, Artificial Sequence
  derived and/or modified sequence
augggaaagauuaguagcuuaccgacccaguuguuuaagugcuguuucugcgauuuucucaaagucaaaaugcacaccaugucuuccucucaccuguucuaucucgcucucugucuucugacuuuuacaagcucugcaacugccggucccgaaacacuguguggugcugagcugguugaugcucuacaguuuguuuguggagaccgaggcuuuuauuucaacaaacccaccgguuacgguucaagcucaagacgggccccccagacagggaucguugacgaauguuguuuccguuccugcgaccugcgacgacuggagauguacugugcaccucucaagccggcuaaguccgcucgaucaguacgcgcccagagacauacagacaugccaaaaacccaaaaauaccagccgccuuccacuaacaagaacaccaagagccaacggaggaaaggaucuacuuucgaggagagaaaauag

SEQ ID NO: 42270 - protein, 137 aa, Artificial Sequence
  derived and/or modified sequence
MITPTVKMHTMSSSHLFYLALCLLTFTSSATAGPETLCGAELVDALQFVCGDRGFYFNKPTGYGSSSRRAPQTGIVDECCFRSCDLRRLEMYCAPLKPAKSARSVRAQRHTDMPKTQKEVHLKNASRGSAGNKNYRM

SEQ ID NO: 42271 - DNA, 7204 bp, Artificial Sequence
  derived and/or modified sequence
gcatacctgcctgggtgtccaaatgtaactagatgctttcacaaaccccacccacaaagcagcacatgtttttaagacttcagttttctattcacatcggcctcataatacccaccctgacctgctgtaaaagacctggaacaaacaaaaatgattacacctacagtgaagatgcacaccatgtcctcctcgcatctcttctacctggcgctgtgcctgctcaccttcaccagctctgccacggctggaccggagacgctctgcggggctgagctggtggatgctcttcagttcgtgtgtggagacaggggcttttatttcaacaagcccacagggtatggctccagcagtcggagggcgcctcagacaggcatcgtggatgagtgctgcttccggagctgtgatctaaggaggctggagatgtattgcgcacccctcaagcctgccaagtcagctcgctctgtccgtgcccagcgccacaccgacatgcccaagacccagaaggaagtacatttgaagaacgcaagtagagggagtgcaggaaacaagaactacaggatgtaggaagaccctcctgaggagtgaagagtgacatgccaccgcaggatcctttgctctgcacgagttacctgttaaactttggaacacctaccaaaaaataagtttgataacatttaaaagatgggcgtttcccccaatgaaatacacaagtaaacattccaacattgtctttaggagtgatttgcaccttgcaaaaatggtcctggagttggtagattgctgttgatcttttatcaataatgttctatagaaaagaaaaaaaaaatatatatatatatatatcttagtccctgcctctcaagagccacaaatgcatgggtgttgtatagatccagttgcactaaattcctctctgaatcttggctgctggagccattcattcagcaaccttgtctaagtggtttatgaattgtttccttatttgcacttctttctacacaactcgggctgtttgttttacagtgtctgataatcttgttagtctatacccaccacctcccttcataacctttatatttgccgaatttggcctcctcaaaagcagcagcaagtcgtcaagaagcacaccaattctaacccacaagattccatctgtggcatttgtaccaaatataagttggatgcattttattttagacacaaagctttatttttccacatcatgcttacaaaaaagaataatgcaaatagttgcaactttgaggccaatcatttttaggcatatgttttaaacatagaaagtttcttcaactcaaaagagttccttcaaatgatgagttaatgtgcaacctaattagtaactttcctctttttattttttccatatagagcactatgtaaatttagcatatcaattatacaggatatatcaaacagtatgtaaaactctgttttttagtataatggtgctattttgtagtttgttatatgaaagagtctggccaaaacggtaatacgtgaaagcaaaacaataggggaagcctggagccaaagatgacacaaggggaagggtactgaaaacaccatccatttgggaaagaaggcaaagtccccccagttatgccttccaagaggaacttcagacacaaaagtccactgatgcaaattggactggcgagtccagagaggaaactgtggaatggaaaaagcagaaggctaggaattttagcagtcctggtttctttttctcatggaagaaatgaacatctgccagctgtgtcatggactcaccactgtgtgaccttgggcaagtcacttcacctctctgtgcctcagtttcctcatctgcaaaatgggggcaatatgtcatctacctacctcaaaggggtggtataaggtttaaaaagataaagattcagattttttttaccctgggttgctgtaagggtgcaacatcagggcgcttgagttgctgagatgcaaggaattctataaataacccattcatagcatagctagagattggtgaattgaatgctcctgacatctcagttcttgtcagtgaagctatccaaataactggccaactagttgttaaaagctaacagctcaatctcttaaaacacttttcaaaatatgtgggaagcatttgattttcaatttgattttgaattctgcatttggttttatgaatacaaagataagtgaaaagagagaaaggaaaagaaaaaggagaaaaacaaagagatttctaccagtgaaaggggaattaattactctttgttagcactcactgactcttctatgcagttactacatatctagtaaaacctcgtttaatactataaataatattctattcattttgaaaaacacaatgattccttcttttctaggcaatataaggaaagtgatccaaaatttgaaatattaaaataatatctaataaaaagtcacaaagttatcttctttaacaaactttactcttattcttagctgtatatacatttttttaaaagtttgttaaaatatgcttgactagagtttccagttgaaaggcaaaaacttccatcacaacaagaaatttcccatgcctgctcagaagggtagcccctagctctctgtgaatgtgttttatccattcaactgaaaattggtatcaagaaagtccactggttagtgtactagtccatcatagcctagaaaatgatccctatctgcagatcaagattttctcattagaacaatgaattatccagcattcagatctttctagtcaccttagaactttttggttaaaagtacccaggcttgattatttcatgcaaattctatattttacattcttggaaagtctatatgaaaaacaaaaataacatcttcagtttttctcccactgggtcacctcaaggatcagaggccaggaaaaaaaaaaaaaagactccctggatctctgaatatatgcaaaaagaaggccccatttagtggagccagcaatcctgttcagtcaacaagtattttaactctcagtccaacattatttgaattgagcacctcaagcatgcttagcaatgttctaatcactatggacagatgtaaaagaaactatacatcatttttgccctctgcctgttttccagacatacaggttctgtggaataagatactggactcctcttcccaagatggcacttctttttatttcttgtccccagtgtgtaccttttaaaattattccctctcaacaaaactttataggcagtcttctgcagacttaacgtgttttctgtcatagttagatgtgataattctaagagtgtctatgacttatttccttcacttaattctatccacagtcaaaaatcccccaaggaggaaagctgaaagatgcactgccatattatctttcttaactttttccaacacataatcctctccaactggattataaataaattgaaaataactcattataccaattcactattttattttttaatgaattaaaactagaaaacaaattgatgcaaaccctggaagtcagttgattactatatactacagcagaatgactcagatttcatagaaaggagcaaccaaaatgtcacaacccaaaactttacaagctttgcttcagaattagattgctttataattcttgaatgaggcaatttcaagatatttgtaaaagaacagtaaacattggtaagaatgagctttcaactcataggcttatttccaatttaattgaccatactggatacttaggtcaaatttctgttctctcttccccaaataatattaaagtattatttgaactttttaagatgaggcagttcccctgaaaaagttaatgcagctctccatcagaatccactcttctagggatatgaaaatctcttaacacccaccctacatacacagacacacacacacacacacacacacacacacacacacacattcaccctaaggatccaatggaatactgaaaagaaatcacttccttgaaaattttattaaaaaacaaacaaacaaacaaaaagcctgtccacccttgagaatccttcctctccttggaacgtcaatgtttgtgtagatgaaaccatctcatgctctgtggctccagggtttctgttactattttatgcacttgggagaaggcttagaataaaagatgtagcacattttgctttcccatttattgtttggccagctatgccaatgtggtgctattgtttctttaagaaagtacttgactaaaaaaaaaagaaaaaaagaaaaaaaagaaagcatagacatatttttttaaagtataaaaacaacaattctatagatagatggcttaataaaatagcattaggtctatctagccaccaccacctttcaactttttatcactcacaagtagtgtactgttcaccaaattgtgaatttgggggtgcaggggcaggagttggaaattttttaaagttagaaggctccattgttttgttggctctcaaacttagcaaaattagcaatatattatccaatcttctgaacttgatcaagagcatggagaataaacgcgggaaaaaagatcttataggcaaatagaagaatttaaaagataagtaagttccttattgatttttgtgcactctgctctaaaacagatattcagcaagtggagaaaataagaacaaagagaaaaaatacatagatttacctgcaaaaaatagcttctgccaaatcccccttgggtattctttggcatttactggtttatagaagacattctcccttcacccagacatctcaaagagcagtagctctcatgaaaagcaatcactgatctcatttgggaaatgttggaaagtatttccttatgagatgggggttatctactgataaagaaagaatttatgagaaattgttgaaagagatggctaacaatctgtgaagattttttgtttcttgtttttgttttttttttttttttactttatacagtctttatgaatttcttaatgttcaaaatgacttggttcttttcttctttttttatatcagaatgaggaataataagttaaacccacatagactctttaaaactataggctagatagaaatgtatgtttgacttgttgaagctataatcagactatttaaaatgttttgctatttttaatcttaaaagattgtgctaatttattagagcagaacctgtttggctctcctcagaagaaagaatctttccattcaaatcacatggctttccaccaatattttcaaaagataaatctgatttatgcaatggcatcatttattttaaaacagaagaattgtgaaagtttatgcccctcccttgcaaagaccataaagtccagatctggtaggggggcaacaacaaaaggaaaatgttgttgattcttggttttggattttgttttgttttcaatgctagtgtttaatcctgtagtacatatttgcttattgctattttaatattttataagaccttcctgttaggtattagaaagtgatacatagatatcttttttgtgtaatttctatttaaaaaagagagaagactgtcagaagctttaagtgcatatggtacaggataaagatatcaatttaaataaccaattcctatctggaacaatgcttttgttttttaaagaaacctctcacagataagacagaggcccaggggatttttgaagctgtctttattctgcccccatcccaacccagcccttattattttagtatctgcctcagaattttatagagggctgaccaagctgaaactctagaattaaaggaacctcactgaaaacatatatttcacgtgttccctctttttttttttcctttttgtgagatggggtctcgcactgtcccccaggctggagtgcagtggcatgatctcggctcactgcaacctccacctcctgggtttaagcgattctcctgcctcagcctcctgagtagctgggattacaggcacccaccactatgcccggctaattttttggatttttaatagagacggggttttaccatgttggccaggttggtctcaaactcctgaccttgtgatttgcccgcctcagcctcccaaattgctgggattacaggcatgagccaccacaccctgcccatgtgttccctcttaatgtatgattacatggatcttaaacatgatccttctctcctcattcttcaactatctttgatggggtctttcaaggggaaaaaaatccaagcttttttaaagtaaaaaaaaaaaaagagaggacacaaaaccaaatgttactgctcaactgaaatatgagttaagatggagacagagtttctcctaataaccggagctgaattacctttcactttcaaaaacatgaccttccacaatccttagaatctgcctttttttatattactgaggcctaaaagtaaacattactcattttattttgcccaaaatgcactgatgtaaagtaggaaaaataaaaacagagctctaaaatccctttcaagccacccattgaccccactcaccaactcatagcaaagtcacttctgttaatcccttaatctgattttgtttggatatttatcttgtacccgctgctaaacacactgcaggagggactctgaaacctcaagctgtctacttacatcttttatctgtgtctgtgtatcatgaaaatgtctattcaaaatatcaaaacctttcaaatatcacgcagcttatattcagtttacataaaggccccaaataccatgtcagatctttttggtaaaagagttaatgaactatgagaattgggattacatcatgtattttgcctcatgtatttttatcacacttataggccaagtgtgataaataaacttacagacactgaattaatttcccctgctactttgaaaccagaaaataatgactggccattcgttacatctgtcttagttgaaaagcatattttttattaaattaattctgattgtatttgaaattattattcaattcacttatggcagaggaatatcaatcctaatgacttctaaaaatgtaactaattgaatcattatcttacatttactgtttaataagcatattttgaaaatgtatggctagagtgtcataataaaatggtatatctttctttagtaattacattaaaattagtcatgtttgattaattagttc

SEQ ID NO: 42272 - DNA, 414 bp, Artificial Sequence
  derived and/or modified sequence
atgatcacccccaccgtgaagatgcacaccatgagcagcagccacctgttctacctggccctgtgcctgctgaccttcaccagcagcgccaccgccggccccgagaccctgtgcggcgccgagctggtggacgccctgcagttcgtgtgcggcgacagaggcttctacttcaacaagcccaccggctacggcagcagcagcagaagagccccccagaccggcatcgtggacgagtgctgcttcagaagctgcgacctgagaagactggagatgtactgcgcccccctgaagcccgccaagagcgccagaagcgtgagagcccagagacacaccgacatgcccaagacccagaaggaggtgcacctgaagaacgccagcagaggcagcgccggcaacaagaactacagaatgtag

SEQ ID NO: 42273 - DNA, 414 bp, Artificial Sequence
  derived and/or modified sequence
atgattacgccgacagtaaaaatgcatactatgagctctagccatttgttctaccttgccctttgtctgctgaccttcacttcctctgcaaccgctggccctgagaccctttgcggcgcggagctcgtggacgccttgcagtttgtgtgtggcgaccggggattttacttcaacaagcctacaggatatggatcttcttctagacgcgcgcctcagaccggcattgtagacgagtgctgctttaggtcgtgcgatctgcggaggctggagatgtattgtgccccgctaaagccagccaaaagcgcacgaagcgtgcgagctcagaggcataccgatatgcctaaaacccaaaaagaggtgcacttgaaaaatgcatctcggggaagcgcaggcaataaaaactataggatgtag

SEQ ID NO: 42274 - DNA, 414 bp, Artificial Sequence
  derived and/or modified sequence
atgatcacccccaccgtgaagatgcacaccatgagcagcagccacctgttctacctggccctgtgcctgctgaccttcaccagcagcgccacagctggccctgagaccctgtgtggggctgagctggtggatgccctgcagtttgtgtgtggggaccggggcttctacttcaacaagcccaccggctacggcagcagcagccggcgggccccccagacaggaattgtggatgagtgctgcttccgcagctgtgacctgcggcggctggagatgtactgtgcccccctgaagccagccaagagcgcccggtctgtgcgggcccagaggcacacagacatgcccaagacccagaaggaggtgcacctgaagaatgccagccggggcagcgctggcaacaagaactacaggatgtag

SEQ ID NO: 42275 - DNA, 612 bp, Artificial Sequence
  derived and/or modified sequence
gcatacctgcctgggtgtccaaatgtaactagatgctttcacaaaccccacccacaaagcagcacatgtttttaagacttcagttttctattcacatcggcctcataatacccaccctgacctgctgtaaaagacctggaacaaacaaaaatgattacacctacagtgaagatgcacaccatgtcctcctcgcatctcttctacctggcgctgtgcctgctcaccttcaccagctctgccacggctggaccggagacgctctgcggggctgagctggtggatgctcttcagttcgtgtgtggagacaggggcttttatttcaacaagcccacagggtatggctccagcagtcggagggcgcctcagacaggcatcgtggatgagtgctgcttccggagctgtgatctaaggaggctggagatgtattgcgcacccctcaagcctgccaagtcagctcgctctgtccgtgcccagcgccacaccgacatgcccaagacccagaaggaagtacatttgaagaacgcaagtagagggagtgcaggaaacaagaactacaggatgtaggaagaccctcctgaggagtgaagagtgacatgccaccgcaggatcctt

SEQ ID NO: 42276 - DNA, 414 bp, Artificial Sequence
  derived and/or modified sequence
atgatcacccccaccgtgaagatgcacaccatgagcagcagccacctcttttacttagccttatgtttgctcactttcacatcctccgccaccgcaggacccgaaaccttatgtggcgcagaactcgtggacgctctgcagtttgtgtgcggggacagaggcttctacttcaacaagccaaccggatacggctctagttcccgcagagcacctcagacaggcatcgtcgatgaatgctgctttaggagttgcgatctccggcgactggagatgtattgcgcccctctcaagcctgcaaaatctgcaaggtcagtgagggctcagagacacaccgatatgccaaagactcaaaaggaagtgcaccttaagaacgctagccgcggcagtgcaggcaacaagaactatcgaatgtag

SEQ ID NO: 42277 - DNA, 414 bp, Artificial Sequence
  derived and/or modified sequence
atgattacccccacagtgaagatgcacacaatgagttcgtcgcacttattctacttggctctctgcttacttactttcacctctagcgccaccgcgggtcctgagacgctgtgcggcgcagagctcgttgatgctcttcagtttgtttgtggggaccggggattttattttaacaaacctaccggatatggcagcagttctcggagagccccacagacaggcatcgtggatgagtgctgcttccgtagctgcgacctgcgcaggctagaaatgtactgtgcaccgttgaaacccgctaagagcgcacgcagcgttcgcgctcaacggcacacagatatgccaaaaacacagaaggaagtacacctgaaaaatgcgagcagaggtagtgcgggaaacaagaactaccggatgtag

SEQ ID NO: 42278 - DNA, 414 bp, Artificial Sequence
  derived and/or modified sequence
atgatcacacctaccgtcaaaatgcacactatgagtagcagccatctattctaccttgctctgtgtcttctcaccttcacttcgagtgctaccgccggcccggaaactttgtgcggcgccgaattagttgacgccctccagtttgtatgcggcgaccgagggttctatttcaataagcctacaggttatggttcctcctcaaggcgtgctccacagaccggcattgtggacgagtgctgctttaggtcctgcgacctgaggagactcgagatgtattgtgcccccctcaaacccgcaaaatcagccagatcagttagagcccagcggcacaccgacatgcccaaaacccagaaagaagtgcatctcaagaacgcctccaggggctcagcagggaataagaactatcgaatgtag

SEQ ID NO: 42279 - DNA, 414 bp, Artificial Sequence
  derived and/or modified sequence
atgatcaccccaactgtaaagatgcacacgatgtccagctcacacctgttctacttggccctatgtcttttaacctttacctccagcgccacagctgggccagaaacactgtgtggcgccgagttggtcgatgccctgcagtttgtctgtggcgataggggattttatttcaataagcctaccggatacgggtccagttcaagacgcgcaccacagaccggaatcgtggatgaatgttgcttccgctcctgcgacctacgtagactcgagatgtactgcgcccctctaaagcccgccaagtcagctaggtccgttcgcgcacagagacacaccgatatgcccaagacacaaaaggaggtacatctcaagaacgcctctcgggggtctgccggaaacaaaaattacagaatgtag

SEQ ID NO: 42280 - RNA, 414 nt, Artificial Sequence
  derived and/or modified sequence
augaucacaccuaccgucaaaaugcacacuaugaguagcagccaucuauucuaccuugcucugugucuucucaccuucacuucgagugcuaccgccggcccggaaacuuugugcggcgccgaauuaguugacgcccuccaguuuguaugcggcgaccgaggguucuauuucaauaagccuacagguuaugguuccuccucaaggcgugcuccacagaccggcauuguggacgagugcugcuuuagguccugcgaccugaggagacucgagauguauugugccccccucaaacccgcaaaaucagccagaucaguuagagcccagcggcacaccgacaugcccaaaacccagaaagaagugcaucucaagaacgccuccaggggcucagcagggaauaagaacuaucgaauguag

SEQ ID NO: 42281 - RNA, 414 nt, Artificial Sequence
  derived and/or modified sequence
augaucaccccaacuguaaagaugcacacgauguccagcucacaccuguucuacuuggcccuaugucuuuuaaccuuuaccuccagcgccacagcugggccagaaacacuguguggcgccgaguuggucgaugcccugcaguuugucuguggcgauaggggauuuuauuucaauaagccuaccggauacggguccaguucaagacgcgcaccacagaccggaaucguggaugaauguugcuuccgcuccugcgaccuacguagacucgagauguacugcgccccucuaaagcccgccaagucagcuagguccguucgcgcacagagacacaccgauaugcccaagacacaaaaggagguacaucucaagaacgccucucgggggucugccggaaacaaaaauuacagaauguag

SEQ ID NO: 42282 - protein, 886 aa, Artificial Sequence
  derived and/or modified sequence
MEPPTVPSERSLSLSLPGPREGQATLKPPPQHLWRQPRTPIRIQQRGYSDSAERAERERQPHRPIERADAMDTSDRPGLRTTRMSWPSSFHGTGTGSGGAGGGSSRRFEAENGPTPSPGRSPLDSQASPGLVLHAGAATSQRRESFLYRSDSDYDMSPKTMSRNSSVTSEAHAEDLIVTPFAQVLASLRSVRSNFSLLTNVPVPSNKRSPLGGPTPVCKATLSEETCQQLARETLEELDWCLEQLETMQTYRSVSEMASHKFKRMLNRELTHLSEMSRSGNQVSEYISTTFLDKQNEVEIPSPTMKEREKQQAPRPRPSQPPPPPVPHLQPMSQITGLKKLMHSNSLNNSNIPRFGVKTDQEELLAQELENLNKWGLNIFCVSDYAGGRSLTCIMYMIFQERDLLKKFRIPVDTMVTYMLTLEDHYHADVAYHNSLHAADVLQSTHVLLATPALDAVFTDLEILAALFAAAIHDVDHPGVSNQFLINTNSELALMYNDESVLENHHLAVGFKLLQEDNCDIFQNLSKRQRQSLRKMVIDMVLATDMSKHMTLLADLKTMVETKKVTSSGVLLLDNYSDRIQVLRNMVHCADLSNPTKPLELYRQWTDRIMAEFFQQGDRERERGMEISPMCDKHTASVEKSQVGFIDYIVHPLWETWADLVHPDAQEILDTLEDNRDWYYSAIRQSPSPPPEEESRGPGHPPLPDKFQFELTLEEEEEEEISMAQIPCTAQEALTAQGLSGVEEALDATIAWEASPAQESLEVMAQEASLEAELEAVYLTQQAQSTGSAPVAPDEFSSREEFVVAVSHSSPSALALQSPLLPAWRTLSVSEHAPGLPGLPSTAAEVEAQREHQAAKRACSACAGTFGEDTSALPAPGGGGSGGDPT

SEQ ID NO: 42283 - DNA, 2661 bp, Artificial Sequence
  derived and/or modified sequence
atggagccgccgacagtgccgtctgagcgaagcctttctctgtccctgcctggtccacgggagggacaggcaacgctcaagccgccgcctcagcatctgtggaggcagccccgtaccccaatccgtatccagcagcgagggtacagcgactcggctgagagagcagagagagagcgccagcctcatcgtccaatcgagcgagccgacgccatggacaccagtgacaggccagggctgcgcaccacacggatgtcatggcccagttccttccacggcacagggactggcagtggcggtgccggagggggctcgtcacggaggttcgaagctgaaaacggtcccactccgtcacccgggcgttcgccactggactcacaggcctcccccggactggtgttgcatgcaggtgccgctacgtcccagagaagggagtcatttctttatcgatcagacagcgattacgatatgtctccgaagaccatgtcgcggaacagcagcgtaacctccgaggcccacgctgaggacctaatcgtcacccccttcgcacaagtccttgcaagtctgagatcagttagatctaacttcagtctgttgacaaacgtacctgttcccagcaacaaacgctctccgctcggcggtcccacacctgtctgcaaagccactctttcggaggagacgtgccaacagctggcccgcgagacgttggaagaacttgattggtgcctcgagcagctggagacaatgcagacgtaccggtctgtctctgagatggcctctcataaatttaaacgaatgctgaaccgcgaattgacccacctatccgaaatgagtcggtcagggaaccaggtgtccgagtatatcagcacgaccttcctggataagcaaaacgaagtagagatcccaagcccaacgatgaaagagagagagaaacagcaagcgccaaggccgcgacccagccaaccacctcctccgcccgtaccccacctccagcccatgtcccagatcacaggcctgaaaaaattgatgcacagtaattctctcaacaacagcaacatcccaaggttcggcgtcaagaccgaccaagaggaactactagcccaggaattggaaaatcttaacaagtggggcctcaatattttttgcgtctcagattacgctggggggcgaagtttgacctgcatcatgtatatgattttccaggagagggatctgctgaaaaagttccgaatcccagtggatacgatggtgacctatatgctgaccttagaggatcactaccacgcagatgtggcataccacaattccctgcacgccgctgatgttctacagtcaactcatgtgttgctcgctacacctgcacttgacgctgtcttcactgacctggagatcctggctgctctgtttgccgctgccatccatgacgttgaccatcctggagtgagcaaccagttcctgattaatacgaatagcgaactagccctcatgtataatgacgaatctgtcctagaaaatcatcatttagcggttggtttcaagctcttgcaggaggacaattgcgacatcttccaaaatcttagtaaaagacagcgccagagtcttaggaagatggtgatcgatatggtactggcaaccgacatgtccaagcatatgacactccttgcagatctgaaaaccatggttgagacaaaaaaagttacaagcagcggcgtgctgctgctggacaactactcagacagaatccaggtgcttagaaacatggttcactgcgccgatttatctaaccccacaaaacctctggagctttatcgccagtggacggacagaattatggctgagtttttccagcaaggagatagagagagagagcgaggcatggaaatctctcctatgtgtgataagcatactgctagtgtcgagaaatcccaggtgggcttcatcgactacatcgttcacccactttgggagacatgggctgatctggtgcatcctgatgctcaggagatccttgacactcttgaggacaatagggattggtactactcagccataagacagtcgccgtcgccccctccggaggaagaaagcagggggcctggtcatcccccccttccagacaagttccagttcgaattaactctggaggaagaggaagaggaagagatcagcatggctcagatcccatgtacagcccaggaagctctgaccgcccagggcctgagtggcgtggaggaagcactagatgccaccatcgcttgggaggcgtcccctgcccaggaatcactagaagttatggcccaggaggcgtctctcgaggccgaactggaggccgtgtatctgacgcagcaggcccagagcacaggctctgccccagttgccccagacgagttctcttctagagaggaattcgtcgttgccgtttcacacagctctccaagcgcgctggctctgcaaagtcctctgttacccgcctggcgtactctgtccgtctctgagcatgctcctggcttgcctggactgccttctaccgcagcagaagtagaggcccagcgagagcaccaggcagccaagcgggcgtgctctgcctgtgccggtacctttggagaagacactagtgccttgcccgcaccaggcggcggcggatctgggggtgatcctacctag

SEQ ID NO: 42284 - DNA, 2661 bp, Artificial Sequence
  derived and/or modified sequence
atggagcccccaacagtgcccagcgagaggagcctgagcctgagcctgcccggcccccgggagggccaggccaccctgaagcccccaccccagcacctgtggaggcagcccaggacccccatccgcatccagcagaggggctacagcgacagcgctgagagagctgagcgggagcggcagccccaccggcccatcgagcgggcagatgccatggacaccagtgacaggcctggcctgcggaccaccaggatgtcctggcccagcagcttccatggaactggaactggaagtggaggagctgggggcggcagcagccgccgctttgaagcagaaaatggccccacccccagccctggccgcagccccctggacagccaggccagccctggcctggtgctgcatgctggagctgccaccagccagaggcgggagagcttcctgtacagaagtgacagcgactatgacatgagccccaagaccatgagcaggaacagctctgtgaccagcgaggcccatgctgaggacctgattgtgaccccatttgcccaggtgctggccagcctgcggtctgtgcgcagcaacttcagcctgctgaccaacgtgcctgtgcccagcaacaagaggagccccctgggcggccccacccctgtgtgcaaggccaccctgtctgaggagacctgccagcagctggcccgggagaccctggaggagctggactggtgcctggagcagctggagaccatgcagacctacagatctgtgtctgagatggccagccacaagttcaagaggatgctgaaccgggagctgacccacctgtctgagatgagccgcagcggcaaccaggtgtctgagtacatcagcaccaccttcctggacaagcagaatgaggtggagatccccagccccaccatgaaggagcgggagaagcagcaggccccccggccccggcccagccagcccccacctcctcctgtgccccacctgcagcccatgagccagatcaccggcctgaagaagctgatgcacagcaacagcctgaacaacagcaacatccccaggtttggagtgaagacagaccaggaggagctgctggcccaggagctggagaacctgaacaagtggggcctgaacatcttctgtgtgtctgactatgctgggggccgcagcctgacctgcatcatgtacatgatcttccaggagcgggacctgctgaagaagttccgcatccctgtggacaccatggtgacctacatgctgaccctggaggaccactaccacgcagatgtggcctaccacaacagcctgcacgccgcagatgtgctgcagagcacccacgtgctgctggccaccccagccctggatgctgtgttcacagacctggagatcctggccgccctgtttgctgctgccatccatgatgtggaccaccctggggtgagcaaccagttcctgatcaacaccaacagcgagctggccctgatgtacaatgatgagagcgtgctggagaaccaccacctggccgtgggcttcaagctgctgcaggaggacaactgtgacatcttccagaacctgagcaagaggcagaggcagagcctgaggaagatggtgattgacatggtgctggccacagacatgagcaagcacatgaccctgctggccgacctgaagaccatggtggagaccaagaaggtgaccagcagcggcgtgctgctgctggacaactacagcgaccgcatccaggtgctgaggaacatggtgcactgtgccgacctgagcaaccccaccaagcccctggagctgtaccggcagtggacagaccgcatcatggccgagttcttccagcagggcgaccgggagcgggagcggggcatggagatcagccccatgtgtgacaagcacacagcctctgtggagaagagccaggtgggcttcatcgactacatcgtgcaccccctgtgggagacctgggccgacctggtgcacccagatgcccaggagatcctggacaccctggaggacaacagagactggtactacagcgccatccggcagagccccagccccccacctgaggaggagagccggggccctggccacccccccctgcctgacaagttccagtttgagctgaccctggaggaggaggaggaggaggagatctccatggcccagatcccctgcacagcccaggaggccctgacagcccagggcctgagcggcgtggaggaggccctggatgccaccatcgcctgggaggccagccctgcccaggagagcctggaggtgatggcccaggaggccagcctggaggccgagctggaggccgtgtacctgacccagcaggcccagagcacaggcagcgcccctgtggccccagatgagttcagcagccgggaggagtttgtggtggccgtgagccacagcagccccagcgccctggccctgcagagccccctgctgcctgcctggaggaccctgtctgtgtctgagcacgcccctggcctgcccggcctgcccagcacagctgctgaggtggaggcccagcgggagcaccaggccgccaagagggcctgcagcgcctgtgccggcaccttcggggaggacaccagcgccctgcctgcccctgggggcggcggcagcggcggggaccccacctag

SEQ ID NO: 42285 - DNA, 2661 bp, Artificial Sequence
  derived and/or modified sequence
atggagccccccaccgtgcccagcgagcggagcctgagcctgagcttaccaggtcctcgggaggggcaagccacattgaagcctccaccacagcatctctggaggcagcctagaactcctattcgtatccagcagcgtggatatagcgacagcgctgagcgggctgagagagagaggcagccccatagacctatcgaaagggccgacgccatggacacctcagaccggccaggactgcgcacaactagaatgagttggccttcatcttttcatgggactgggactggctccgggggcgcaggcggcggttcctctcgccgattcgaggccgagaatggcccaaccccatctccagggcggtctccattggattcacaagcttccccggggctggtcctgcacgcaggggccgccacctcgcaaagacgtgagtcttttctgtacagatcagattctgactacgacatgtccccaaaaacgatgtcccgcaattcaagtgttacatcagaagcccacgcagaggacctaatcgtaaccccctttgcccaagttctagcttcactacgctcagtgaggagcaatttttcgctcttgaccaatgtacctgtgcctagcaacaagagatctccactggggggccctactcccgtctgcaaagcaaccttatccgaggaaacttgtcaacagctagctcgggaaaccctcgaggaactggattggtgtctcgagcagcttgaaaccatgcagacgtaccgttctgtgagcgaaatggcctctcataaatttaaacgaatgttgaaccgagagctaacccacctgtccgaaatgtcacgaagtgggaaccaagtatctgagtacatttccacaacatttttggacaaacagaacgaggttgaaatcccttcgccgaccatgaaggagagggaaaagcaacaggctccacgccctcggccttcccagcctccaccaccacccgtgccccacttacagcccatgagccagattacagggctcaaaaaacttatgcattcaaacagcctgaacaactcaaatatacctcgcttcggcgttaagacagatcaggaagagctgctggctcaggaactcgagaatttaaacaagtggggattgaatattttttgtgtgagcgactacgccggcgggcgatccctgacatgcatcatgtatatgattttccaagaaagggatttgctaaaaaaattccggatcccagtagacaccatggtgacctatatgctcactctcgaagaccattatcatgcagatgtggcttatcacaacagtttacatgctgctgatgtcctgcagtctacacatgttcttctggccactcctgccctggatgccgtgttcaccgatcttgaaatccttgccgctcttttcgctgccgctattcacgacgtcgatcacccaggcgtgtcaaaccagttcctgattaataccaattcagagcttgccttgatgtataacgatgagtccgtgctggaaaaccatcacctggcagtgggcttcaagctcctccaggaagataattgcgatatctttcagaatttatcgaagcgacagcgtcagtccttaagaaaaatggtgatagatatggtcttagctacagatatgagcaaacacatgaccctgctcgctgacctgaagactatggtggagactaagaaggtcactagctctggggtcctgttactcgataattactcagaccgaattcaagtgttgcgtaatatggttcactgtgccgacctgtctaaccccacaaagccgctcgagctgtaccgccagtggacagaccgcataatggcggagtttttccagcagggggaccgggagcgggagaggggcatggaaattagccctatgtgcgacaagcatactgcgtccgttgagaaaagccaggtgggtttcattgattatattgtgcatccactctgggagacctgggccgatctcgtacatccagatgcccaggaaatactcgacaccctcgaagataaccgcgattggtactattccgctattcgtcaaagcccgagtcctcccccagaggaagagtctcgtgggcctggacaccctccacttccagacaaattccagtttgagttgaccctggaagaagaagaagaggaggagatctccatggcacagatcccatgtacagcccaggaagctctaacagcgcaggggctcagtggagtggaggaggccctggacgccaccatcgcctgggaggcctcacctgcacaagaatcactcgaagtgatggctcaagaggcctcccttgaggccgagctggaagccgtgtatctgacacagcaggcgcagagtaccggctccgcccctgtggctcctgacgagttctctagccgggaagagttcgtggtcgcggtcagccatagctccccatctgctctcgctctccaatctccactgctgcctgcctggagaacactgagtgtgtcagagcacgctccaggcctgccaggacttccttctaccgctgctgaagtggaggcccaaagagaacaccaggctgccaaaagggcctgctctgcctgcgcaggcacatttggggaggacacttctgcgttgcctgcaccaggaggcggtggatctgggggggatcccacgtag

SEQ ID NO: 42286 - DNA, 4777 bp, Artificial Sequence
  derived and/or modified sequence
cggccgggcgcacccgcggggccctgggctcgctggcttgcgcgcagctgagcggggtgtaggttggaagggccagggccccctggggcgcaagtgggggccggcgccatggaacccccgaccgtcccctcggaaaggagcctgtctctgtcactgcccgggccccgggagggccaggccaccctgaagcctcccccgcagcacctgtggcggcagcctcggacccccatccgtatccagcagcgcggctactccgacagcgcggagcgcgccgagcgggagcggcagccgcaccggcccatagagcgcgccgatgccatggacaccagcgaccggcccggcctgcgcacgacccgcatgtcctggccctcgtccttccatggcactggcaccggcagcggcggcgcgggcggaggcagcagcaggcgcttcgaggcagagaatgggccgacaccatctcctggccgcagccccctggactcgcaggcgagcccaggactcgtgctgcacgccggggcggccaccagccagcgccgggagtccttcctgtaccgctcagacagcgactatgacatgtcacccaagaccatgtcccggaactcatcggtcaccagcgaggcgcacgctgaagacctcatcgtaacaccatttgctcaggtgctggccagcctccggagcgtccgtagcaacttctcactcctgaccaatgtgcccgttcccagtaacaagcggtccccgctgggcggccccacccctgtctgcaaggccacgctgtcagaagaaacgtgtcagcagttggcccgggagactctggaggagctggactggtgtctggagcagctggagaccatgcagacctatcgctctgtcagcgagatggcctcgcacaagttcaaaaggatgttgaaccgtgagctcacacacctgtcagaaatgagcaggtccggaaaccaggtctcagagtacatttccacaacattcctggacaaacagaatgaagtggagatcccatcacccacgatgaaggaacgagaaaaacagcaagcgccgcgaccaagaccctcccagccgcccccgccccctgtaccacacttacagcccatgtcccaaatcacagggttgaaaaagttgatgcatagtaacagcctgaacaactctaacattccccgatttggggtgaagaccgatcaagaagagctcctggcccaagaactggagaacctgaacaagtggggcctgaacatcttttgcgtgtcggattacgctggaggccgctcactcacctgcatcatgtacatgatattccaggagcgggacctgctgaagaaattccgcatccctgtggacacgatggtgacatacatgctgacgctggaggatcactaccacgctgacgtggcctaccataacagcctgcacgcagctgacgtgctgcagtccacccacgtactgctggccacgcctgcactagatgcagtgttcacggacctggagattctcgccgccctcttcgcggctgccatccacgatgtggatcaccctggggtctccaaccagttcctcatcaacaccaattcggagctggcgctcatgtacaacgatgagtcggtgctcgagaatcaccacctggccgtgggcttcaagctgctgcaggaggacaactgcgacatcttccagaacctcagcaagcgccagcggcagagcctacgcaagatggtcatcgacatggtgctggccacggacatgtccaagcacatgaccctcctggctgacctgaagaccatggtggagaccaagaaagtgaccagctcaggggtcctcctgctagataactactccgaccgcatccaggtcctccggaacatggtgcactgtgccgacctcagcaaccccaccaagccgctggagctgtaccgccagtggacagaccgcatcatggccgagttcttccagcagggtgaccgagagcgcgagcgtggcatggaaatcagccccatgtgtgacaagcacactgcctccgtggagaagtctcaggtgggttttattgactacattgtgcacccattgtgggagacctgggcggaccttgtccacccagatgcccaggagatcttggacactttggaggacaaccgggactggtactacagcgccatccggcagagcccatctccgccacccgaggaggagtcaagggggccaggccacccacccctgcctgacaagttccagtttgagctgacgctggaggaggaagaggaggaagaaatatcaatggcccagataccgtgcacagcccaagaggcattgactgcgcagggattgtcaggagtcgaggaagctctggatgcaaccatagcctgggaggcatccccggcccaggagtcgttggaagttatggcacaggaagcatccctggaggccgagctggaggcagtgtatttgacacagcaggcacagtccacaggcagtgcacctgtggctccggatgagttctcgtcccgggaggaattcgtggttgctgtaagccacagcagcccctctgccctggctcttcaaagcccccttctccctgcttggaggaccctgtctgtttcagagcatgccccgggcctcccgggcctcccctccacggcggccgaggtggaggcccaacgagagcaccaggctgccaagagggcttgcagtgcctgcgcagggacatttggggaggacacatccgcactcccagctcctggtggcggggggtcaggtggagaccctacctgatccccagacctctgtccctgttcccctccactcctcccctcactcccctgctcccccgaccacctcctcctctgcctcaaagactcttgtcctcttgtccctcctgagaaaaaagaaaacgaaaagtggggtttttttctgttttctttttttcccctttccccctgcccccacccacggggcctttttttggaggtgggggctggggaatgaggggctgaggtcccggaagggattttatttttttgaattttaattgtaacatttttagaaaaagaacaaaaaaagaaaaaaaaaagaaagaaacacagcaactgtagatgctcctgttcctggttcccgctttccacttccaaatccctcccctcaccttcccccactgccccccaagttccaggctcagtcttccagccgcctggggagtctctacctgggcccaagcaggtgtggggcctccttctgggcttttcttctgaatttagaggatttctagaacgtggtcaggaatagccattctaggcggggctggggccagggtggggggcagtcactgtgggaggtcccagctccagcccccctctggtttgctgcctcctctcccctctaaaaaagtcttccgcttgattttgcacaatcccggcgatactcctggcgatactgactagaaagtcagggagctgggggagctgttcactttaggatacgggggtggtatggaagggagcgttcacaccgccagcctcgggcctgggatttgaggagggccctagacctcctccactctccatcccctttcccttccactttgggttcactttgaattttctccgttttttggggcagtggctctgatccactcacccccccgccccccgccccacttctagctgcttctcctcttgtttctgccttaataattcccacggccacaggcaagggggttgcagtggccgcctgcaccttggatgaggcagggccaggcgcccagaacccccatcctggccgcacccccctttccagggtcctccggaccccaccttccacactctgatcacagcccccctaccttttgccctaggaggaagcaataatggtgtataccctcattctcattcctgggcagcccttccttccaccctggcaccaaaataatttctcctccatccgtaccttgcctagcctctccctctcccccagctagtccctgagcaatacggcagacagatgcaagaccatttttctccaagccatgggggactgtttggaaggaaagccccctctctccctcctcccctcgccctcggcctggttctgcagctggaccgacctcattcatcgcctgccccctacccaattctgagcacacggtactgtagcccccagttcctccctagccttccatccctctgtccaccccagggggaggtaaccccgcactcacactcccttgatgctgtctgtacagggttcatattttgtagcgaaagtcgtttttgtcccagccggcgatcggagtgggccttttctttctttttgttcattctttacctttttttcttttctttctttcttttttgtacatactgtaaggttggtttgtaaattattctacggaggcaaaaagggaaaataaaaacttgcccttccctggctgacccagtcgggaaggtagggaaggaggtctcccgttgggagagtctctgttcctgctgtattatacaaactgtaccatagtcctgggaaaagggtggactcaccgctgttgttttatgggaagtcgtgtcatcctaggggttggggctgggcagagcctgtcccctccccccttctccaggagccagggggtgactggagagacagacccacccccaagcagggctcctctccccagggtgagcacaggacctctgtaagctgcttgtgtattgtccactttgacgatcagtcattcggtccgttgatcaataatccttcgatcttgtctccaattaaaccgaggctttcaccg

SEQ ID NO: 42287 - DNA, 2661 bp, Artificial Sequence
  derived and/or modified sequence
atggagccacccaccgttcccagtgaacgatccctgtcactaagtttacccggaccgagggaggggcaggcaaccctgaaacctcccccacagcacctctggcgacagcccagaacaccaatccgcatccagcagaggggttatagcgacagcgcagaacgggcagagcgcgagcgccaacctcatcggccaattgaacgagctgacgccatggacacctctgacagacccggactgcgcaccacacgaatgtcatggcctagcagctttcacggaaccggcactggatcaggcggagccggtggcggatcctctcgcaggttcgaggccgagaacgggcctaccccaagcccgggaagaagccctcttgatagtcaggcgagcccagggctggtcctacacgccggtgccgcaacttctcagcgcagagagagttttctgtaccgctctgactcagactacgacatgtctcccaaaactatgtcccggaattctagcgttactagcgaagcccatgccgaagacctgatcgttacaccctttgcacaggtacttgcctccctgcggagcgtacgctctaacttttctctactgactaacgtgcccgtgccttcaaataaaagaagtcccctgggagggccaactcccgtgtgtaaggctacactctcagaggagacctgtcagcagctggccagagagacgctcgaggaactggactggtgtttagaacagctggagacaatgcagacctaccggtctgtgtctgagatggctagccacaagttcaaacggatgctcaacagagaactcacccatttgtctgagatgtcaagatctggcaaccaagtctccgagtacatttctacaacattcctggacaagcagaatgaagtcgagatcccctctccaactatgaaagagcgcgaaaaacaacaggccccaagaccacgtcctagtcaacccccaccacccccagtccctcaccttcagccgatgagccagattaccggactgaagaagctaatgcattcaaatagcctgaacaattctaatatccctagattcggggtgaaaaccgaccaggaagagctgctggctcaagagctggagaatctcaataagtggggattaaacatcttctgtgtaagcgactatgccggaggcaggtctctgacgtgcattatgtatatgatcttccaggaaagagacctgctgaagaagtttcgcattcccgtggacacaatggtgacatacatgttgactttagaagaccattaccatgcagacgtggcataccataatagcctgcacgcagcagacgttcttcagagcacacacgtattgctggcaacccccgctctggacgcggtattcaccgacttagagatcctggctgcactttttgccgcagctatccacgatgtggatcacccgggtgtaagcaaccaatttttgataaacactaattctgaactggcgttaatgtacaacgacgagtctgtcctggagaaccaccatttggcggtcgggttcaagctgctccaagaggataattgcgatatattccaaaatctgtccaagcgacagcgacaaagtctccgaaagatggtcattgatatggtgctggctaccgacatgtccaagcacatgacactgttagcggatctgaagacaatggtagaaaccaaaaaagtcacttcgagtggcgtgctgctgcttgacaattatagtgaccggattcaggtcctgcgcaacatggttcattgtgccgacctctcaaatcccacaaagcccctcgaactgtatcgacagtggacggaccggatcatggccgagttctttcaacagggggatcgggaacgcgagcgcggaatggagatctcccccatgtgcgataagcacactgcttcagtcgagaaaagccaagtaggctttatcgattatattgtgcaccctctctgggagacttgggctgacctcgtgcaccccgatgcgcaggagatcctagacaccttggaagacaatcgagactggtactactccgccattcgtcaatcccccagtccccctcctgaggaggaaagcagagggcctggacacccccctctccctgataaatttcaatttgaacttaccctggaagaggaggaggaggaagagattagcatggcccaaatcccttgtacagctcaggaagccctgaccgcacagggcctgagtggagtggaggaggccctcgatgcaacaatagcttgggaggcctcccctgcccaggagtcccttgaggtcatggcacaggaagcaagtttggaggctgagttggaagcagtttatctcacacaacaggcccagtctaccggtagtgcaccagtcgcccctgatgaattttcctcccgagaggagtttgttgtcgctgtcagccatagttccccgagcgcacttgccctgcagagccccctgctccccgcatggaggaccctgtcagtgtcagaacacgcgcctggcctcccaggactgcccagcactgccgctgaggtcgaagctcagagggagcaccaagctgctaaaagggcctgttccgcgtgtgctggcacatttggagaggatacctccgccttaccagccccagggggaggaggttcagggggtgacccgacctag

SEQ ID NO: 42288 - DNA, 2661 bp, Artificial Sequence
  derived and/or modified sequence
atggagccccccaccgtgcccagcgagagaagcctgagcctgagcctgcccggccccagagagggccaggccaccctgaagccccccccccagcacctgtggagacagcccagaacccccatcagaatccagcagagaggctacagcgacagcgccgagagagccgagagagagagacagccccacagacccatcgagagagccgacgccatggacaccagcgacagacccggcctgagaaccaccagaatgagctggcccagcagcttccacggcaccggcaccggcagcggcggcgccggcggcggcagcagcagaagattcgaggccgagaacggccccacccccagccccggcagaagccccctggacagccaggccagccccggcctggtgctgcacgccggcgccgccaccagccagagaagagagagcttcctgtacagaagcgacagcgactacgacatgagccccaagaccatgagcagaaacagcagcgtgaccagcgaggcccacgccgaggacctgatcgtgacccccttcgcccaggtgctggccagcctgagaagcgtgagaagcaacttcagcctgctgaccaacgtgcccgtgcccagcaacaagagaagccccctgggcggccccacccccgtgtgcaaggccaccctgagcgaggagacctgccagcagctggccagagagaccctggaggagctggactggtgcctggagcagctggagaccatgcagacctacagaagcgtgagcgagatggccagccacaagttcaagagaatgctgaacagagagctgacccacctgagcgagatgagcagaagcggcaaccaggtgagcgagtacatcagcaccaccttcctggacaagcagaacgaggtggagatccccagccccaccatgaaggagagagagaagcagcaggcccccagacccagacccagccagcccccccccccccccgtgccccacctgcagcccatgagccagatcaccggcctgaagaagctgatgcacagcaacagcctgaacaacagcaacatccccagattcggcgtgaagaccgaccaggaggagctgctggcccaggagctggagaacctgaacaagtggggcctgaacatcttctgcgtgagcgactacgccggcggcagaagcctgacctgcatcatgtacatgatcttccaggagagagacctgctgaagaagttcagaatccccgtggacaccatggtgacctacatgctgaccctggaggaccactaccacgccgacgtggcctaccacaacagcctgcacgccgccgacgtgctgcagagcacccacgtgctgctggccacccccgccctggacgccgtgttcaccgacctggagatcctggccgccctgttcgccgccgccatccacgacgtggaccaccccggcgtgagcaaccagttcctgatcaacaccaacagcgagctggccctgatgtacaacgacgagagcgtgctggagaaccaccacctggccgtgggcttcaagctgctgcaggaggacaactgcgacatcttccagaacctgagcaagagacagagacagagcctgagaaagatggtgatcgacatggtgctggccaccgacatgagcaagcacatgaccctgctggccgacctgaagaccatggtggagaccaagaaggtgaccagcagcggcgtgctgctgctggacaactacagcgacagaatccaggtgctgagaaacatggtgcactgcgccgacctgagcaaccccaccaagcccctggagctgtacagacagtggaccgacagaatcatggccgagttcttccagcagggcgacagagagagagagagaggcatggagatcagccccatgtgcgacaagcacaccgccagcgtggagaagagccaggtgggcttcatcgactacatcgtgcaccccctgtgggagacctgggccgacctggtgcaccccgacgcccaggagatcctggacaccctggaggacaacagagactggtactacagcgccatcagacagagccccagccccccccccgaggaggagagcagaggccccggccacccccccctgcccgacaagttccagttcgagctgaccctggaggaggaggaggaggaggagatcagcatggcccagatcccctgcaccgcccaggaggccctgaccgcccagggcctgagcggcgtggaggaggccctggacgccaccatcgcctgggaggccagccccgcccaggagagcctggaggtgatggcccaggaggccagcctggaggccgagctggaggccgtgtacctgacccagcaggcccagagcaccggcagcgcccccgtggcccccgacgagttcagcagcagagaggagttcgtggtggccgtgagccacagcagccccagcgccctggccctgcagagccccctgctgcccgcctggagaaccctgagcgtgagcgagcacgcccccggcctgcccggcctgcccagcaccgccgccgaggtggaggcccagagagagcaccaggccgccaagagagcctgcagcgcctgcgccggcaccttcggcgaggacaccagcgccctgcccgcccccggcggcggcggcagcggcggcgaccccacctag

SEQ ID NO: 42289 - protein, 860 aa, Artificial Sequence
  derived and/or modified sequence
MARPRGLGRIPELQLVAFPVAVAAEDEAFLPEPLAPRAPRRPRSPPSSPVFFASPSPTFRRRLRLLRSCQDLGRQAWAGAGFEAENGPTPSPGRSPLDSQASPGLVLHAGAATSQRRESFLYRSDSDYDMSPKTMSRNSSVTSEAHAEDLIVTPFAQVLASLRSVRSNFSLLTNVPVPSNKRSPLGGPTPVCKATLSEETCQQLARETLEELDWCLEQLETMQTYRSVSEMASHKFKRMLNRELTHLSEMSRSGNQVSEYISTTFLDKQNEVEIPSPTMKEREKQQAPRPRPSQPPPPPVPHLQPMSQITGLKKLMHSNSLNNSNIPRFGVKTDQEELLAQELENLNKWGLNIFCVSDYAGGRSLTCIMYMIFQERDLLKKFRIPVDTMVTYMLTLEDHYHADVAYHNSLHAADVLQSTHVLLATPALDAVFTDLEILAALFAAAIHDVDHPGVSNQFLINTNSELALMYNDESVLENHHLAVGFKLLQEDNCDIFQNLSKRQRQSLRKMVIDMVLATDMSKHMTLLADLKTMVETKKVTSSGVLLLDNYSDRIQVLRNMVHCADLSNPTKPLELYRQWTDRIMAEFFQQGDRERERGMEISPMCDKHTASVEKSQVGFIDYIVHPLWETWADLVHPDAQEILDTLEDNRDWYYSAIRQSPSPPPEEESRGPGHPPLPDKFQFELTLEEEEEEEISMAQIPCTAQEALTAQGLSGVEEALDATIAWEASPAQESLEVMAQEASLEAELEAVYLTQQAQSTGSAPVAPDEFSSREEFVVAVSHSSPSALALQSPLLPAWRTLSVSEHAPGLPGLPSTAAEVEAQREHQAAKRACSACAGTFGEDTSALPAPGGGGSGGDPT

SEQ ID NO: 42290 - DNA, 2583 bp, Artificial Sequence
  derived and/or modified sequence
atggcaaggccacgcggccttggtcggatcccagaactgcagctggtggccttccccgtagccgtggctgcggaggacgaggcttttttgcccgagccgttggcacccagagcccctagacgtccccggtcgccccccagctcgcccgtgttcttcgccagcccctcccctacctttaggcgaaggttaaggttacttagatcttgccaggatcttggcagacaggcatgggctggcgcggggttcgaggcagagaatggccccactccttcccccggccggtcccctctagattctcaggcatctcccggactagtcctccacgcaggcgctgctacctctcagagacgagaatcctttctttaccgctcggactccgactacgacatgagtccaaagacaatgtcacgcaactcttcggtgaccagtgaagcccatgccgaggacctgatcgtgacccctttcgcccaggtgctggcgagtttaagatccgttagatccaactttagcctcctgaccaacgtgccagtcccaagcaacaaaagaagcccactcggaggacctactcccgtgtgcaaagcaactctctccgaagaaacctgccagcagttggcccgagagacactggaggaattggactggtgcctagagcagctcgaaaccatgcagacataccggtccgtgtccgagatggccagccacaagttcaaacgcatgctcaaccgagaactgacacatctcagcgagatgagcaggagcggtaaccaggtgtctgaatatatatctaccacctttttggataaacagaacgaagtggaaatcccttccccaaccatgaaagaacgtgagaaacaacaggctcccaggccccgtccaagtcagccaccaccacctccggtaccccatcttcagccgatgtcacagatcactggtctgaagaaacttatgcatagcaatagcctgaataatagcaacatcccccgctttggcgttaagaccgatcaggaggagctcctggcccaggagctcgagaatctcaataaatggggactgaacattttttgcgtgagcgattatgccggcggacgtagtcttacctgtatcatgtatatgatttttcaagagcgcgacctgctaaaaaagttcaggattcccgtcgacaccatggtcacctacatgctgaccctggaggatcattatcatgctgacgtcgcataccataattcactccacgccgccgatgttctccagtcaacacacgtgctcctcgcgacgccagctttggatgccgtcttcacagatcttgaaatcttggccgcactcttcgctgccgctatacatgacgtggatcaccctggtgtatctaaccagtttctgatcaataccaacagcgagctggccctgatgtataacgacgaaagtgtgctggagaatcaccacctagccgtaggcttcaaactgctccaggaagacaattgcgatatcttccagaacctttcaaagagacagcgtcagtccctgcgaaaaatggtgattgatatggttctggctactgacatgagcaaacacatgaccctgctcgcagatctcaaaaccatggtcgagacaaagaaagttacaagttctggggttctgctcctcgataattatagtgataggatccaggtattgcgaaatatggtccactgtgcagatctgagcaatcccaccaaaccgttggagctgtacagacagtggaccgatcgaattatggccgagttctttcagcagggcgatcgagagagggaacgcggcatggaaattagcccgatgtgcgataaacacactgctagcgtggagaaaagtcaagtgggtttcatagactacatcgtgcaccctctgtgggagacttgggccgatcttgtgcaccccgatgctcaggagatcttggacaccttggaggacaatagagattggtattattcggctatcaggcagtctccatccccccctccggaagaggagagtagggggcccgggcatccccctctgcctgacaaattccaatttgagcttaccctagaagaagaagaggaggaagagatttccatggctcagattccctgcacggcacaggaggctttgaccgcacagggcctgagtggtgtggaggaggctctagatgccacaattgcttgggaggccagccccgcccaagagagcctggaggtcatggctcaagaagctagtctggaagctgagctcgaggcagtttatctgacccaacaggcacaatccacgggtagtgcacctgttgctcccgatgagttttcctcccgcgaggaattcgtcgtggccgtatcacactctagcccctcagcactggcactgcagagtccactgttgcccgcctggcgcacactgtccgttagtgagcacgcgcctggattgcccggactgcccagtacagccgcagaggtggaagcacagagagaacaccaagcggccaagcgtgcctgctcagcttgcgccggcaccttcggggaggatacctccgctctcccggcccccggtggcggcggcagcggaggcgaccctacctag

SEQ ID NO: 42291 - DNA, 2583 bp, Artificial Sequence
  derived and/or modified sequence
atggcccggccccggggcctgggccgcatccctgagctgcagctggtggccttccctgtggccgtggccgcagaagatgaggccttcctgcctgagcccctggccccccgggccccccggcggcccaggagcccccccagcagccctgtgttctttgccagccccagccccaccttcagaagaaggctgcggctgctgcggagctgccaggacctgggccggcaggcctgggccggggccggctttgaagcagaaaatggccccacccccagccctggccgcagccccctggacagccaggccagccctggcctggtgctgcatgctggagctgccaccagccagaggcgggagagcttcctgtacagaagtgacagcgactatgacatgagccccaagaccatgagcaggaacagctctgtgaccagcgaggcccatgctgaggacctgattgtgaccccatttgcccaggtgctggccagcctgcggtctgtgcgcagcaacttcagcctgctgaccaacgtgcctgtgcccagcaacaagaggagccccctgggcggccccacccctgtgtgcaaggccaccctgtctgaggagacctgccagcagctggcccgggagaccctggaggagctggactggtgcctggagcagctggagaccatgcagacctacagatctgtgtctgagatggccagccacaagttcaagaggatgctgaaccgggagctgacccacctgtctgagatgagccgcagcggcaaccaggtgtctgagtacatcagcaccaccttcctggacaagcagaatgaggtggagatccccagccccaccatgaaggagcgggagaagcagcaggccccccggccccggcccagccagcccccacctcctcctgtgccccacctgcagcccatgagccagatcaccggcctgaagaagctgatgcacagcaacagcctgaacaacagcaacatccccaggtttggagtgaagacagaccaggaggagctgctggcccaggagctggagaacctgaacaagtggggcctgaacatcttctgtgtgtctgactatgctgggggccgcagcctgacctgcatcatgtacatgatcttccaggagcgggacctgctgaagaagttccgcatccctgtggacaccatggtgacctacatgctgaccctggaggaccactaccacgcagatgtggcctaccacaacagcctgcacgccgcagatgtgctgcagagcacccacgtgctgctggccaccccagccctggatgctgtgttcacagacctggagatcctggccgccctgtttgctgctgccatccatgatgtggaccaccctggggtgagcaaccagttcctgatcaacaccaacagcgagctggccctgatgtacaatgatgagagcgtgctggagaaccaccacctggccgtgggcttcaagctgctgcaggaggacaactgtgacatcttccagaacctgagcaagaggcagaggcagagcctgaggaagatggtgattgacatggtgctggccacagacatgagcaagcacatgaccctgctggccgacctgaagaccatggtggagaccaagaaggtgaccagcagcggcgtgctgctgctggacaactacagcgaccgcatccaggtgctgaggaacatggtgcactgtgccgacctgagcaaccccaccaagcccctggagctgtaccggcagtggacagaccgcatcatggccgagttcttccagcagggcgaccgggagcgggagcggggcatggagatcagccccatgtgtgacaagcacacagcctctgtggagaagagccaggtgggcttcatcgactacatcgtgcaccccctgtgggagacctgggccgacctggtgcacccagatgcccaggagatcctggacaccctggaggacaacagagactggtactacagcgccatccggcagagccccagccccccacctgaggaggagagccggggccctggccacccccccctgcctgacaagttccagtttgagctgaccctggaggaggaggaggaggaggagatctccatggcccagatcccctgcacagcccaggaggccctgacagcccagggcctgagcggcgtggaggaggccctggatgccaccatcgcctgggaggccagccctgcccaggagagcctggaggtgatggcccaggaggccagcctggaggccgagctggaggccgtgtacctgacccagcaggcccagagcacaggcagcgcccctgtggccccagatgagttcagcagccgggaggagtttgtggtggccgtgagccacagcagccccagcgccctggccctgcagagccccctgctgcctgcctggaggaccctgtctgtgtctgagcacgcccctggcctgcccggcctgcccagcacagctgctgaggtggaggcccagcgggagcaccaggccgccaagagggcctgcagcgcctgtgccggcaccttcggggaggacaccagcgccctgcctgcccctgggggcggcggcagcggcggggaccccacctag

SEQ ID NO: 42292 - DNA, 2583 bp, Artificial Sequence
  derived and/or modified sequence
atggcccggccccggggcctgggccggatccccgagctgcagctggtggcctttcctgtggccgtagctgccgaagacgaagcttttctaccagagcctctggcacctcgcgctccacggcgacccaggtctccccccagcagtcccgtcttttttgcctccccgtctcccacattccgacggcgacttcgacttctgcgctcatgtcaggatctcggccggcaagcgtgggcaggcgcagggttcgaggctgaaaatggcccaaccccatcgccagggcgaagcccacttgatagtcaggcatctccaggactcgtcctacacgccggggctgctaccagccagaggcgggagtcgtttctctaccggtctgattccgactacgacatgtccccaaagactatgtcacgcaacagtagcgtaacatctgaagcacacgcagaggacttgattgtcaccccctttgcacaggttctagcctctcttagatccgtgcgttcaaatttttcactgctgacgaacgtgcccgtgcccagtaataaacggagcccactgggcggacccacccctgtgtgcaaagccacattaagcgaggaaacatgtcagcagctggcacgcgagactttggaggaacttgactggtgtctggagcagctagagactatgcagacatatcggtccgtgtctgagatggcctctcataaattcaagagaatgctgaatagggagctcactcacttgagtgagatgagcagatccggtaatcaggtgtcagagtatatctccaccaccttcctggacaaacagaatgaggtggaaatccctagccccacaatgaaggagcgggagaagcagcaggcaccaagaccacggccatcacagccaccgcccccacctgtgccacacctccagccaatgtctcaaatcaccggcctgaagaagctcatgcacagcaactctctcaataattctaatatccccagatttggtgttaagaccgaccaggaggagttactggctcaggagcttgaaaaccttaataagtggggcttaaatattttctgtgtcagtgattacgcaggaggccgatccctgacttgcattatgtacatgatcttccaggaacgggatcttctaaaaaagttcaggattcctgttgacacaatggtgacatatatgcttacattggaggatcactaccacgccgatgtggcttatcataactccctccacgcggctgacgtgctccagagcacccacgtcttgttagcaacgcccgcgctcgacgctgtatttacagacctggagatcctagccgccctgtttgccgccgctatccacgatgtagatcatcctggtgtcagcaaccagttcctaattaatactaactctgagctggcactcatgtataacgatgagtcggtactggaaaaccaccatctagcggtaggtttcaaactcctacaggaggacaattgcgatatctttcaaaatctgagcaaaaggcagcgccagtcccttcgaaaaatggtgatagatatggtgcttgctacagacatgtctaagcacatgaccttgttggctgacctgaagacaatggttgaaactaagaaggtgaccagttcaggagtgctgctcctggataattatagcgaccgcattcaggtgctgagaaacatggtgcactgtgccgatctgtctaatcccaccaaacctctggagctgtaccgccagtggaccgataggattatggccgaattttttcagcaaggagacagggagagggagcgaggcatggaaattagtcctatgtgcgacaaacataccgcctcagtagagaaaagccaggtgggtttcatcgactacatcgtgcacccactttgggaaacctgggctgacctcgtgcacccggatgcccaggagatattagacaccctcgaagataatcgggattggtattactctgccattagacagtctcctagcccccccccggaggaggaatcacgcgggcctggtcaccctcctctccctgataagtttcagttcgagctgaccctcgaagaggaggaagaggaggagatctccatggctcagataccatgtaccgcacaagaggcccttacagcacaagggctttccggagtggaggaagctttggacgccactattgcctgggaggccagccccgcccaagaatcactcgaggtcatggctcaggaggcaagcctggaggctgaactggaggctgtgtacctcacccagcaggcgcagagcactgggtccgcccctgttgccccagacgaattctcctcaagagaggaattcgtcgtggctgtgagccactcctcccctagcgcgctggccctgcaatcccctctgctacctgcctggcgcactctgtcagtgagtgaacatgcacctggtctgcctgggcttccgagtacagctgcggaggtcgaagcccagcgagagcatcaggctgccaaacgcgcatgcagcgcctgcgccggcaccttcggggaggatacaagcgctctgcctgccccgggtgggggtgggtctggaggagaccctacgtag

SEQ ID NO: 42293 - DNA, 4591 bp, Artificial Sequence
  derived and/or modified sequence
atggcgcggccgcgcggcctaggccgcatcccggagctgcaactggtggccttcccggtggcggtggcggctgaggacgaggcgttcctgcccgagcccctggccccgcgcgcgccccgccgcccgcgttcgccgccctcctcgcccgtcttcttcgccagcccgtccccaactttccgcagacgccttcggcttctccgcagctgccaggatttgggccgccaggcttgggctggggctggcttcgaggcagagaatgggccgacaccatctcctggccgcagccccctggactcgcaggcgagcccaggactcgtgctgcacgccggggcggccaccagccagcgccgggagtccttcctgtaccgctcagacagcgactatgacatgtcacccaagaccatgtcccggaactcatcggtcaccagcgaggcgcacgctgaagacctcatcgtaacaccatttgctcaggtgctggccagcctccggagcgtccgtagcaacttctcactcctgaccaatgtgcccgttcccagtaacaagcggtccccgctgggcggccccacccctgtctgcaaggccacgctgtcagaagaaacgtgtcagcagttggcccgggagactctggaggagctggactggtgtctggagcagctggagaccatgcagacctatcgctctgtcagcgagatggcctcgcacaagttcaaaaggatgttgaaccgtgagctcacacacctgtcagaaatgagcaggtccggaaaccaggtctcagagtacatttccacaacattcctggacaaacagaatgaagtggagatcccatcacccacgatgaaggaacgagaaaaacagcaagcgccgcgaccaagaccctcccagccgcccccgccccctgtaccacacttacagcccatgtcccaaatcacagggttgaaaaagttgatgcatagtaacagcctgaacaactctaacattccccgatttggggtgaagaccgatcaagaagagctcctggcccaagaactggagaacctgaacaagtggggcctgaacatcttttgcgtgtcggattacgctggaggccgctcactcacctgcatcatgtacatgatattccaggagcgggacctgctgaagaaattccgcatccctgtggacacgatggtgacatacatgctgacgctggaggatcactaccacgctgacgtggcctaccataacagcctgcacgcagctgacgtgctgcagtccacccacgtactgctggccacgcctgcactagatgcagtgttcacggacctggagattctcgccgccctcttcgcggctgccatccacgatgtggatcaccctggggtctccaaccagttcctcatcaacaccaattcggagctggcgctcatgtacaacgatgagtcggtgctcgagaatcaccacctggccgtgggcttcaagctgctgcaggaggacaactgcgacatcttccagaacctcagcaagcgccagcggcagagcctacgcaagatggtcatcgacatggtgctggccacggacatgtccaagcacatgaccctcctggctgacctgaagaccatggtggagaccaagaaagtgaccagctcaggggtcctcctgctagataactactccgaccgcatccaggtcctccggaacatggtgcactgtgccgacctcagcaaccccaccaagccgctggagctgtaccgccagtggacagaccgcatcatggccgagttcttccagcagggtgaccgagagcgcgagcgtggcatggaaatcagccccatgtgtgacaagcacactgcctccgtggagaagtctcaggtgggttttattgactacattgtgcacccattgtgggagacctgggcggaccttgtccacccagatgcccaggagatcttggacactttggaggacaaccgggactggtactacagcgccatccggcagagcccatctccgccacccgaggaggagtcaagggggccaggccacccacccctgcctgacaagttccagtttgagctgacgctggaggaggaagaggaggaagaaatatcaatggcccagataccgtgcacagcccaagaggcattgactgcgcagggattgtcaggagtcgaggaagctctggatgcaaccatagcctgggaggcatccccggcccaggagtcgttggaagttatggcacaggaagcatccctggaggccgagctggaggcagtgtatttgacacagcaggcacagtccacaggcagtgcacctgtggctccggatgagttctcgtcccgggaggaattcgtggttgctgtaagccacagcagcccctctgccctggctcttcaaagcccccttctccctgcttggaggaccctgtctgtttcagagcatgccccgggcctcccgggcctcccctccacggcggccgaggtggaggcccaacgagagcaccaggctgccaagagggcttgcagtgcctgcgcagggacatttggggaggacacatccgcactcccagctcctggtggcggggggtcaggtggagaccctacctgatccccagacctctgtccctgttcccctccactcctcccctcactcccctgctcccccgaccacctcctcctctgcctcaaagactcttgtcctcttgtccctcctgagaaaaaagaaaacgaaaagtggggtttttttctgttttctttttttcccctttccccctgcccccacccacggggcctttttttggaggtgggggctggggaatgaggggctgaggtcccggaagggattttatttttttgaattttaattgtaacatttttagaaaaagaacaaaaaaagaaaaaaaaaagaaagaaacacagcaactgtagatgctcctgttcctggttcccgctttccacttccaaatccctcccctcaccttcccccactgccccccaagttccaggctcagtcttccagccgcctggggagtctctacctgggcccaagcaggtgtggggcctccttctgggcttttcttctgaatttagaggatttctagaacgtggtcaggaatagccattctaggcggggctggggccagggtggggggcagtcactgtgggaggtcccagctccagcccccctctggtttgctgcctcctctcccctctaaaaaagtcttccgcttgattttgcacaatcccggcgatactcctggcgatactgactagaaagtcagggagctgggggagctgttcactttaggatacgggggtggtatggaagggagcgttcacaccgccagcctcgggcctgggatttgaggagggccctagacctcctccactctccatcccctttcccttccactttgggttcactttgaattttctccgttttttggggcagtggctctgatccactcacccccccgccccccgccccacttctagctgcttctcctcttgtttctgccttaataattcccacggccacaggcaagggggttgcagtggccgcctgcaccttggatgaggcagggccaggcgcccagaacccccatcctggccgcacccccctttccagggtcctccggaccccaccttccacactctgatcacagcccccctaccttttgccctaggaggaagcaataatggtgtataccctcattctcattcctgggcagcccttccttccaccctggcaccaaaataatttctcctccatccgtaccttgcctagcctctccctctcccccagctagtccctgagcaatacggcagacagatgcaagaccatttttctccaagccatgggggactgtttggaaggaaagccccctctctccctcctcccctcgccctcggcctggttctgcagctggaccgacctcattcatcgcctgccccctacccaattctgagcacacggtactgtagcccccagttcctccctagccttccatccctctgtccaccccagggggaggtaaccccgcactcacactcccttgatgctgtctgtacagggttcatattttgtagcgaaagtcgtttttgtcccagccggcgatcggagtgggccttttctttctttttgttcattctttacctttttttcttttctttctttcttttttgtacatactgtaaggttggtttgtaaattattctacggaggcaaaaagggaaaataaaaacttgcccttccctggctgacccagtcgggaaggtagggaaggaggtctcccgttgggagagtctctgttcctgctgtattatacaaactgtaccatagtcctgggaaaagggtggactcaccgctgttgttttatgggaagtcgtgtcatcctaggggttggggctgggcagagcctgtcccctccccccttctccaggagccagggggtgactggagagacagacccacccccaagcagggctcctctccccagggtgagcacaggacctctgtaagctgcttgtgtattgtccactttgacgatcagtcattcggtccgttgatcaataatccttcgatcttgtctccaattaaaccgaggctttcaccg

SEQ ID NO: 42294 - DNA, 2583 bp, Artificial Sequence
  derived and/or modified sequence
atggcaagaccaagaggactgggcaggatccctgaattgcaactggtggcttttcccgttgcagtcgcagcagaagatgaagcctttttgcctgagccacttgctccccgagccccacgccgtccaaggagccccccatctagtccggtgtttttcgcttctccatcccccacattccgccgtcggttgcgcttgctacgctcctgccaggacctgggcaggcaggcttgggccggtgcaggattcgaggcagaaaacggcccaacacccagtcccggtagatcccctcttgactcccaggcctctcccggactggtgctgcatgctggtgcagccacttctcagcggagggagtctttcttgtacaggagtgattccgattatgatatgtcacctaagactatgtcgaggaactccagcgtcaccagcgaggcccatgccgaggatctcatagtgactccgttcgcgcaagtcttggcgtccctccgtagcgttcggagcaacttttccttgctcaccaacgttcccgttccatccaacaaaagatctcctctgggcggtcctacccctgtatgcaaagctactctgagtgaggaaacgtgccaacagctggcccgtgagacacttgaagagttggattggtgcctcgagcagctggagacgatgcagacatatcgttccgtgagcgaaatggcgagccataaattcaagaggatgctgaatcgtgaactcacccatttgagcgagatgtcccgctctggtaaccaagtgagcgaatacatttcaaccaccttcctggataagcaaaacgaggttgagataccttcaccaaccatgaaagaacgggaaaaacagcaggctccacggcctcggccatctcaacctccacctccacccgttccacatctccagcccatgtcccagattaccggcctcaaaaaactcatgcacagcaacagccttaacaactccaacataccccgattcggagttaaaactgaccaggaagagttgctggcgcaggaacttgagaacctgaataaatggggactgaacattttctgtgtttctgattatgccggagggagatccttgacatgtataatgtacatgatcttccaagagagagatctgcttaaaaagttccgtattccggtcgatacaatggtgacatatatgctgacactggaggaccactatcatgcggacgtggcttatcataacagcctgcacgctgccgacgtgcttcagtcgacccacgtattgttggccactcccgctctggacgccgtcttcacagacctggaaatcttggcagctttattcgcagctgccattcacgatgtggaccaccctggtgttagtaatcagttcctgattaataccaactccgagctggcgctgatgtacaatgacgagtccgtgctggaaaaccaccacctggcagtgggttttaagctgcttcaggaggacaactgcgatatatttcagaacctttcaaagcgccagcgacaatcactgcgaaaaatggttatcgatatggtgttggcaactgatatgagtaagcacatgactctgctggccgacctgaagacaatggtcgagactaaaaaggtgacatcttctggcgtgttactgctcgacaattattccgaccgaatacaggttctaagaaatatggtacattgcgctgacctctccaatccgaccaaacccttggagctctatcggcagtggacagacaggattatggcagaattttttcagcagggcgatagagaacgagaacgtggtatggaaataagccctatgtgtgataagcacaccgcctccgtggagaagtcccaggtaggtttcatcgattacatcgtgcaccctctgtgggagacctgggcagatctcgtacatcctgacgcacaggagatcctggacactcttgaagataaccgggattggtattatagcgcaattaggcagtccccaagtccgcctccagaagaggagagccggggacctgggcatcccccactgccggataagtttcaatttgaactgacgttggaggaggaggaggaggaagaaatcagtatggcgcaaatcccctgcactgcccaggaggccctgaccgcccaaggactctcgggcgtggaggaggccctggatgccactattgcctgggaggcgagcccggctcaggaaagcctggaagtcatggcccaagaagctagcctggaggccgagcttgaggcagtttatttgactcagcaggcacagagcaccgggagcgctccagtggcccctgatgagttttcttcccgagaagagttcgtcgtggccgtgtcacattcatctcctagcgccttagcacttcaaagtcccctgctgcccgcttggcgcactttgagcgttagtgaacacgccccaggactccccggtttgccttcaaccgcagccgaggtcgaagcacaacgcgagcaccaggctgccaagcgcgcatgcagcgcttgcgcagggacttttggtgaagacaccagcgccttgcctgcccctggtggcggtgggagtggcggagaccctacttag

SEQ ID NO: 42295 - DNA, 2583 bp, Artificial Sequence
  derived and/or modified sequence
atggccagacccagaggcctgggcagaatccccgagctgcagctggtggccttccccgtggccgtggccgccgaggacgaggccttcctgcccgagcccctggcccccagagcccccagaagacccagaagcccccccagcagccccgtgttcttcgccagccccagccccaccttcagaagaagactgagactgctgagaagctgccaggacctgggcagacaggcctgggccggcgccggcttcgaggccgagaacggccccacccccagccccggcagaagccccctggacagccaggccagccccggcctggtgctgcacgccggcgccgccaccagccagagaagagagagcttcctgtacagaagcgacagcgactacgacatgagccccaagaccatgagcagaaacagcagcgtgaccagcgaggcccacgccgaggacctgatcgtgacccccttcgcccaggtgctggccagcctgagaagcgtgagaagcaacttcagcctgctgaccaacgtgcccgtgcccagcaacaagagaagccccctgggcggccccacccccgtgtgcaaggccaccctgagcgaggagacctgccagcagctggccagagagaccctggaggagctggactggtgcctggagcagctggagaccatgcagacctacagaagcgtgagcgagatggccagccacaagttcaagagaatgctgaacagagagctgacccacctgagcgagatgagcagaagcggcaaccaggtgagcgagtacatcagcaccaccttcctggacaagcagaacgaggtggagatccccagccccaccatgaaggagagagagaagcagcaggcccccagacccagacccagccagcccccccccccccccgtgccccacctgcagcccatgagccagatcaccggcctgaagaagctgatgcacagcaacagcctgaacaacagcaacatccccagattcggcgtgaagaccgaccaggaggagctgctggcccaggagctggagaacctgaacaagtggggcctgaacatcttctgcgtgagcgactacgccggcggcagaagcctgacctgcatcatgtacatgatcttccaggagagagacctgctgaagaagttcagaatccccgtggacaccatggtgacctacatgctgaccctggaggaccactaccacgccgacgtggcctaccacaacagcctgcacgccgccgacgtgctgcagagcacccacgtgctgctggccacccccgccctggacgccgtgttcaccgacctggagatcctggccgccctgttcgccgccgccatccacgacgtggaccaccccggcgtgagcaaccagttcctgatcaacaccaacagcgagctggccctgatgtacaacgacgagagcgtgctggagaaccaccacctggccgtgggcttcaagctgctgcaggaggacaactgcgacatcttccagaacctgagcaagagacagagacagagcctgagaaagatggtgatcgacatggtgctggccaccgacatgagcaagcacatgaccctgctggccgacctgaagaccatggtggagaccaagaaggtgaccagcagcggcgtgctgctgctggacaactacagcgacagaatccaggtgctgagaaacatggtgcactgcgccgacctgagcaaccccaccaagcccctggagctgtacagacagtggaccgacagaatcatggccgagttcttccagcagggcgacagagagagagagagaggcatggagatcagccccatgtgcgacaagcacaccgccagcgtggagaagagccaggtgggcttcatcgactacatcgtgcaccccctgtgggagacctgggccgacctggtgcaccccgacgcccaggagatcctggacaccctggaggacaacagagactggtactacagcgccatcagacagagccccagccccccccccgaggaggagagcagaggccccggccacccccccctgcccgacaagttccagttcgagctgaccctggaggaggaggaggaggaggagatcagcatggcccagatcccctgcaccgcccaggaggccctgaccgcccagggcctgagcggcgtggaggaggccctggacgccaccatcgcctgggaggccagccccgcccaggagagcctggaggtgatggcccaggaggccagcctggaggccgagctggaggccgtgtacctgacccagcaggcccagagcaccggcagcgcccccgtggcccccgacgagttcagcagcagagaggagttcgtggtggccgtgagccacagcagccccagcgccctggccctgcagagccccctgctgcccgcctggagaaccctgagcgtgagcgagcacgcccccggcctgcccggcctgcccagcaccgccgccgaggtggaggcccagagagagcaccaggccgccaagagagcctgcagcgcctgcgccggcaccttcggcgaggacaccagcgccctgcccgcccccggcggcggcggcagcggcggcgaccccacctag

SEQ ID NO: 42296 - protein, 102 aa, Artificial Sequence
  derived and/or modified sequence
MVETKKVTSSGVLLLDNYSDRIQVLRNMVHCADLSNPTKPLELYRQWTDRIMAEFFQQGDRERERGMEISPMCDKHTASVEKSQVGFIDYIVHPLWETWADL

SEQ ID NO: 42297 - protein, 825 aa, Artificial Sequence
  derived and/or modified sequence
MRSGAAPRARPRPPALALPPTGPESLTHFPFSDEDTRRHPPGRSVSFEAENGPTPSPGRSPLDSQASPGLVLHAGAATSQRRESFLYRSDSDYDMSPKTMSRNSSVTSEAHAEDLIVTPFAQVLASLRSVRSNFSLLTNVPVPSNKRSPLGGPTPVCKATLSEETCQQLARETLEELDWCLEQLETMQTYRSVSEMASHKFKRMLNRELTHLSEMSRSGNQVSEYISTTFLDKQNEVEIPSPTMKEREKQQAPRPRPSQPPPPPVPHLQPMSQITGLKKLMHSNSLNNSNIPRFGVKTDQEELLAQELENLNKWGLNIFCVSDYAGGRSLTCIMYMIFQERDLLKKFRIPVDTMVTYMLTLEDHYHADVAYHNSLHAADVLQSTHVLLATPALDAVFTDLEILAALFAAAIHDVDHPGVSNQFLINTNSELALMYNDESVLENHHLAVGFKLLQEDNCDIFQNLSKRQRQSLRKMVIDMVLATDMSKHMTLLADLKTMVETKKVTSSGVLLLDNYSDRIQVLRNMVHCADLSNPTKPLELYRQWTDRIMAEFFQQGDRERERGMEISPMCDKHTASVEKSQVGFIDYIVHPLWETWADLVHPDAQEILDTLEDNRDWYYSAIRQSPSPPPEEESRGPGHPPLPDKFQFELTLEEEEEEEISMAQIPCTAQEALTAQGLSGVEEALDATIAWEASPAQESLEVMAQEASLEAELEAVYLTQQAQSTGSAPVAPDEFSSREEFVVAVSHSSPSALALQSPLLPAWRTLSVSEHAPGLPGLPSTAAEVEAQREHQAAKRACSACAGTFGEDTSALPAPGGGGSGGDPT

SEQ ID NO: 42298 - DNA, 2478 bp, Artificial Sequence
  derived and/or modified sequence
atgcgcagtggcgctgcacctcgcgcaaggccacgtcccccggccctcgcactgccacctactggtccagagtcattgacccacttcccattttcagatgaagatacaaggcggcaccctcctggtcgtagcgtgtctttcgaggctgaaaacgggccaacgcccagccctggaaggagtcccctggatagccaggctagccctggcctggttctgcacgccggcgctgctacgtctcagcggagagagtcgtttctctacagaagcgattcagactacgatatgagcccgaaaacgatgagtcgaaattcctctgtgacgagcgaagctcacgccgaagacctgattgtcacacccttcgcacaggtgctggcctcattgcgatctgtcagatctaatttttccctgcttactaacgtgccagtgccttccaacaagcggtcgcccctgggcggacctacacctgtttgcaaggctaccttaagcgaagaaacatgtcaacagctggcccgcgagacactggaggagctcgattggtgcctggaacaactggagactatgcagacctacaggagcgtctcagagatggcatctcataagttcaagcggatgctgaaccgggaactgacgcacctctccgagatgagcaggagtgggaaccaggtgtcggaatacatttcaactaccttcctagataaacagaacgaggtcgaaattccgtcgcccaccatgaaggaacgggagaaacaacaggctcccagacccaggccttctcagccccctcctccccccgtgcctcaccttcagcctatgagtcagattactggcctaaagaagcttatgcatagcaactctctaaacaatagcaatattccgcgatttggggtcaaaaccgaccaggaagaactgctcgcgcaggagctggaaaatttaaataagtggggtttaaatatcttttgcgtgtctgactatgccggtggcaggagcttgacctgcatcatgtatatgattttccaggagcgagacctcctgaagaagttccgtatacctgtggacacgatggtaacctacatgcttacactggaggatcactaccacgccgatgtcgcttatcataatagcctccacgctgccgacgtgctgcagtcaactcacgtcctgctcgccacccccgctctggatgccgtgtttacagacctggagatcctggcagcactgtttgcagccgccattcatgacgtagaccacccgggggtttccaaccagtttctgatcaatacaaacagcgagctggccctcatgtacaatgacgaatccgttctcgagaatcatcatctggccgttggctttaagctccttcaagaggataactgcgacatcttccaaaacctatctaagcgtcagcgccagagcttgaggaaaatggtaatagatatggtactggcgactgatatgagcaagcatatgactctcttggcagacctgaagacaatggtggagaccaaaaaagtcacttctagcggagtcctgctcctcgacaactatagcgatcgaatacaggtgttgaggaacatggtgcactgcgctgatctttctaatcctacaaaacccctggagctgtaccgacagtggaccgatcgcattatggccgaattcttccagcagggggatcgcgagagggaacgcgggatggaaattagccctatgtgcgataagcacactgcctctgtcgagaagtctcaggtgggcttcattgactacatcgtgcacccactctgggaaacctgggccgatctggtacatcccgacgcccaggagatcctggatacactggaagataaccgagactggtactatagtgccattagacagtccccttcccctcccccagaggaggaaagtaggggacctgggcaccctcccctgccagacaagtttcagtttgagttgacccttgaagaagaagaagaagaagaaatatctatggcccagattccatgcaccgcacaggaagctctcacagcccagggtctgagtggggtcgaggaggctctggatgctaccatcgcatgggaagctagccccgcacaggaatctttggaagtgatggcccaagaagcttctttggaggccgagctggaggccgtgtacttgacccagcaagcacagtcaacaggctctgcccccgtcgctcctgacgagtttagttctcgggaagaatttgtcgtggccgtttctcactcatcgccaagtgcactggccctacagtccccactgcttcccgcgtggagaaccctgtccgtgagcgagcatgctccgggcctcccgggcttgccaagcacggcggcggaagtggaggcacaacgggagcaccaggcagccaagagggcgtgctctgcctgtgcagggactttcggtgaggatacgagcgcattacctgcccccgggggcgggggctcgggtggggatccgacatag

SEQ ID NO: 42299 - DNA, 2478 bp, Artificial Sequence
  derived and/or modified sequence
atgaggtctggagctgccccccgggcccggccccggcccccagccctggccctgcccccaactggacctgagagcctgacccacttccccttcagtgatgaggacaccaggaggcaccccccaggccgctctgtgtcctttgaagcagaaaatggccccacccccagccctggccgcagccccctggacagccaggccagccctggcctggtgctgcacgccggggccgccaccagccagaggcgggagagcttcctgtacagaagtgacagcgactatgacatgagccccaagaccatgagcaggaacagctctgtgaccagcgaggcccacgcagaagatctcatcgtgaccccatttgcccaggtgctggccagcctgcggtctgtgcgcagcaacttcagcctgctgaccaacgtgcctgtgcccagcaacaagaggagccccctgggcggccccacccctgtgtgcaaggccaccctgtctgaggagacctgccagcagctggcccgggagaccctggaggagctggactggtgcctggagcagctggagaccatgcagacctacagatctgtgtctgagatggccagccacaagttcaagaggatgctgaaccgggagctgacccacctgtctgagatgagccgcagcggcaaccaggtgtctgagtacatcagcaccaccttcctggacaagcagaatgaggtggagatccccagccccaccatgaaggagcgggagaagcagcaggccccccggccccggcccagccagcccccacctcctcctgtgccccacctgcagcccatgagccagatcaccggcctgaagaagctgatgcacagcaacagcctgaacaacagcaacatcccccgcttcggcgtgaagacagaccaggaggagctgctggcccaggagctggagaacctgaacaagtggggcctgaacatcttctgtgtgtctgactatgccggcggccgcagcctgacctgcatcatgtacatgatcttccaggagcgggacctgctgaagaagttccgcatccctgtggacaccatggtgacctacatgctgaccctggaggaccactaccacgcagatgtggcctaccacaacagcctgcatgctgctgatgtgctgcagagcacccacgtgctgctggccaccccagccctggatgctgtgttcacagacctggagatcctggccgccctgtttgctgctgccatccatgatgtggaccaccctggggtgagcaaccagttcctgatcaacaccaacagcgagctggccctgatgtacaatgatgaatctgtgctggagaaccaccacctggccgtgggcttcaagctgctgcaggaggacaactgtgacatcttccagaacctgagcaagaggcagaggcagagcctgaggaagatggtgattgacatggtgctggccacagacatgagcaagcacatgaccctgctggccgacctgaagaccatggtggagaccaagaaggtgaccagcagtggagtgctgctgctggacaactacagcgaccgcatccaggtgctgaggaacatggtgcactgtgccgacctgagcaaccccaccaagcccctggagctgtaccggcagtggacagaccgcatcatggccgagttcttccagcagggcgaccgggagcgggagcggggcatggagatcagccccatgtgtgacaagcacacagcctctgtggagaagagccaggtgggcttcatcgactacatcgtgcaccccctgtgggagacctgggccgacctggtgcacccagatgcccaggagatcctggacaccctggaggacaacagagactggtactacagcgccatccggcagagccccagccccccacctgaggaggagagccggggccctggccacccccccctgcctgacaagttccagtttgagctgaccctggaggaggaggaggaggaggagatctccatggcccagatcccctgcacagcccaggaggccctgacagcccagggcctgtctggagtggaggaggccctggatgccaccatcgcctgggaggccagccctgcccaggagagcctggaggtgatggcccaggaggccagcctggaggccgagctggaggccgtgtacctgacccagcaggcccagagcactggaagtgcccctgtggccccagatgagttcagcagccgggaggagtttgtggtggccgtgagccacagcagccccagcgccctggccctgcagagccccctgctgcctgcctggaggaccctgtctgtgtctgaacatgcccctggcctgcccggcctgcccagcacagctgctgaggtggaggcccagcgggagcaccaggccgccaagagggcctgcagcgcctgtgccggcacctttggagaggacaccagcgccctgcctgcccctgggggcggcggcagcggcggggaccccacctag

SEQ ID NO: 42300 - DNA, 2478 bp, Artificial Sequence
  derived and/or modified sequence
atgcggagcggcgccgccccccgggcccggccccggccccccgcccttgccctgccgccaaccggcccagagtccctgactcacttcccatttagcgacgaggacacccgtaggcatcctccgggtcgatcagtatcctttgaggcggagaatgggcctactcctagccccgggcgaagtcctctcgactcccaggcctcacccggattggtgctacacgccggggccgcgacttcccagcggagggagagctttctctatcggtccgactccgactacgatatgtcgcctaaaactatgagtaggaactcgtctgtgacgagcgaggctcacgcggaggacctcattgttactccttttgcccaggtgctggcatccctgcgttcggtccgttccaatttctctctgctaacgaacgtacctgtgccatccaacaagaggagtccactcggggggccaacccctgtatgtaaggccacgctgtctgaggagacttgtcagcagctggctcgagaaaccctggaggagttggactggtgcctcgaacagctagaaaccatgcagacatataggtctgtctctgagatggcctcacacaaattcaagaggatgctgaaccgggaacttacacacttaagtgagatgagtcgcagtggcaaccaggtgagcgaatatatttccacaaccttcctggacaagcaaaatgaggtagagatcccttcccctaccatgaaagagagggaaaagcagcaggccccacgcccacgcccatctcagcctcccccacctcctgtaccccatctgcagccaatgagtcaaataaccgggctgaaaaaactaatgcatagtaacagtctaaataacagcaacatcccccgcttcggcgtgaagactgatcaggaggagttgctggcacaagaacttgagaatttaaacaagtggggtctgaacatattctgtgtgtcggattacgcaggcggcaggagcctgacctgcataatgtacatgattttccaggagagggacctgctgaagaaattccgaattcctgtggataccatggtcacgtacatgctgaccctagaggaccattaccacgccgacgtggcctaccataatagtcttcatgctgctgatgttttacagtcgactcatgtattattggccaccccagccctcgacgccgttttcacagatcttgaaattctggcagcgctatttgctgcagctatacacgacgtggatcacccgggtgtgagcaaccagtttttgatcaataccaacagtgagctcgctctaatgtacaatgacgaatctgtgctggaaaaccaccatctggccgtgggctttaaactgctccaagaagacaattgtgatatctttcagaatctctctaagaggcagcgccaatccctacggaaaatggtcatcgatatggttctcgccacagacatgtctaaacacatgacgcttctagccgacttaaagactatggtggaaacaaaaaaagtgacctccagcggggtcctgctgctggacaattactccgatagaattcaagtcctgcgaaacatggtccattgcgcagacctgtccaacccaaccaagccactcgaactgtatcgacaatggaccgatagaatcatggccgaattcttccagcagggtgatcgggaacgtgaacggggcatggaaatctcgcctatgtgcgataagcacactgccagtgtagagaaatcccaggtggggttcatagactatatcgtacatccgctctgggaaacctgggccgatcttgttcatcccgacgctcaggaaatactggatacactagaagataatcgggattggtattactcagctataagacagtctcccagtcccccgcccgaggaggagagcaggggcccaggacatccgcctttgccggataaattccagttcgagcttaccctggaagaggaagaggaagaggagatttccatggcccagatcccctgcaccgctcaagaggcactgacagcccagggactgtcaggcgtggaagaggctttggacgcaactattgcctgggaggcttcgccagcccaggagtctctagaagtcatggctcaggaagcctctctggaagccgaactggaagctgtatatctgacccagcaggcccagagcacaggctcggctcctgtggctcctgatgaattcagcagtagagaggaatttgtcgtagcggtgtctcatagctccccaagcgcactggcactgcagtccccgctgctgccagcttggcgaacgttgtcagtctccgagcacgcccccggtctcccggggctcccatcaacagccgccgaagtggaagcccagagagaacaccaagctgctaagagggcctgttcagcatgcgcaggcaccttcggtgaggacaccagtgcgttaccggccccgggcgggggaggctctggtggagatcctacttag

SEQ ID NO: 42301 - DNA, 4486 bp, Artificial Sequence
  derived and/or modified sequence
atgcgctccggtgcagcgccccgggcccggccccggccccctgccctggcactgccccccacgggccccgagtccctgacccacttccccttcagcgatgaggacacccgtcggcaccctccgggcagatctgtcagcttcgaggcagagaatgggccgacaccatctcctggccgcagccccctggactcgcaggcgagcccaggactcgtgctgcacgccggggcggccaccagccagcgccgggagtccttcctgtaccgctcagacagcgactatgacatgtcacccaagaccatgtcccggaactcatcggtcaccagcgaggcgcacgctgaagacctcatcgtaacaccatttgctcaggtgctggccagcctccggagcgtccgtagcaacttctcactcctgaccaatgtgcccgttcccagtaacaagcggtccccgctgggcggccccacccctgtctgcaaggccacgctgtcagaagaaacgtgtcagcagttggcccgggagactctggaggagctggactggtgtctggagcagctggagaccatgcagacctatcgctctgtcagcgagatggcctcgcacaagttcaaaaggatgttgaaccgtgagctcacacacctgtcagaaatgagcaggtccggaaaccaggtctcagagtacatttccacaacattcctggacaaacagaatgaagtggagatcccatcacccacgatgaaggaacgagaaaaacagcaagcgccgcgaccaagaccctcccagccgcccccgccccctgtaccacacttacagcccatgtcccaaatcacagggttgaaaaagttgatgcatagtaacagcctgaacaactctaacattccccgatttggggtgaagaccgatcaagaagagctcctggcccaagaactggagaacctgaacaagtggggcctgaacatcttttgcgtgtcggattacgctggaggccgctcactcacctgcatcatgtacatgatattccaggagcgggacctgctgaagaaattccgcatccctgtggacacgatggtgacatacatgctgacgctggaggatcactaccacgctgacgtggcctaccataacagcctgcacgcagctgacgtgctgcagtccacccacgtactgctggccacgcctgcactagatgcagtgttcacggacctggagattctcgccgccctcttcgcggctgccatccacgatgtggatcaccctggggtctccaaccagttcctcatcaacaccaattcggagctggcgctcatgtacaacgatgagtcggtgctcgagaatcaccacctggccgtgggcttcaagctgctgcaggaggacaactgcgacatcttccagaacctcagcaagcgccagcggcagagcctacgcaagatggtcatcgacatggtgctggccacggacatgtccaagcacatgaccctcctggctgacctgaagaccatggtggagaccaagaaagtgaccagctcaggggtcctcctgctagataactactccgaccgcatccaggtcctccggaacatggtgcactgtgccgacctcagcaaccccaccaagccgctggagctgtaccgccagtggacagaccgcatcatggccgagttcttccagcagggtgaccgagagcgcgagcgtggcatggaaatcagccccatgtgtgacaagcacactgcctccgtggagaagtctcaggtgggttttattgactacattgtgcacccattgtgggagacctgggcggaccttgtccacccagatgcccaggagatcttggacactttggaggacaaccgggactggtactacagcgccatccggcagagcccatctccgccacccgaggaggagtcaagggggccaggccacccacccctgcctgacaagttccagtttgagctgacgctggaggaggaagaggaggaagaaatatcaatggcccagataccgtgcacagcccaagaggcattgactgcgcagggattgtcaggagtcgaggaagctctggatgcaaccatagcctgggaggcatccccggcccaggagtcgttggaagttatggcacaggaagcatccctggaggccgagctggaggcagtgtatttgacacagcaggcacagtccacaggcagtgcacctgtggctccggatgagttctcgtcccgggaggaattcgtggttgctgtaagccacagcagcccctctgccctggctcttcaaagcccccttctccctgcttggaggaccctgtctgtttcagagcatgccccgggcctcccgggcctcccctccacggcggccgaggtggaggcccaacgagagcaccaggctgccaagagggcttgcagtgcctgcgcagggacatttggggaggacacatccgcactcccagctcctggtggcggggggtcaggtggagaccctacctgatccccagacctctgtccctgttcccctccactcctcccctcactcccctgctcccccgaccacctcctcctctgcctcaaagactcttgtcctcttgtccctcctgagaaaaaagaaaacgaaaagtggggtttttttctgttttctttttttcccctttccccctgcccccacccacggggcctttttttggaggtgggggctggggaatgaggggctgaggtcccggaagggattttatttttttgaattttaattgtaacatttttagaaaaagaacaaaaaaagaaaaaaaaaagaaagaaacacagcaactgtagatgctcctgttcctggttcccgctttccacttccaaatccctcccctcaccttcccccactgccccccaagttccaggctcagtcttccagccgcctggggagtctctacctgggcccaagcaggtgtggggcctccttctgggcttttcttctgaatttagaggatttctagaacgtggtcaggaatagccattctaggcggggctggggccagggtggggggcagtcactgtgggaggtcccagctccagcccccctctggtttgctgcctcctctcccctctaaaaaagtcttccgcttgattttgcacaatcccggcgatactcctggcgatactgactagaaagtcagggagctgggggagctgttcactttaggatacgggggtggtatggaagggagcgttcacaccgccagcctcgggcctgggatttgaggagggccctagacctcctccactctccatcccctttcccttccactttgggttcactttgaattttctccgttttttggggcagtggctctgatccactcacccccccgccccccgccccacttctagctgcttctcctcttgtttctgccttaataattcccacggccacaggcaagggggttgcagtggccgcctgcaccttggatgaggcagggccaggcgcccagaacccccatcctggccgcacccccctttccagggtcctccggaccccaccttccacactctgatcacagcccccctaccttttgccctaggaggaagcaataatggtgtataccctcattctcattcctgggcagcccttccttccaccctggcaccaaaataatttctcctccatccgtaccttgcctagcctctccctctcccccagctagtccctgagcaatacggcagacagatgcaagaccatttttctccaagccatgggggactgtttggaaggaaagccccctctctccctcctcccctcgccctcggcctggttctgcagctggaccgacctcattcatcgcctgccccctacccaattctgagcacacggtactgtagcccccagttcctccctagccttccatccctctgtccaccccagggggaggtaaccccgcactcacactcccttgatgctgtctgtacagggttcatattttgtagcgaaagtcgtttttgtcccagccggcgatcggagtgggccttttctttctttttgttcattctttacctttttttcttttctttctttcttttttgtacatactgtaaggttggtttgtaaattattctacggaggcaaaaagggaaaataaaaacttgcccttccctggctgacccagtcgggaaggtagggaaggaggtctcccgttgggagagtctctgttcctgctgtattatacaaactgtaccatagtcctgggaaaagggtggactcaccgctgttgttttatgggaagtcgtgtcatcctaggggttggggctgggcagagcctgtcccctccccccttctccaggagccagggggtgactggagagacagacccacccccaagcagggctcctctccccagggtgagcacaggacctctgtaagctgcttgtgtattgtccactttgacgatcagtcattcggtccgttgatcaataatccttcgatcttgtctccaattaaaccgaggctttcaccg

SEQ ID NO: 42302 - DNA, 2478 bp, Artificial Sequence
  derived and/or modified sequence
atgcggagcggcgctgctcctagagctcggccacgccctccagccctggccctcccgcctacaggaccagaaagcctcactcattttcccttctccgatgaggacacgaggcgtcatcccccaggcagatccgtcagcttcgaggccgaaaacgggccaactccttctcctggaaggtcgcctcttgattcccaggccagccctgggctggtgttacatgccggagctgcaacctcccagagacgggagagttttctctatcgctcagacagtgactacgatatgagccctaaaacaatgagtaggaattctagcgttacctcagaagcacacgccgaggacctaattgtgaccccttttgcccaggtcttggcctcattgaggagcgtgcgatcaaacttttccctgctgacaaacgtgcccgtgcctagcaataaaaggagccccctgggcggacccactcccgtgtgcaaagcaacgctgtctgaggagacatgtcagcagctcgcaagagagacactggaagagttggattggtgccttgagcagctggagaccatgcagacctaccgtagtgtatctgagatggccagtcataaattcaagcgcatgctgaaccgagagctgacccacttgtcagagatgtcaagatccggcaaccaggtttccgagtatattagcactacatttcttgataagcagaacgaggttgagattcccagcccaaccatgaaagaaagagaaaagcagcaggccccaaggcccagaccctcacagccacctccgccacctgtgccccatcttcagccaatgtctcaaattaccggcctgaagaaactcatgcatagcaattcactgaataatagcaatattccccgttttggtgtcaaaacggaccaggaggagttacttgcgcaggagctcgagaatctgaataagtggggcctgaacatattctgcgtgagcgattatgctggagggagatctctgacgtgcatcatgtacatgattttccaagagagagatctgctgaagaaattccggatccctgtcgatacaatggtgacatacatgcttacactggaagatcactaccacgcagatgtcgcttaccacaatagccttcatgctgccgacgttctgcagtccacacatgtgctgttagctacacctgctcttgatgcggtctttacagacctggagattctggcagccctgttcgcagctgccatacatgacgtagatcacccgggagtgagtaaccagttccttataaacacgaactcggaactcgccctgatgtacaatgatgagtccgtcctggaaaaccaccatcttgcagtgggattcaagctgcttcaggaagacaattgtgacatctttcagaatctgagcaagcggcagcgccagtctctgcgtaagatggtcatcgacatggtcctcgcaacggatatgtccaaacacatgacactgctcgcagacctgaagacgatggtggaaactaaaaaggtaacatccagcggggtcctgcttcttgacaactactctgataggatacaggttctgagaaatatggtgcattgcgctgatttgagtaaccccaccaaaccgctcgagctgtaccgtcaatggactgatcggatcatggccgaattttttcagcaaggagacagagagcgggagagaggtatggaaattagtcctatgtgtgacaagcacacagcaagtgttgaaaagagccaggtgggtttcattgattacattgtccatccactgtgggaaacctgggctgatcttgtccatcccgatgcccaggagattctggatacccttgaggataatagagactggtattacagcgccatcagacaatctcctagccctccacctgaagaagagagccgaggccctggtcacccacctctgcctgacaaattccagttcgaattgaccttagaagaggaggaggaggaagaaatcagcatggctcaaattccgtgcacagcccaagaagctctgaccgcccagggtctgtctggcgttgaagaagccctggatgctaccatcgcatgggaagcatctcccgcacaggaaagtctggaggttatggcacaggaagcctccctagaggcagaattggaggctgtctatctgacccagcaggctcagtctacaggatcagctcctgttgccccagacgaattcagctctagagaagaatttgttgtagctgtgtcccatagctctccatccgcactggccctgcagagcccattgttaccagcatggaggacgctgtccgtatccgaacacgccccaggactgccaggactcccttctactgcagctgaggtggaagctcagagggagcatcaagctgctaagagagcctgctccgcatgcgctgggaccttcggagaggatacttctgctttgcccgcaccaggcggtggcggttcgggaggcgatcccacctag

SEQ ID NO: 42303 - DNA, 2478 bp, Artificial Sequence
  derived and/or modified sequence
atgagaagcggcgccgcccccagagccagacccagaccccccgccctggccctgccccccaccggccccgagagcctgacccacttccccttcagcgacgaggacaccagaagacacccccccggcagaagcgtgagcttcgaggccgagaacggccccacccccagccccggcagaagccccctggacagccaggccagccccggcctggtgctgcacgccggcgccgccaccagccagagaagagagagcttcctgtacagaagcgacagcgactacgacatgagccccaagaccatgagcagaaacagcagcgtgaccagcgaggcccacgccgaggacctgatcgtgacccccttcgcccaggtgctggccagcctgagaagcgtgagaagcaacttcagcctgctgaccaacgtgcccgtgcccagcaacaagagaagccccctgggcggccccacccccgtgtgcaaggccaccctgagcgaggagacctgccagcagctggccagagagaccctggaggagctggactggtgcctggagcagctggagaccatgcagacctacagaagcgtgagcgagatggccagccacaagttcaagagaatgctgaacagagagctgacccacctgagcgagatgagcagaagcggcaaccaggtgagcgagtacatcagcaccaccttcctggacaagcagaacgaggtggagatccccagccccaccatgaaggagagagagaagcagcaggcccccagacccagacccagccagcccccccccccccccgtgccccacctgcagcccatgagccagatcaccggcctgaagaagctgatgcacagcaacagcctgaacaacagcaacatccccagattcggcgtgaagaccgaccaggaggagctgctggcccaggagctggagaacctgaacaagtggggcctgaacatcttctgcgtgagcgactacgccggcggcagaagcctgacctgcatcatgtacatgatcttccaggagagagacctgctgaagaagttcagaatccccgtggacaccatggtgacctacatgctgaccctggaggaccactaccacgccgacgtggcctaccacaacagcctgcacgccgccgacgtgctgcagagcacccacgtgctgctggccacccccgccctggacgccgtgttcaccgacctggagatcctggccgccctgttcgccgccgccatccacgacgtggaccaccccggcgtgagcaaccagttcctgatcaacaccaacagcgagctggccctgatgtacaacgacgagagcgtgctggagaaccaccacctggccgtgggcttcaagctgctgcaggaggacaactgcgacatcttccagaacctgagcaagagacagagacagagcctgagaaagatggtgatcgacatggtgctggccaccgacatgagcaagcacatgaccctgctggccgacctgaagaccatggtggagaccaagaaggtgaccagcagcggcgtgctgctgctggacaactacagcgacagaatccaggtgctgagaaacatggtgcactgcgccgacctgagcaaccccaccaagcccctggagctgtacagacagtggaccgacagaatcatggccgagttcttccagcagggcgacagagagagagagagaggcatggagatcagccccatgtgcgacaagcacaccgccagcgtggagaagagccaggtgggcttcatcgactacatcgtgcaccccctgtgggagacctgggccgacctggtgcaccccgacgcccaggagatcctggacaccctggaggacaacagagactggtactacagcgccatcagacagagccccagccccccccccgaggaggagagcagaggccccggccacccccccctgcccgacaagttccagttcgagctgaccctggaggaggaggaggaggaggagatcagcatggcccagatcccctgcaccgcccaggaggccctgaccgcccagggcctgagcggcgtggaggaggccctggacgccaccatcgcctgggaggccagccccgcccaggagagcctggaggtgatggcccaggaggccagcctggaggccgagctggaggccgtgtacctgacccagcaggcccagagcaccggcagcgcccccgtggcccccgacgagttcagcagcagagaggagttcgtggtggccgtgagccacagcagccccagcgccctggccctgcagagccccctgctgcccgcctggagaaccctgagcgtgagcgagcacgcccccggcctgcccggcctgcccagcaccgccgccgaggtggaggcccagagagagcaccaggccgccaagagagcctgcagcgcctgcgccggcaccttcggcgaggacaccagcgccctgcccgcccccggcggcggcggcagcggcggcgaccccacctag

SEQ ID NO: 42304 - protein, 882 aa, Artificial Sequence
  derived and/or modified sequence
MAADKGPAAGPRSRAAMAQWRKKKGLRKRRGAASQARGSDSEDGEFEIQAEDDARARKLGPGRPLPTFPTSECTSDVEPDTREMVRAQNKKKKKSGGFQSMGLSYPVFKGIMKKGYKVPTPIQRKTIPVILDGKDVVAMARTGSGKTACFLLPMFERLKTHSAQTGARALILSPTRELALQTLKFTKELGKFTGLKTALILGGDRMEDQFAALHENPDIIIATPGRLVHVAVEMSLKLQSVEYVVFDEADRLFEMGFAEQLQEIIARLPGGHQTVLFSATLPKLLVEFARAGLTEPVLIRLDVDTKLNEQLKTSFFLVREDTKAAVLLHLLHNVVRPQDQTVVFVATKHHAEYLTELLTTQRVSCAHIYSALDPTARKINLAKFTLGKCSTLIVTDLAARGLDIPLLDNVINYSFPAKGKLFLHRVGRVARAGRSGTAYSLVAPDEIPYLLDLHLFLGRSLTLARPLKEPSGVAGVDGMLGRVPQSVVDEEDSGLQSTLEASLELRGLARVADNAQQQYVRSRPAPSPESIKRAKEMDLVGLGLHPLFSSRFEEEELQRLRLVDSIKNYRSRATIFEINASSRDLCSQVMRAKRQKDRKAIARFQQGQQGRQEQQEGPVGPAPSRPALQEKQPEKEEEEEAGESVEDIFSEVVGRKRQRSGPNRGAKRRREEARQRDQEFYIPYRPKDFDSERGLSISGEGGAFEQQAAGAVLDLMGDEAQNLTRGRQQLKWDRKKKRFVGQSGQEDKKKIKTESGRYISSSYKRDLYQKWKQKQKIDDRDSDEEGASDRRGPERRGGKRDRGQAGASRPHAPGTPAGRVRPELKTKQQILKQRRRAQKLHFLQRGGLKQLSARNRRRVQELQQGAFGRGARSKKGKMRKRM

SEQ ID NO: 42305 - DNA, 2649 bp, Artificial Sequence
  derived and/or modified sequence
atggccgccgataagggccccgctgctggtcctaggagcagggccgctatggctcagtggcgcaagaaaaagggtctcaggaagaggagaggcgcagcttcccaggcacgaggaagcgattcagaggacggcgagtttgaaatccaggcagaggatgatgcacgggccagaaagttaggtccagggcggcccctcccgaccttccctacgagcgagtgtactagtgacgtggagccagacacacgtgaaatggtcagggcgcagaacaagaagaagaagaaaagcggtggttttcaatccatgggactctcctatccagtgttcaaaggaataatgaagaagggttataaggtccccactccaattcagcggaaaactatccctgtgatactcgacgggaaagacgtagtagcaatggcaaggaccggctctggcaagacagcatgtttcttactgcccatgtttgagaggctcaagactcatagcgcccaaaccggagcacgagctctgatcctgtccccgacccgggagctggccctgcagaccctgaagttcactaaagaactgggcaaatttaccggcttaaaaaccgcccttatcctgggaggcgatcgcatggaagatcagtttgccgctctccatgaaaatccagacattattatcgcgacccctggccgactcgttcatgtcgcagttgaaatgagcctaaagctccagagcgtagagtacgttgtttttgacgaggctgaccgcttattcgaaatgggcttcgccgaacagttacaagagattatagccaggctgccaggaggacatcagactgtgcttttcagcgccacactgccaaagctgctcgttgagttcgcgcgcgcaggcctcacggaaccagtcctgattcgtctggatgtagacaccaaactgaacgaacagttaaagacgtcttttttcctcgtgagggaggacactaaagcagctgttctactacatctgctgcacaatgtggttaggcctcaggaccagaccgtagttttcgttgccactaaacaccatgctgagtacctgactgaacttttaactacccagcgcgtgtcttgcgcccatatttactctgcccttgatcccacagcccgcaagatcaacctcgccaaatttacactggggaaatgctctacgctcatcgtgacggacctcgctgcacggggattggatattccactattagataacgtgataaactattcctttccagcgaagggtaaactctttctccaccgggtagggcgggtcgcccgtgcaggacgctctgggactgcttacagccttgtggcacctgacgaaatcccatacctactcgacctgcatctgtttctggggcgtagcctgacactggcaaggcctctcaaggagccttccggggtggcaggagtcgatggtatgcttggccgggttccccaatcggtcgtagatgaagaagacagtggactgcagtctacactggaagcttctttagaactgagaggcctggcgagggtcgctgacaacgctcagcaacagtatgtgcgctctcggccagccccaagcccagagtccataaagagagccaaagagatggatctggtggggctagggctccaccccctgttcagctctcggtttgaagaggaagagctacagcggctgagactggtcgattccattaagaactatcggagtagggcaaccatattcgagattaatgcctcgagcagggacctgtgctctcaagttatgagggcaaagcggcaaaaggaccggaaggcaatcgcccgattccaacaggggcagcaagggcgccaggagcagcaagagggtccggtgggccccgcgccatcacgcccagctctacaggaaaagcagcccgagaaagaagaagaggaggaggccggcgagagcgtcgaggatatcttcagtgaggtcgtcgggaggaaaaggcagcgaagtggccccaatcgaggcgccaagcggcgccgcgaggaagcccgtcaacgagatcaggaattctacatcccataccgtccgaaggacttcgactcagagcgcggactcagtatctcgggcgaaggaggtgcttttgagcagcaggccgccggggccgtgctggatctgatgggcgacgaggcccagaacctgaccagaggccgacaacaactgaagtgggatcgaaagaaaaagaggtttgttgggcaatcaggccaggaggacaaaaagaagattaagaccgagagcggccggtacattagctcttcttacaaacgagacctctaccagaagtggaagcaaaaacagaaaatcgacgatcgagactcagacgaagagggggcctcagatcgccggggcccggaaaggagaggaggaaaacgcgatcgcgggcaggcgggagcaagtcggcctcacgcccctggaactcccgctgggcgcgtgagacccgaactaaagacaaagcagcagattttaaagcagcgtcgtcgcgcacagaaacttcacttcttacagagagggggcctgaagcagctgtctgcccgcaaccgtcgacgcgtgcaggaactgcaacagggcgccttcgggagaggggccagatccaaaaaaggtaaaatgagaaagcgcatgtag

SEQ ID NO: 42306 - DNA, 2649 bp, Artificial Sequence
  derived and/or modified sequence
atggctgctgacaagggccctgctgctggccccaggagcagagctgccatggcccagtggaggaagaagaagggcctgaggaagagaagaggagctgccagccaggcccggggcagtgacagtgaagatggagaatttgagatccaggctgaagatgatgcccgggccaggaagctgggccctggccggcccctgcccaccttccccaccagcgagtgcaccagtgatgtggagccagacacccgggagatggtgcgggcccagaacaagaagaagaagaagagcggcggcttccagagcatgggcctgagctaccctgtgttcaagggcatcatgaagaagggctacaaggtgcccacccccatccagaggaagaccatccctgtgatcctggatggcaaggatgtggtggccatggccaggacaggcagcggcaagacagcctgcttcctgctgcccatgtttgagcggctgaagacccacagcgcccagacaggagcccgggccctgatcctgagccccacccgggagctggccctgcagaccctgaagttcaccaaggagctgggcaagttcaccggcctgaagacagccctgatcctgggcggggacaggatggaggaccagtttgctgccctgcatgaaaatccagacatcatcatcgccaccccaggccgcctggtgcacgtggccgtggagatgagcctgaagctgcagagcgtggagtatgtggtgtttgatgaagctgaccggctgtttgagatgggctttgctgagcagctgcaggagatcatcgcccggctgcccggcggccaccagacagtgctcttcagcgccaccctgcccaagctgctggtggagtttgcccgggccggcctgacagagcctgtgctgatccggctggatgtggacaccaagctgaatgagcagctgaagaccagcttcttcctggtgcgggaggacaccaaggctgctgtgctgctgcacctgctgcacaacgtggtgcggccccaggaccagacagtggtgtttgtggccaccaagcaccacgccgagtacctgacagagctgctgaccacccagagggtgtcctgtgcccacatctacagcgccctggaccccacagccaggaagatcaacctggccaagttcaccctgggcaagtgcagcaccctgattgtgacagacctggccgcccggggcctggacatccccctgctggacaacgtcatcaactacagcttccctgccaagggcaagctgttcctgcaccgggtgggccgggtggcccgggccggccgctctggaacagcctacagcctggtggccccagatgagatcccctacctgctggacctgcacctgttcctgggccgcagcctgaccctggcccggcccctgaaggagcccagcggcgtggccggcgtggatggcatgctgggccgggtgccccagagcgtggtggatgaagaagattctggcctgcagagcaccctggaggccagcctggagctgcggggcctggcccgggtggccgacaatgcccagcagcagtatgtgcgcagcaggcctgcccccagccctgagagcatcaagagggccaaggagatggacctggtgggcctgggcctgcaccccctcttcagcagcagatttgaggaggaggagctgcagaggctgcggctggtggacagcatcaagaactaccgcagccgggccaccatctttgagatcaatgccagcagccgggacctgtgcagccaggtgatgagggccaagaggcagaaggacaggaaggccatcgcccgcttccagcagggccagcagggccggcaggagcagcaggagggccctgtgggccctgcccccagcaggcctgccctgcaggagaagcagcctgagaaggaggaggaggaggaggccggggagagcgtggaggacatcttcagcgaggtggtgggcaggaagaggcagaggagcggccccaacagaggagccaagagaagaagagaggaggcccggcagagggaccaggagttctacatcccctaccggcccaaggactttgattctgagcggggcctgagcatcagcggggagggcggggcctttgagcagcaggccgccggggctgtgctggacctgatgggagatgaggcccagaacctgacccggggccggcagcagctgaagtgggacaggaagaagaagagatttgtgggccagagcggccaggaggacaagaagaagatcaagacagaaagtggccgctacatcagcagcagctacaagagggacctgtaccagaagtggaagcagaagcagaagattgatgaccgggacagtgatgaggagggcgccagtgaccggcggggccctgagaggagaggaggcaagagggaccggggccaggccggggccagccggccccacgcccctggcaccccagctggccgggtgcggcctgagctgaagaccaagcagcagatcctgaagcagaggagaagagcccagaagctgcacttcctgcagaggggcggcctgaagcagctgagcgccaggaacagaagaagagtgcaggagctgcagcagggcgccttcggccgcggggcccggagcaagaagggcaagatgaggaagaggatgtag

SEQ ID NO: 42307 - DNA, 2649 bp, Artificial Sequence
  derived and/or modified sequence
atggccgccgacaagggccccgccgccggcccccggagccgggccgcaatggcacagtggagaaaaaagaaaggacttcggaagagaaggggtgctgcttcccaagcaaggggatccgatagcgaggatggagagttcgaaattcaggccgaggatgacgcccgcgctcggaagctcggccctgggagaccactgcctacatttcccacatcagagtgcaccagcgacgttgagcctgacacaagggaaatggtgagggctcagaataagaaaaaaaagaaatcagggggcttccagagtatgggactgtcatatccggtctttaagggcatcatgaaaaaagggtataaggtgcccaccccgatccagcgtaaaacaatcccagtcattttggacggaaaagacgtggttgctatggcgcggaccgggtctgggaaaacagcatgctttctgttgccgatgtttgaacgcctcaagacccatagtgctcagactggcgccagggccctcatcctgtccccaactcgggaattggcgttgcaaacgctgaaattcacaaaggagttgggaaagttcaccggactgaagacagcacttatccttgggggcgatcggatggaggatcagtttgcagcccttcatgaaaacccggatataattattgccacgccaggacgactggttcacgtcgctgttgaaatgtcactcaaactgcagtccgtggagtacgttgtcttcgacgaggccgacagactcttcgagatgggctttgccgagcagctgcaagaaatcatcgcccggctacctggaggtcaccagaccgttctgttcagcgccacactaccgaagctactggtagaattcgcgcgggctggcctgacagagcccgttctcattcggctcgacgtggataccaaactgaatgagcaactgaagacgtcttttttcctggtgagagaggacactaaggccgctgtcctactgcacctgctccacaatgtcgtgcgaccgcaggatcaaacagtggtctttgtggccacaaagcaccatgccgagtacctgacagagctgctgaccacccagagagtgagctgcgcgcacatctacagcgcccttgatcctactgctcgcaagattaaccttgcaaagttcaccctgggtaagtgtagcacactgatcgtgacagatttggctgcacgaggactggacatcccattactagataatgtcatcaattatagctttcctgccaaaggcaagttattcctgcaccgagtgggcagagtggcgagggcgggaaggtcaggcacggcctacagcctcgtcgccccagacgagattccgtacttacttgacttgcatctgtttctgggtcgcagcttgacactagccagaccactcaaagaaccatccggggtggccggggtggacggcatgctgggaagggttccacagtctgtcgtggacgaggaagacagtggcctccagagcacattggaagcaagcctggagttgcggggcttggcccgggtcgcagataatgcgcagcagcagtacgtgcggagtcgacctgccccctcccctgagagtattaagcgtgccaaggaaatggacttagtgggcctgggcctgcacccacttttctcgtcacggttcgaggaagaggagctgcagaggttgaggctggtagatagcattaaaaactatagaagtcgtgctacaatttttgaaataaatgcgtcatctcgggacttgtgcagtcaagtgatgcgggcaaaacggcagaaggatagaaaggccatagcacgcttccagcaaggccaacaagggaggcaggagcaacaggaaggccccgtagggccggctccctcacgtcctgctctgcaggaaaaacagcccgaaaaggaagaggaggaagaagctggcgaatccgtggaggacattttcagcgaggttgtgggtagaaaaagacagcgatccggacctaacaggggagctaagagacggagagaggaagcgaggcaaagggaccaagaattctatattccctaccgccccaaggactttgacagtgagaggggactgtccatttccggagaaggcggagcattcgaacagcaggcagctggcgccgttttggatttgatgggtgatgaggctcagaaccttacacgcgggcgacaacagttgaagtgggaccggaagaagaaacgctttgtgggccagagcgggcaggaggataaaaagaaaattaagactgaaagcgggaggtatattagttcaagttataaaagagacctctatcagaagtggaagcagaagcaaaagatcgacgacagggactccgacgaagaaggggcttcagatcggcggggaccagaaaggagaggtggcaaaagagaccgggggcaggccggagcctcccgcccacacgcaccgggcacaccagccggccgagttagacctgaactgaaaactaaacagcagatacttaagcagaggcgccgggcacagaagctgcactttctccaacgggggggactgaagcaactgtccgccagaaatcgccggagggtgcaggaactgcaacagggggcctttggaaggggggcccgatccaagaaaggtaaaatgcgcaaacgtatgtag

SEQ ID NO: 42308 - DNA, 2649 bp, Artificial Sequence
  derived and/or modified sequence
atggccgctgacaagggtcccgctgcaggcccaaggagtcgagcagctatggcccagtggcggaagaagaaggggctgagaaagcgcagaggcgctgcttcccaagcgaggggatcggattcagaggacggcgaatttgagatccaggctgaggacgacgcgcgtgctcgaaaacttggacctggtcgccctctcccaactttccctacttctgagtgcacatcagatgtggagcctgacacacgagagatggtacgcgcacagaacaagaaaaagaaaaaatccggaggcttccagagcatgggtttgtcctatccagtgttcaaaggcattatgaaaaaaggatacaaggtccctactccaatacagaggaagacaattcccgtgattctggacggcaaggacgtcgtggcaatggctcggactgggtcagggaagaccgcctgcttcctgctccctatgtttgagagattaaagacacattcagcccagacaggcgcacgcgcacttattttgtccccaacacgcgaactagctctgcagactctaaaattcacaaaggaactgggaaaatttaccggcttaaaaaccgccttaatccttggtggagacaggatggaggatcagttcgcagctctgcacgagaatccagacatcattatcgccactcccggaaggctggtccatgtagctgtggagatgtcccttaagctgcagagcgtcgagtatgtggtttttgatgaagcagacaggttgtttgagatggggtttgccgaacagctgcaggagattattgcacgcctgccgggagggcatcagaccgtgttattctcagccacactacctaagctgctggttgagtttgcacgagcaggccttaccgagccagtgctgatccgactcgatgtggacacaaagcttaacgaacaattaaagacgtctttctttttggtgcgggaggacaccaaggccgcagtcttgttgcatttactgcataatgtggtgcggcctcaagatcagactgtggtttttgtggccacaaaacaccacgcggagtacctcactgagctgctgacaacacagcgtgtgagttgcgcgcacatctattctgcgcttgacccaactgccaggaaaattaacctggccaagttcacactgggcaaatgcagcaccctgatcgtgaccgatctggccgctcggggactggacatacctctgcttgacaacgtgatcaattacagttttccagctaaaggcaagctgttcttgcatcgggtaggcagagttgctcgggcaggccgttccggaacagcttacagtctggtggcacctgatgagataccttatctgctggacctgcacttatttctggggcgttccctcacgctcgcaaggcctctcaaagagccctccggagttgctggggttgatggaatgctcggtcgggtgccacagtcggtcgtcgacgaagaggattcaggactgcaaagcaccctggaagcctccttggagctccggggactggctagagtggcggacaacgcacagcaacagtatgtgagaagcaggccagctccttcacctgaaagcattaaaagggcaaaagaaatggacctcgtggggcttggcctccaccccctgtttagcagtaggtttgaagaagaggagctacaacgattgcgacttgtggacagtatcaaaaactaccgctcccgagctacaatcttcgaaatcaatgcttcatcaagagacttgtgttcccaggtgatgcgtgctaaaaggcagaaggatcgtaaggcgatcgcaaggtttcagcagggacaacagggtcggcaggagcaacaggagggcccagtcggaccggctccctctagacctgctctccaggagaaacaaccagagaaggaggaagaagaagaagctggagagtcagtcgaagacatcttcagcgaagtcgtgggcagaaaaagacagagatccggacctaatcgtggtgccaagagacgtagggaagaagcacggcagagagaccaggaattctacattccatatagacccaaagactttgattctgagcggggactgagtatcagtggagagggcggagcctttgagcagcaagctgcaggtgctgtgctggacctgatgggggatgaggcgcaaaatctgaccaggggtcgtcagcagctgaagtgggatcgcaagaaaaaacgcttcgtgggccaatcaggacaggaggacaaaaaaaaaatcaagaccgagagcggcagatacattagcagtagctataaaagggacttgtaccagaaatggaagcagaagcagaaaatagacgaccgtgactccgacgaggagggggctagcgatcgacgtggcccagagagaaggggaggcaaacgagatcgtgggcaagctggagcctcccgcccacacgcacctggcactccagcaggccgagttcggccagaactgaagactaaacaacaaattctaaaacaacggagaagagctcagaaactccacttcctgcagcggggtggactgaagcagctgagcgctcgcaacaggaggagagtgcaggaactgcagcagggggcttttggaaggggagccagatctaagaaaggaaagatgcgcaagcgtatgtag

SEQ ID NO: 42309 - DNA, 2649 bp, Artificial Sequence
  derived and/or modified sequence
atggccgccgacaagggccccgccgccggccccagaagcagagccgccatggcccagtggagaaagaagaagggcctgagaaagagaagaggcgccgccagccaggccagaggcagcgacagcgaggacggcgagttcgagatccaggccgaggacgacgccagagccagaaagctgggccccggcagacccctgcccaccttccccaccagcgagtgcaccagcgacgtggagcccgacaccagagagatggtgagagcccagaacaagaagaagaagaagagcggcggcttccagagcatgggcctgagctaccccgtgttcaagggcatcatgaagaagggctacaaggtgcccacccccatccagagaaagaccatccccgtgatcctggacggcaaggacgtggtggccatggccagaaccggcagcggcaagaccgcctgcttcctgctgcccatgttcgagagactgaagacccacagcgcccagaccggcgccagagccctgatcctgagccccaccagagagctggccctgcagaccctgaagttcaccaaggagctgggcaagttcaccggcctgaagaccgccctgatcctgggcggcgacagaatggaggaccagttcgccgccctgcacgagaaccccgacatcatcatcgccacccccggcagactggtgcacgtggccgtggagatgagcctgaagctgcagagcgtggagtacgtggtgttcgacgaggccgacagactgttcgagatgggcttcgccgagcagctgcaggagatcatcgccagactgcccggcggccaccagaccgtgctgttcagcgccaccctgcccaagctgctggtggagttcgccagagccggcctgaccgagcccgtgctgatcagactggacgtggacaccaagctgaacgagcagctgaagaccagcttcttcctggtgagagaggacaccaaggccgccgtgctgctgcacctgctgcacaacgtggtgagaccccaggaccagaccgtggtgttcgtggccaccaagcaccacgccgagtacctgaccgagctgctgaccacccagagagtgagctgcgcccacatctacagcgccctggaccccaccgccagaaagatcaacctggccaagttcaccctgggcaagtgcagcaccctgatcgtgaccgacctggccgccagaggcctggacatccccctgctggacaacgtgatcaactacagcttccccgccaagggcaagctgttcctgcacagagtgggcagagtggccagagccggcagaagcggcaccgcctacagcctggtggcccccgacgagatcccctacctgctggacctgcacctgttcctgggcagaagcctgaccctggccagacccctgaaggagcccagcggcgtggccggcgtggacggcatgctgggcagagtgccccagagcgtggtggacgaggaggacagcggcctgcagagcaccctggaggccagcctggagctgagaggcctggccagagtggccgacaacgcccagcagcagtacgtgagaagcagacccgcccccagccccgagagcatcaagagagccaaggagatggacctggtgggcctgggcctgcaccccctgttcagcagcagattcgaggaggaggagctgcagagactgagactggtggacagcatcaagaactacagaagcagagccaccatcttcgagatcaacgccagcagcagagacctgtgcagccaggtgatgagagccaagagacagaaggacagaaaggccatcgccagattccagcagggccagcagggcagacaggagcagcaggagggccccgtgggccccgcccccagcagacccgccctgcaggagaagcagcccgagaaggaggaggaggaggaggccggcgagagcgtggaggacatcttcagcgaggtggtgggcagaaagagacagagaagcggccccaacagaggcgccaagagaagaagagaggaggccagacagagagaccaggagttctacatcccctacagacccaaggacttcgacagcgagagaggcctgagcatcagcggcgagggcggcgccttcgagcagcaggccgccggcgccgtgctggacctgatgggcgacgaggcccagaacctgaccagaggcagacagcagctgaagtgggacagaaagaagaagagattcgtgggccagagcggccaggaggacaagaagaagatcaagaccgagagcggcagatacatcagcagcagctacaagagagacctgtaccagaagtggaagcagaagcagaagatcgacgacagagacagcgacgaggagggcgccagcgacagaagaggccccgagagaagaggcggcaagagagacagaggccaggccggcgccagcagaccccacgcccccggcacccccgccggcagagtgagacccgagctgaagaccaagcagcagatcctgaagcagagaagaagagcccagaagctgcacttcctgcagagaggcggcctgaagcagctgagcgccagaaacagaagaagagtgcaggagctgcagcagggcgccttcggcagaggcgccagaagcaagaagggcaagatgagaaagagaatgtag

SEQ ID NO: 42310 - DNA, 4380 bp, Artificial Sequence
  derived and/or modified sequence
ccttctgcgttcccagcgcgcggcccgaatggcggccgacaagggcccggcggctggacctcggtcgcgagctgccatggcccagtggaggaagaagaaagggctccggaagcgccgaggcgcggcctcccaggcccgcggcagcgactcggaggacggcgagtttgagatccaggcggaagatgacgcccgggcccggaagctgggacctggaagacccctgcccaccttccccacctcggaatgcacctcggatgtggagccggacacccgggagatggtgcgtgcccagaacaagaagaagaagaagtctggaggcttccagtccatgggcctgagctacccggtgttcaaaggcatcatgaagaaggggtacaaggtgccaacacccatccagaggaagaccatcccggtgatcttggatggcaaggacgtggtggccatggcccggacgggcagtggcaagacagcctgcttcctcctcccaatgttcgagcggctcaagacccacagtgcccagaccggggcccgcgccctcatcctctcgccgacccgagagctggccctgcagaccctgaagttcactaaggagctaggcaagttcactggcctcaagactgccctgatcctgggtggagacaggatggaagaccagtttgcagccctgcacgaaaatcccgacataattattgccacgcccggacggttggtgcatgtggctgtggaaatgagcctgaagctgcagagtgtggaatacgtggtgttcgatgaagctgaccggctttttgaaatgggtttcgcagagcagctgcaggagatcatcgcccgcctccccgggggccaccagacggtgctgttctccgccacgctgcccaaactgctggtggaatttgcccgggctggcctcacggagcccgtgctcatccggcttgacgtggataccaagctcaacgagcagctgaagacctccttcttcctcgtgcgggaggacaccaaggctgccgtgctgctccacctgctgcacaacgtggtgcggccccaggaccagaccgtggtgtttgtggccacgaagcaccacgccgagtacctcactgagctgctgacgacccagcgggtgagctgcgcccacatctacagtgccctagacccgacagcccgcaagatcaatctcgccaaattcacgcttggcaagtgctccactctcattgtgactgacctggccgcccgaggcctggacatcccgctgctggacaatgtcatcaactacagcttccccgccaagggcaaactcttcctgcaccgcgtgggccgtgtggctcgggctggccgaagtggcacagcctactccttggtggcccctgatgaaatcccctacctgctggatctgcacctgttcctgggccgctccctcaccctcgcccgacccctcaaggagccctcaggtgtggccggtgtggatggcatgctgggtcgggtgccacagagtgtggtggacgaggaggacagtggtctgcagagcaccctggaggcatcgctggagctacggggcctggcccgcgttgctgataacgcccagcagcagtatgtgcgctcacgcccggcgccctcgcctgagtccatcaagagggccaaggagatggaccttgtggggctgggcctgcaccccctcttcagctcgcgttttgaggaggaggagctgcagcggctgaggctggtggacagcataaagaactaccgctcccgggcgactatctttgagatcaacgcctccagccgagacctgtgcagccaggtgatgcgcgccaagcggcagaaggaccgcaaggccatcgcccgcttccagcagggacagcaggggcggcaggagcagcaggagggcccagtgggcccagccccgagccgcccagcactgcaggagaagcagcctgagaaggaggaggaggaggaggcgggagagagtgtggaggacattttctcagaggtcgtgggccggaagcggcagcggtcaggacccaacaggggagccaagaggcggagggaggaggcccggcagcgggaccaggaattctacatcccctaccggcccaaggactttgacagcgagcggggcctgagcatcagcggggaagggggagcctttgagcagcaggcagctggcgctgtcctggacttgatgggggatgaagcccagaacctgacgaggggccggcagcagctcaagtgggaccgtaagaagaagcggtttgtgggacagtcaggacaggaagacaagaagaagattaagacagagagcggccgctacatcagcagctcctacaagcgagacctctatcagaagtggaaacagaaacagaaaattgatgatcgtgactcggacgaagaaggggcatctgaccggcgaggcccagagcgaagaggtgggaagcgagaccgtggccaagcaggtgcatcccggccccacgccccaggcacccctgcaggccgagtccgcccggaactcaagaccaagcagcagatcctgaagcagcggcgccgggcccagaagctgcacttcctgcagcgtggtggcctcaagcagctctctgcccgcaaccgccgccgcgtccaggagctgcagcagggcgccttcggccggggtgcccgctccaagaagggcaagatgcggaagaggatgtgaggaccaggacccagccccgtggctccttgattggccttagggtgggcatcagcagacgttcccgtgcaccactgtgtgcctggccctgtgctgggcactgggggcactccctgcaggagccatcatctgtgaaaaggagcactgtatggccacagaagggcagcagctgcgtcagcctaagacagagacatttgaacagggccttgaagggtgtgcaggagttcgccagcaaagccaggcaggccaagacttgagttggcaactcagctgctgctgcttccatgtgttctgggttcagaggtcatggctgcaccggtcagagccctgagtgcctcagggtttggcaatggaatttttaatgtaataaatctttattgagcactgctggtggccaggagtgcggtctacttggggaactggaatggagagacccaggtactaaaatcccagctaacgtggcagaggagttgcgggtctcctgagggtgagttctgctgccttgtccatttagcgatgaggaaagtgaagctcagagcacaaaccaggtgccagaggcgggagttggtcccccttcctcccactggacatggttgcagctgggagtgggctgggggaggggaacaggatgcccagcccagggggcaaggacacagctgctcccctctggctatgaagaggttaacgcggcccctccacacctggaggtcagaacctggcctgtcctctgtcttcttgccacccaccccctgtttgaggttctgagaaggtcaagggcagccccagcagctggattctcaggctgggcccctcacctggcagagtccatagtggagggggccttggtgatctctcatctagcatggaccctgttctgagacctgacaaagagttttttttcatgccccaaccaccctggcagggagggcctggtctgatctcattttagaggcagttgccccacacatagccccttgaccttcccatcacctcctcatcagggcctgcatttatggagtgcttgctatgtgcccctcatggcaggcccacagcactctgaacaggcacagccctcccatcttcccaatgaggaaacggattcaggaagagccactcagtccacaccccattggaaatgtgggccctcctatctcagggtctctcaggggttccctctcccgctgctcacctgtgtcagggctaggaggcaggggctgcaggctcagcctgacccaggccggccagcatggcagagaggtcctgcatgaacagcttcacctgggggggcccagcacgaagtcacatcccagccccagagtcactgtccagcccccacccctcaacacgcgggggaggccgaaaggtagggcggggactggagatcccctcattaaaagaacagtgatgatggtggttcccagaggtggtgactgagatcctaaaccgttctgggttttgaaagcctcaggccaaccttcccaactgctgcgtgagcagacaccttcacagcttcctcgctgctgtcacctgcactatccaattagtattttcatttacatcaatcagctttattttcttgtaactggatcagtcatattcattggtttgtgacctactcttatctccgtgggtggctctccttttgttttaattaacttctttatgaatatgaacttaataaataccatggatccattgtaaaaact

SEQ ID NO: 42311 - protein, 1080 aa, Artificial Sequence
  derived and/or modified sequence
MPAKGRYFLNEGEEGPDQDALYEKYQLTSQHGPLLLTLLLVAATACVALIIIAFSQGDPSRHQAILGMAFLVLAVFAALSVLMYVECLLRRWLRALALLTWACLVALGYVLVFDAWTKAACAWEQVPFFLFIVFVVYTLLPFSMRGAVAVGAVSTASHLLVLGSLMGGFTTPSVRVGLQLLANAVIFLCGNLTGAFHKHQMQDASRDLFTYTVKCIQIRRKLRIEKRQQENLLLSVLPAHISMGMKLAIIERLKEHGDRRCMPDNNFHSLYVKRHQNVSILYADIVGFTQLASDCSPKELVVVLNELFGKFDQIAKANECMRIKILGDCYYCVSGLPVSLPTHARNCVKMGLDMCQAIKQVREATGVDINMRVGIHSGNVLCGVIGLRKWQYDVWSHDVSLANRMEAAGVPGRVHITEATLKHLDKAYEVEDGHGQQRDPYLKEMNIRTYLVIDPRSQQPPPPSQHLPRPKGDAALKMRASVRMTRYLESWGAARPFAHLNHRESVSSGETHVPNGRRPKSVPQRHRRTPDRSMSPKGRSEDDSYDDEMLSAIEGLSSTRPCCSKSDDFYTFGSIFLEKGFEREYRLAPIPRARHDFACASLIFVCILLVHVLLMPRTAALGVSFGLVACVLGLVLGLCFATKFSRCCPARGTLCTISERVETQPLLRLTLAVLTIGSLLTVAIINLPLMPFQVPELPVGNETGLLAASSKTRALCEPLPYYTCSCVLGFIACSVFLRMSLEPKVVLLTVALVAYLVLFNLSPCWQWDCCGQGLGNLTKPNGTTSGTPSCSWKDLKTMTNFYLVLFYITLLTLSRQIDYYCRLDCLWKKKFKKEHEEFETMENVNRLLLENVLPAHVAAHFIGDKLNEDWYHQSYDCVCVMFASVPDFKVFYTECDVNKEGLECLRLLNEIIADFDELLLKPKFSGVEKIKTIGSTYMAAAGLSVASGHENQELERQHAHIGVMVEFSIALMSKLDGINRHSFNSFRLRVGINHGPVIAGVIGARKPQYDIWGNTVNVASRMESTGELGKIQVTEETCTILQGLGYSCECRGLINVKGKGELRTYFVCTDTAKFQGLGLN

SEQ ID NO: 42312 - DNA, 3243 bp, Artificial Sequence
  derived and/or modified sequence
atgcctgctaaaggcaggtacttcctgaatgagggcgaggagggcccagatcaagacgcactgtacgagaagtaccagctgactagccagcacggacccctcctcctgactctgttgttggtggccgcaaccgcctgcgtggctctgatcattatcgcattctcacagggagatccttccaggcaccaagccatattaggcatggccttcctcgtgctagcagtctttgcggccttgagtgtgctgatgtacgttgagtgcttgctcaggcgctggctgcgagccttagctttgctcacctgggcttgtcttgttgcgctgggctatgtgcttgtgtttgatgcgtggacaaaagctgcttgcgcttgggaacaggtacctttcttcctttttatcgtgttcgtcgtttatacactgctgccgtttagtatgcgaggagcagttgccgtgggggccgtgagcactgcatctcatctcctcgtcctgggcagcttgatgggcggatttaccacaccatccgtaagggtcggcttgcaattactggcaaacgccgtcatcttcctgtgtgggaatctaacgggcgcgttccacaagcatcagatgcaggatgctagcagggatctcttcacatatactgtcaagtgtatccaaattcgtcgcaagctgcggattgagaagcgtcagcaggaaaacctgctgctatcagtgctgcccgcccacatcagtatggggatgaagttggcaattattgagagactgaaggaacacggcgataggcgctgcatgccggacaacaactttcatagcctgtatgtgaagaggcatcagaacgtgtctatcctatacgccgatattgtgggattcacacaactggccagcgactgttcccctaaagagctggtcgtagtgctaaatgaattattcggcaagttcgaccaaatcgccaaagctaatgaatgtatgcgaatcaaaatccttggcgactgttattactgtgtgagtggcttgcccgtcagcctgcccacacacgcccggaattgtgtgaaaatggggctcgatatgtgtcaggctattaaacaggttcgagaggccaccggagtggatatcaacatgcgcgttgggattcactcgggaaacgtactttgtggggtgatcggcctgcgtaaatggcagtatgacgtgtggtctcacgatgtctccctggctaacagaatggaggcagccggggtaccagggcgggtccacatcaccgaagccaccctgaaacacctggataaagcatatgaggtggaagacggccacggacagcaaagggacccctacctgaaggagatgaacatcaggacttatcttgtgatagatccaagatcccagcagccacctccgccctctcagcacctccctcggccaaagggcgacgcagcattaaagatgagggcatcagttaggatgacgcgttatctggagtcctggggcgctgccaggccattcgcccatctgaatcacagggaatccgtgtccagtggggagacccatgtccctaatggccggaggcctaaaagcgtacctcagcgacacagaagaacacccgaccgctctatgagtcccaagggacggtccgaggatgacagctatgacgacgaaatgctgtccgccatcgaagggctgtcaagcacccgcccgtgctgttctaagagtgacgacttctacacattcggttccatattcctggagaaagggttcgagagagagtataggctggctccaattcctagagccagacacgattttgcttgcgcatcactgatcttcgtgtgcattttgctcgtgcacgtgctgctgatgccacgcaccgcggcgctgggcgtgtctttcggactagtggcatgcgttctcggattagttctcgggctttgcttcgctacaaaattctctaggtgctgtccagcgcgcgggacgctgtgtactatctctgagcgggttgaaactcaaccactccttcgtcttaccctggctgtgttgaccataggctcactgcttaccgttgcaattattaatctccctctcatgccctttcaggtcccagagctgccggtgggcaacgagaccggattgttagctgcaagcagcaagacgagggcactgtgcgaacccctgccctattatacctgctcttgtgtcttaggctttattgcatgtagtgtgttcctgagaatgtctctcgagccaaaggttgtcctgttgacagtggcgctagttgcctacttggtactgtttaacttgtcaccctgctggcaatgggattgctgcgggcaaggactcggcaatctgaccaagcctaatgggaccacttccggcactccatcttgcagctggaaagacctcaagacaatgaccaatttttacctagtgttgttttatatcaccctgctgaccttgagtcgtcaaatagattactactgtagacttgattgcctctggaagaaaaagttcaaaaaggagcacgaagaatttgaaacgatggaaaacgtgaaccgattgctcctcgagaatgttctgccggcgcacgtcgctgcacacttcatcggtgacaagctgaacgaggactggtaccatcaatcctacgattgcgtttgcgtgatgtttgccagtgtaccggatttcaaggtcttctataccgagtgtgacgtaaataaggaggggctggaatgcctccgactgttgaatgagatcattgcagacttcgacgagctcttactgaagcccaagttttccggggtagaaaaaatcaaaaccatagggtcaacttatatggcagccgccgggctgagcgtggcaagtggtcacgagaaccaggagctggagcggcaacatgcccacatcggagtgatggttgaatttagcatagccctgatgagtaagctggacggaatcaatcggcattcattcaactccttcaggcttagagtcggcatcaaccatggtccggtgattgccggtgtcataggggctcgcaaaccccaatacgatatctggggtaacactgtgaacgtggcttccagaatggagtccacaggggaactgggcaagatccaggtcactgaagaaacatgcactattctccagggcctgggctactcctgtgagtgccgagggttaatcaacgtaaagggaaaaggcgagttgcggacatatttcgtctgcaccgacactgccaaatttcagggcttggggctgaattag

SEQ ID NO: 42313 - DNA, 3243 bp, Artificial Sequence
  derived and/or modified sequence
atgcctgcaaagggccgttattttcttaacgaaggcgaggaaggcccggaccaggacgccctgtacgaaaagtatcagctcacatctcaacatggtccattactgctcacacttctgcttgtggcagccactgcgtgtgtagccctcatcattattgctttctcgcagggcgacccttccaggcaccaggcaatcctcggcatggccttcctcgttctggccgtttttgccgccctctctgtcttgatgtatgtggagtgtctcctgagaaggtggctcagggccttggccctgctcacttgggcttgcctggtggccttaggttatgtgctggtcttcgacgcctggaccaaagcagcgtgtgcctgggaacaggtgcccttcttcctgttcatcgtctttgtagtttatactcttctccccttttccatgcggggagccgtggctgtgggagcagtgtcgacggccagccacctgttagtcctgggctcacttatgggaggattcacaacacctagtgtgagggtaggccttcagctgctggcgaacgcagtcatctttctgtgtggtaacttaaccggagccttccacaagcaccagatgcaggatgcatctcgagacctattcacttacacagtgaagtgcattcagatccggcgaaaacttcgcatcgagaagagacagcaggagaatctcttactctcagttttacccgcccatatcagtatggggatgaagttggcaataattgagcggcttaaggaacacggcgacagacgatgtatgcctgacaataattttcacagcctttatgtcaagagacaccagaacgtgagcattctctacgccgatattgtgggatttacgcagctggcgtccgattgtagccccaaggagctggtggttgttctgaatgagctgttcggaaagttcgaccagatcgcgaaggctaacgagtgcatgcgcattaaaatactgggggactgctactattgtgtaagcggattgcctgtgtcactgcccacccacgccagaaactgcgtcaagatgggcttagacatgtgtcaagccatcaagcaggtgagggaggccacgggggtcgatattaacatgagagtgggcatccatagtgggaacgtcctttgtggcgtcatcggcctgcgaaagtggcaatacgatgtctggtcccacgatgtgtcactcgctaacaggatggaagcggccggtgtaccaggccgagtgcacattaccgaagcaaccctcaagcacctggacaaagcttacgaggttgaagatggacacggacagcagcgcgatccatacctgaaggaaatgaacattcgcacatacctggtgatcgatccaagatcacaacagccgcccccccccagccagcacctgcccaggcctaaaggcgacgcagctttgaagatgcgcgcgagtgtgagaatgactagatatctggaaagctggggagctgcccgcccgtttgcccacctcaatcatagagagagtgtctcctcgggcgagacccacgttcctaatggccggcgccccaagagcgtgcctcagaggcatcgccggacccccgaccgtagtatgtcccctaagggccggtctgaggacgattcctacgatgacgagatgctaagcgccattgaaggactgtcgtcgacaaggccttgttgctctaaaagtgacgatttctacacttttgggagcattttcctcgagaaagggtttgaaagggaatatagactggctccaatcccaagagcacgtcacgacttcgcttgtgcatcactgatattcgtgtgtattctgcttgttcatgtacttctgatgcctcgtaccgctgcgctaggagtgtctttcggcctggtggcttgtgtcctgggtctcgttctgggcttgtgcttcgcaactaagttttcacgatgttgtcccgctagggggacactctgtactatatctgagcgggtcgagactcagcctctcctacggctgacactcgccgtgctgaccattgggtctttgcttacagtcgccatcatcaatctaccgctcatgccatttcaggttcctgagctaccagtggggaacgaaaccgggcttttggctgcatctagcaagacaagagctctctgcgagcccctgccttactatacttgctcttgcgtcctggggttcattgcttgctcagttttcctgagaatgagcttagaacccaaggtcgtattgctaaccgtggctttggtggcttatctcgtgctctttaacctgagtccttgctggcagtgggactgctgcggacaggggcttgggaatctcaccaagccaaacggtacaacctccggcaccccttcctgctcttggaaggacctcaaaaccatgaccaacttttatctcgtgctcttttacatcacactgctgacacttagtagacagattgattattactgcagattggactgtctgtggaagaagaaatttaagaaggaacacgaagagttcgagacaatggagaatgttaatagactattactagagaatgtgctgccagcccacgtcgccgcacacttcattggtgacaaacttaacgaagactggtaccaccagtcttatgattgcgtgtgtgtgatgttcgctagcgtccctgatttcaaagtcttctacacagagtgcgacgtgaacaaagaaggtttagagtgtttgcgtctgctgaatgaaatcatcgccgacttcgacgaactcttgctgaagcctaaattttctggagtcgagaaaatcaagacaatcggtagcacttatatggctgcagccggcctctctgtggcttccggtcatgaaaaccaagagctagagaggcagcacgcccacattggggtgatggtggagttctccattgctcttatgagcaagctggatgggattaaccggcatagcttcaatagttttcggctcagggtcggaattaaccatggtcccgtcatcgcaggcgttatcggggctagaaagcctcagtatgacatctggggtaatacagttaacgttgcgtcccgaatggaaagcactggcgaactcggaaaaatccaggtgacggaggagacatgtacaattctccagggattgggatactcatgtgaatgtcgggggctgattaacgtaaagggcaagggagaactcaggacgtatttcgtttgtacagacacagcgaagtttcagggcctgggcttgaactag

SEQ ID NO: 42314 - DNA, 6130 bp, Artificial Sequence
  derived and/or modified sequence
agctgaggaactgcgtgtggagtcagcccagtctggatgcacaggaggatgctggcggcacagtgagtgaggcctggtgccagagctgtgcggaccccttgttggccatggagcagcaggcccagaggccctctccccagccctgcttgcctgcctcggagaggacagaggcctaggcccacgggggagggtgttggcagacagatgccctccaggccctggggcctccttaacggccccttaacgacacgcgtgccaagggtggaggatgccagccaaggggcgctacttcctcaacgagggcgaggagggccctgaccaagatgcgctctacgagaagtaccagctcaccagccagcatgggccgctgctgctcacgctcctgctggtggccgccactgcctgcgtggccctcatcatcattgccttcagccagggggacccctccagacaccaggccattctgggcatggcgttcctggtgctggcggtgtttgcggccctctctgtgctgatgtacgtcgagtgtctcctgcggcgctggctcagggccttggcgctgctcacctgggcctgcttggtggcgctgggctatgtgctggtgttcgacgcatggacaaaggcggcctgtgcgtgggagcaggtgcccttcttcctgttcattgtcttcgtggtgtacacactactgcccttcagcatgcggggcgctgtcgccgttggggccgtctccactgcctcccacctcctggtgctcggttctttgatgggaggcttcacgacacccagtgtccgggtggggctgcagctgctggccaacgcagtcatcttcctgtgtgggaacctgacaggcgccttccacaagcaccaaatgcaggatgcatcccgggacctcttcacctacactgtgaagtgcatccagatccgccggaagctgcgcatcgagaagcgccagcaggagaacctgctgctgtcagtgcttccggcccacatctccatgggcatgaagctggccatcatcgaacggctcaaggagcatggtgaccgtcgctgcatgcctgacaacaacttccacagcctctacgtcaagaggcaccagaatgtcagcatcctctatgcggacatcgtgggcttcacgcagctggccagcgactgttctcccaaggagctggtggtggtgctgaatgagctctttggcaagttcgaccagatcgccaaggccaacgagtgcatgcgaatcaagatcctcggcgactgctactactgtgtatcgggcctgcccgtgtcgctgcctacccacgcccggaactgcgtgaagatggggctggacatgtgccaggccatcaagcaggtgcgggaggccacgggcgtggacatcaacatgcgtgtgggcatacactcggggaatgtgctgtgcggggtcatcgggctgcgcaagtggcagtatgacgtgtggtcccacgacgtgtccctggccaaccggatggaggcagccggagtacccggccgggtgcacatcacggaggccacgctaaagcacctggacaaggcgtacgaggtggaggatgggcacgggcagcagcgggacccctacctcaaggagatgaacatccgcacctacctggtcatcgacccccggagccagcagccacccccgcccagccaacacctccccaggcccaagggggacgcggccctgaagatgcgggcgtcagtgcgcatgacccggtacctcgagtcctggggggcggcacggccctttgcacatctcaaccaccgtgagagcgtgagcagtggtgagacccacgtccccaacgggcggaggcctaagagcgttccccagcgccaccgccggaccccagacagaagcatgtcccccaaggggcggtcggaggatgactcgtacgatgacgagatgctgtcagccattgaggggctcagctccacgaggccctgctgctccaagtccgatgacttctacacctttgggtccatcttcctggagaagggctttgagcgcgagtaccgcctggcacccatcccccgggcccgccacgactttgcctgcgccagcctgatcttcgtctgcatcctgctcgtccatgtcctgctcatgcccaggacggcggcactgggtgtgtccttcgggctggtggcctgtgtactggggctggtgctgggcctgtgctttgccaccaagttctcgaggtgctgcccagctcgggggacgctctgcactatctctgagagggtggagacacagcccctgctgaggctgaccctggccgtcctgaccatcggcagcctgctcactgtggccatcatcaacctgcccctgatgcctttccaagttccagagctgcctgttggcaatgagacaggcctactggccgcgagcagcaagacaagagccctgtgtgagcccctcccgtactacacctgcagctgtgtcctgggcttcatcgcctgctcggtcttcctgaggatgagcctggagccaaaggttgtgctgctgacagtggccctggtggcctacctggtgctcttcaacctctccccatgctggcagtgggactgctgcggccaaggcctgggcaacctcaccaagcccaacggcaccaccagtggcacccctagctgttcctggaaggacctgaagaccatgaccaatttctacctggtcctgttctacatcaccctgcttacactctccagacagattgactattactgccgcttggactgcctatggaagaagaagttcaagaaggagcacgaggagtttgagaccatggagaacgtgaaccgccttcttctggagaacgtcctgccagcccacgtggctgcccactttatcggtgacaagttaaacgaggactggtaccatcagtcctatgactgcgtctgtgtcatgtttgcctccgtgccggacttcaaagtgttctacacagagtgcgatgtcaacaaagaagggctggagtgcctacgcctgctcaatgagatcattgccgacttcgacgagctcctactgaagcccaagttcagcggcgtggagaagatcaagaccatcggcagcacgtacatggcagctgcagggctcagcgtcgcctcagggcacgagaaccaggagctggagcggcagcatgcccacattggtgtcatggtggagttcagcatcgccctgatgagtaagctggacggcatcaacaggcactccttcaactccttccgcctccgcgtcggcataaaccatgggcctgtgattgctggagtgattggggcccgaaaacctcagtatgacatctggggaaacactgtcaatgtggccagccgaatggaaagcactggagaacttgggaaaatccaggttaccgaggagacctgcaccatcctccagggcctcgggtactcttgtgaatgccgtggcctgatcaacgtcaaaggcaaaggcgagctgaggacttactttgtctgtacggacactgccaagtttcaggggctggggctgaactgagggctcctgctggattccgaaaaggccgggaagccagtctccttccctgaagcaagcccaggagaagactctccgccccacgccaatcccaaaggcatgcagatggctgtgcatgttggcttctttggacctgcactggaggatttctcagacacatgcaccagattctggctcgaagcagccactgagccataatgcgcaggggaggccagaagctctgtgcctggtctgtaacagtttccaggccagctggagaatgttcactggttcggggctgactttgagatctttgttccctgaggtgccaggcaggcaactttagcacatgatgaaaacagacttccacctcagtggcctgtgggcacgcacaagtgaggtctgtttttctagacaccaagggggagtaagctgagctgtctagcacggattggagactccctctccctggtgggcctggcaatgacagcatttctcacagaggcattctggtaaatgaagctgaaaggggtgttttacatctgtaaacggtttcaaacaggtagagagaaaaacaccacaattaacactgttactttttgccttgtctggcatgtttgttttaaatgaatacattaatggggtttttatccttttgaatgacttttcagacactagacataaatctcttccctccagtgtatgctctgcctttttaaccactgacatgtaaggaggactactgtctagcatcagcttatggggtcagctggctgtggggatagagtcctgaggaatgtggtcacagcaagaaggcggggagcagcagagccttgcctttgaatgaggcagcttgtgaggcaagcattctggagagaggtgctttgaaagtaaggtgcggcctttcacctcttccttgattactcacacatctttgcgttctcccctgccgtccttcaactgtatcttacttttcttaccagaaaggaatggagtctgtttagagacaacttggacaacctgtgagtgcatctcttctttcctttagtcttcacagctaactctggagagcttcaaaactagaaggatctactccgcatgggtgcatgcagaggctcctggatctgggaagcccgccccctcacaaatgctgagccgttcttgctctgaaactgcgtgagtcaaggcaaatgcaaaaagccaggttttggggatgtgtcttactgtgcttcaacttcccaaggaattgaaagtcaacctaactgtaacaacagggtgagaaatgaccaaactgcccgtgactttttctgaatggacttcataaccggaagacttaaccggtggcctcatcaccagagcatcgccaggatttctaatgcactcagtttccctacatagcagggattcttagctaggtgtccccatgaaccccgtaaagttctacacaaagtcttgcatacaggagcctttacaagatgattatacagggttgcagattgggtgactgaccagacttgttggggtcctgggatgagttgccccgggctgcaaattaagagtacagctaagtgcgggggtggcggtggagggaacgaaaattgaacctgtctgcctgtgctgtgtcgtgtggctttatcagcccgaggaagggcaggtgtattctaatttgcacaaaggtgctgggtagactagtggcagctctcatgtgctgcacataagtggaatcagtatgaatagaagaacttgctgtataaaggaatttcatggcaacaatgctggtaagggcaattagcctcgcttaagttgccttttttacacaccaaaactttttacatgaagggctggtttcacatgaatactatactgaaatctgtgctctcaagatctagcagtgaccagggctgcccggcgggggctctcctggcaagtcaggaaggtttctgttgctaatataacatagaaacacattagtgcactgggcctctctgaggtcagcatatttgtactcttggaatatttgtttttttcttcagtaacaacagaaaccccagttgggagtttaacaaataactgactaccactcactcatgcatttttatttccaattaaagcaaagcactgtgctgtgctcagataataatagtttgtaagtaaaagtttttagttttcagtgttcaggttatagaatataactgaccataaaaattacctgcaggtattttctttttatgaacttgtttttaaattaccaagtaattactggtgtcattttgttttatgacagacacacgtatctaacaaacaaacaaacagtgaccttctccatgggtcaaggacttccttacaatttctcctgagttaacttttgtgaaaataatacctaaggttttctggcttattgaggaaatttcctaacaaacaaacaaacaaacaaacagaagagaagatcattaaccactgtatactttgtgtatataataggtcagtgtaaagaaatatgatttgaggtggtgcatgcaagtaactagggtttattctatataatgaatatttatagatctgtaacatttgtttcaaaatgctgtttcatttttataaagtaccagtgtttagctgctttttatacattaaattagcaatttg

SEQ ID NO: 42315 - DNA, 6162 bp, Artificial Sequence
  derived and/or modified sequence
gtggaaggagccttcggatggagctgaggaactgcgtgtggagtcagcccagtctggatgcacaggaggatgctggcggcacagtgagtgaggcctggtgccagagctgtgcggaccccttgttggccatggagcagcaggcccagaggccctctccccagccctgcttgcctgcctcggagaggacagaggcctaggcccacgggggagggtgttggcagacagatgccctccaggccctggggcctccttaacggccccttaacgacacgcgtgccaagggtggaggatgccagccaaggggcgctacttcctcaacgagggcgaggagggccctgaccaagatgcgctctacgagaagtaccagctcaccagccagcatgggccgctgctgctcacgctcctgctggtggccgccactgcctgcgtggccctcatcatcattgccttcagccagggggacccctccagacaccaggccattctgggcatggcgttcctggtgctggcggtgtttgcggccctctctgtgctgatgtacgtcgagtgtctcctgcggcgctggctcagggccttggcgctgctcacctgggcctgcttggtggcgctgggctatgtgctggtgttcgacgcatggacaaaggcggcctgtgcgtgggagcaggtgcccttcttcctgttcattgtcttcgtggtgtacacactactgcccttcagcatgcggggcgctgtcgccgttggggccgtctccactgcctcccacctcctggtgctcggttctttgatgggaggcttcacgacacccagtgtccgggtggggctgcagctgctggccaacgcagtcatcttcctgtgtgggaacctgacaggcgccttccacaagcaccaaatgcaggatgcatcccgggacctcttcacctacactgtgaagtgcatccagatccgccggaagctgcgcatcgagaagcgccagcaggagaacctgctgctgtcagtgcttccggcccacatctccatgggcatgaagctggccatcatcgaacggctcaaggagcatggtgaccgtcgctgcatgcctgacaacaacttccacagcctctacgtcaagaggcaccagaatgtcagcatcctctatgcggacatcgtgggcttcacgcagctggccagcgactgttctcccaaggagctggtggtggtgctgaatgagctctttggcaagttcgaccagatcgccaaggccaacgagtgcatgcgaatcaagatcctcggcgactgctactactgtgtatcgggcctgcccgtgtcgctgcctacccacgcccggaactgcgtgaagatggggctggacatgtgccaggccatcaagcaggtgcgggaggccacgggcgtggacatcaacatgcgtgtgggcatacactcggggaatgtgctgtgcggggtcatcgggctgcgcaagtggcagtatgacgtgtggtcccacgacgtgtccctggccaaccggatggaggcagccggagtacccggccgggtgcacatcacggaggccacgctaaagcacctggacaaggcgtacgaggtggaggatgggcacgggcagcagcgggacccctacctcaaggagatgaacatccgcacctacctggtcatcgacccccggagccagcagccacccccgcccagccaacacctccccaggcccaagggggacgcggccctgaagatgcgggcgtcagtgcgcatgacccggtacctcgagtcctggggggcggcacggccctttgcacatctcaaccaccgtgagagcgtgagcagtggtgagacccacgtccccaacgggcggaggcctaagagcgttccccagcgccaccgccggaccccagacagaagcatgtcccccaaggggcggtcggaggatgactcgtacgatgacgagatgctgtcagccattgaggggctcagctccacgaggccctgctgctccaagtccgatgacttctacacctttgggtccatcttcctggagaagggctttgagcgcgagtaccgcctggcacccatcccccgggcccgccacgactttgcctgcgccagcctgatcttcgtctgcatcctgctcgtccatgtcctgctcatgcccaggacggcggcactgggtgtgtccttcgggctggtggcctgtgtactggggctggtgctgggcctgtgctttgccaccaagttctcgaggtgctgcccagctcgggggacgctctgcactatctctgagagggtggagacacagcccctgctgaggctgaccctggccgtcctgaccatcggcagcctgctcactgtggccatcatcaacctgcccctgatgcctttccaagttccagagctgcctgttggcaatgagacaggcctactggccgcgagcagcaagacaagagccctgtgtgagcccctcccgtactacacctgcagctgtgtcctgggcttcatcgcctgctcggtcttcctgaggatgagcctggagccaaaggttgtgctgctgacagtggccctggtggcctacctggtgctcttcaacctctccccatgctggcagtgggactgctgcggccaaggcctgggcaacctcaccaagcccaacggcaccaccagtggcacccctagctgttcctggaaggacctgaagaccatgaccaatttctacctggtcctgttctacatcaccctgcttacactctccagacagattgactattactgccgcttggactgcctatggaagaagaagttcaagaaggagcacgaggagtttgagaccatggagaacgtgaaccgccttcttctggagaacgtcctgccagcccacgtggctgcccactttatcggtgacaagttaaacgaggactggtaccatcagtcctatgactgcgtctgtgtcatgtttgcctccgtgccggacttcaaagtgttctacacagagtgcgatgtcaacaaagaagggctggagtgcctacgcctgctcaatgagatcattgccgacttcgacgagctcctactgaagcccaagttcagcggcgtggagaagatcaagaccatcggcagcacgtacatggcagctgcagggctcagcgtcgcctcagggcacgagaaccaggagctggagcggcagcatgcccacattggtgtcatggtggagttcagcatcgccctgatgagtaagctggacggcatcaacaggcactccttcaactccttccgcctccgcgtcggcataaaccatgggcctgtgattgctggagtgattggggcccgaaaacctcagtatgacatctggggaaacactgtcaatgtggccagccgaatggaaagcactggagaacttgggaaaatccaggttaccgaggagacctgcaccatcctccagggcctcgggtactcttgtgaatgccgtggcctgatcaacgtcaaaggcaaaggcgagctgaggacttactttgtctgtacggacactgccaagtttcaggggctggggctgaactgagggctcctgctggattccgaaaaggccgggaagccagtctccttccctgaagcaagcccaggagaagactctccgccccacgccaatcccaaaggcatgcagatggctgtgcatgttggcttctttggacctgcactggaggatttctcagacacatgcaccagattctggctcgaagcagccactgagccataatgcgcaggggaggccagaagctctgtgcctggtctgtaacagtttccaggccagctggagaatgttcactggttcggggctgactttgagatctttgttccctgaggtgccaggcaggcaactttagcacatgatgaaaacagacttccacctcagtggcctgtgggcacgcacaagtgaggtctgtttttctagacaccaagggggagtaagctgagctgtctagcacggattggagactccctctccctggtgggcctggcaatgacagcatttctcacagaggcattctggtaaatgaagctgaaaggggtgttttacatctgtaaacggtttcaaacaggtagagagaaaaacaccacaattaacactgttactttttgccttgtctggcatgtttgttttaaatgaatacattaatggggtttttatccttttgaatgacttttcagacactagacataaatctcttccctccagtgtatgctctgcctttttaaccactgacatgtaaggaggactactgtctagcatcagcttatggggtcagctggctgtggggatagagtcctgaggaatgtggtcacagcaagaaggcggggagcagcagagccttgcctttgaatgaggcagcttgtgaggcaagcattctggagagaggtgctttgaaagtaaggtgcggcctttcacctcttccttgattactcacacatctttgcgttctcccctgccgtccttcaactgtatcttacttttcttaccagaaaggaatggagtctgtttagagacaacttggacaacctgtgagtgcatctcttctttcctttagtcttcacagctaactctggagagcttcaaaactagaaggatctactccgcatgggtgcatgcagaggctcctggatctgggaagcccgccccctcacaaatgctgagccgttcttgctctgaaactgcgtgagtcaaggcaaatgcaaaaagccaggttttggggatgtgtcttactgtgcttcaacttcccaaggaattgaaagtcaacctaactgtaacaacagggtgagaaatgaccaaactgcccgtgactttttctgaatggacttcataaccggaagacttaaccggtggcctcatcaccagagcatcgccaggatttctaatgcactcagtttccctacatagcagggattcttagctaggtgtccccatgaaccccgtaaagttctacacaaagtcttgcatacaggagcctttacaagatgattatacagggttgcagattgggtgactgaccagacttgttggggtcctgggatgagttgccccgggctgcaaattaagagtacagctaagtgcgggggtggcggtggagggaacgaaaattgaacctgtctgcctgtgctgtgtcgtgtggctttatcagcccgaggaagggcaggtgtattctaatttgcacaaaggtgctgggtagactagtggcagctctcatgtgctgcacataagtggaatcagtatgaatagaagaacttgctgtataaaggaatttcatggcaacaatgctggtaagggcaattagcctcgcttaagttgccttttttacacaccaaaactttttacatgaagggctggtttcacatgaatactatactgaaatctgtgctctcaagatctagcagtgaccagggctgcccggcgggggctctcctggcaagtcaggaaggtttctgttgctaatataacatagaaacacattagtgcactgggcctctctgaggtcagcatatttgtactcttggaatatttgtttttttcttcagtaacaacagaaaccccagttgggagtttaacaaataactgactaccactcactcatgcatttttatttccaattaaagcaaagcactgtgctgtgctcagataataatagtttgtaagtaaaagtttttagttttcagtgttcaggttatagaatataactgaccataaaaattacctgcaggtattttctttttatgaacttgtttttaaattaccaagtaattactggtgtcattttgttttatgacagacacacgtatctaacaaacaaacaaacagtgaccttctccatgggtcaaggacttccttacaatttctcctgagttaacttttgtgaaaataatacctaaggttttctggcttattgaggaaatttcctaacaaacaaacaaacaaacaaacagaagagaagatcattaaccactgtatactttgtgtatataataggtcagtgtaaagaaatatgatttgaggtggtgcatgcaagtaactagggtttattctatataatgaatatttatagatctgtaacatttgtttcaaaatgctgtttcatttttataaagtaccagtgtttagctgctttttatacattaaattagcaatttgaaaaactcaaa

SEQ ID NO: 42316 - DNA, 3243 bp, Artificial Sequence
  derived and/or modified sequence
atgcctgccaagggccgctacttcctgaatgaaggagaggagggccctgaccaggatgccctgtatgagaagtaccagctgaccagccagcacggccccctgctgctgaccctgctgctggtggccgccacagcctgtgtggccctgatcatcatcgccttcagccagggcgaccccagccgccaccaggccatcctgggcatggccttcctggtgctggccgtgtttgctgccctgtctgtgctgatgtatgtggagtgcctgctgcggcgctggctgcgggccctggccctgctgacctgggcctgcctggtggccctgggctacgtgctggtgtttgatgcctggaccaaggccgcctgtgcctgggagcaggtgcccttcttcctgttcatcgtgtttgtggtgtacaccctgctgcccttctccatgagaggagctgtggccgtgggcgctgtgtccacagccagccacctgctggtgctgggcagcctgatgggcggcttcaccaccccatctgtgcgggtgggcctgcagctgctggccaatgctgtgatcttcctgtgtggcaacctgactggagccttccacaagcaccagatgcaggatgccagccgggacctcttcacctacacagtgaagtgcatccagatccggaggaagctgcgcatcgagaagaggcagcaggagaacctgctgctgtctgtgctgcctgcccacatctccatgggcatgaagctggccatcatcgagcggctgaaggagcacggggaccggcgctgcatgccagacaacaacttccacagcctgtatgtgaagaggcaccagaatgtgtccatcctgtatgctgacatcgtgggcttcacccagctggccagtgactgcagccccaaggagctggtggtggtgctgaatgagctgtttgggaagtttgaccagatcgccaaggccaatgaatgcatgaggatcaagatcctgggggactgctactactgtgtgtctggcctgcctgtgtccctgcccacccacgccaggaactgtgtgaagatgggcctggacatgtgccaggccatcaagcaggtgcgggaggccactggagtggacatcaacatgagggtgggcatccacagcggaaatgtgctgtgtggggtgattggcctgaggaagtggcagtatgatgtgtggagccatgatgtgtccctggccaacaggatggaggccgccggcgtgcccggccgggtgcacatcacagaggccaccctgaagcacctggacaaggcctatgaggtggaggatggccacggccagcagagggacccctacctgaaggagatgaacatccgcacctacctggtgattgaccccaggagccagcagcccccaccacccagccagcacctgccccggcccaagggagatgctgccctgaagatgagggcctctgtgaggatgacccgctacctggagagctggggcgccgcccggccctttgcccacctgaaccaccgggagagcgtgagcagcggggagacccacgtgcccaatggaagaagacccaagtctgtgccccagaggcacaggaggaccccagaccgctccatgagccccaagggccgctcagaagatgacagctatgatgatgagatgctgagcgccatcgagggcctgagcagcacccggccctgctgcagcaagagtgatgacttctacaccttcggcagcatcttcctggagaagggctttgagcgggagtaccgcctggcccccatcccccgggcccggcatgactttgcctgtgccagcctcatctttgtgtgcatcctgctggtgcacgtgctgctgatgcccaggacagctgccctgggcgtgtcctttggcctggtggcctgtgtgctgggcctggtgctgggcctgtgctttgccaccaagttcagccgctgctgcccagcccggggcaccctgtgcaccatcagcgagcgggtggagacccagcccctgctgcggctgaccctggccgtgctgaccatcggcagcctgctgactgtggccatcatcaacctgcccctgatgcccttccaggtgcctgagctgcctgtgggcaatgaaacaggcctgctggccgccagcagcaagacccgggccctgtgtgagcccctgccctactacacctgcagctgtgtgctgggcttcatcgcctgcagcgtcttcctgaggatgagcctggagcccaaggtggtgctgctgactgtggccctggtggcctacctggtgctcttcaacctgagcccctgctggcagtgggactgctgcggccagggcctgggcaacctgaccaagcccaacggcaccaccagcggcacccccagctgctcctggaaggacctgaagaccatgaccaacttctacctggtgctcttctacatcaccctgctgaccctgagccggcagattgactactactgccgcctggactgcctgtggaagaagaagttcaagaaggagcacgaggagtttgagaccatggagaatgtgaaccggctgctgctggagaatgtgctgcctgcccacgtggccgcccacttcatcggggacaagctgaatgaagactggtaccaccagagctatgactgtgtgtgtgtgatgtttgcctctgtgcctgacttcaaggtgttctacacagaatgtgatgtgaacaaggagggcctggagtgcctgcggctgctgaatgagatcatcgctgactttgatgagctgctgctgaagcccaagttctctggagtggagaagatcaagaccatcggcagcacctacatggctgctgctggcctgtctgtggccagcggccacgagaaccaggagctggagcggcagcacgcccacatcggcgtgatggtggagttcagcatcgccctgatgagcaagctggatggcatcaacagacacagcttcaacagcttccggctgcgggtgggcatcaaccacggccctgtgattgctggggtcatcggggccaggaagccccagtatgacatctggggcaacacagtgaatgtggccagcaggatggagagcactggagagctgggcaagatccaggtgacagaggagacctgcaccatcctgcagggcctgggctacagctgtgaatgtcggggcctcatcaacgtgaagggcaaaggagagctgcggacctactttgtgtgcacagacacagccaagttccagggcctgggcctgaactag

SEQ ID NO: 42317 - DNA, 3243 bp, Artificial Sequence
  derived and/or modified sequence
atgcccgccaagggccggtacttcctgaacgagggcgaggagggcccagaccaggacgctttgtatgagaaatatcagttgacttcacagcatggacccctgcttctgacactcctgctagtggctgccacggcctgcgtcgcactgattataatcgcattctctcaaggtgatccatcacgccaccaggccattctcgggatggcatttctcgtgttggctgtctttgcagcactgagtgtgcttatgtatgtcgagtgcctgctcagacgctggttgagagcactcgcgctgcttacatgggcttgcctcgtcgccctcggatacgttctcgtttttgatgcctggactaaggcagcctgcgcgtgggagcaagttccgttcttcctgtttattgtctttgtcgtatacacgttgcttcccttctccatgagaggcgccgtggcagttggggccgtgtctacagccagccacctgctggtgctcggctctttgatgggcggattcacgacccccagcgtaagagtaggtcttcaactgcttgccaacgcagtgatattcctgtgtggtaacctgaccggcgccttccacaagcaccagatgcaagatgcgtctagagatctatttacatatacagttaaatgtatccagattaggcgaaaactaaggatcgaaaagcgccaacaggagaatctgctgctgagcgttctacctgcgcatattagtatgggcatgaagcttgctataatcgagaggctgaaagagcacggtgataggcggtgtatgccggataataacttccacagtctttatgttaaacgacaccagaatgtcagcattctgtatgctgatatcgtgggcttcactcagttagctagcgattgttctccaaaagagcttgtcgtggtcctgaatgaactcttcggcaaattcgaccaaattgcgaaagccaatgaatgcatgcgcatcaaaatcctcggtgattgttattactgcgtttccggactgcctgtgtctctgccaactcatgctcgaaattgtgttaagatgggacttgatatgtgtcaggcaattaaacaagtccgagaagcgactggagtcgatataaacatgagggtcggtattcacagcggaaatgtcctgtgtggcgtgattggcctccgtaagtggcaatatgacgtgtggtcacatgatgtgagtcttgccaaccgcatggaagctgctggtgttcctggtcgggtgcacattaccgaggctacccttaagcacctggacaaggcttatgaggttgaggacgggcacggtcagcagcgagatccgtacctcaaagaaatgaatatcaggacctatctcgttattgatccgcgctcacaacagccaccgccaccatctcagcacctgccccggcccaagggggatgccgccttgaaaatgcgggcctccgtccggatgactcgctacctagagtcctggggcgcagcacgcccctttgcccacttgaatcaccgagaatctgtttctagcggagaaactcacgttccaaatggccggcgacccaagtccgttccccagcgccatcgcaggactccagatcgaagcatgagtcctaagggcaggtcagaagacgacagctatgacgatgaaatgctgagcgctatcgaagggttgtcaagcacccgaccctgttgtagtaagtccgacgatttctatacattcgggtcgatatttctggagaagggctttgaaagagaatacaggctcgccccaataccacgcgcccgccatgattttgcgtgtgcctctctgatctttgtctgtattctattggtgcacgttctgctgatgccacggacagccgcgctaggggtctcatttggcctggtcgcgtgtgtcttaggcctggtgctcggcctctgctttgccactaaattctcacgttgttgtcccgcacgtggcacattatgtacaatcagtgagcgtgtcgagactcagcccctgctcaggttaactctcgctgtactgacaataggttctctgttaacagtcgcaataattaatctgccactcatgccatttcaagtgccagaacttccggtgggtaatgagaccggcctgctcgctgccagctccaagactagagccttgtgtgagcctttaccctactacacctgcagctgtgtcctggggtttatcgcctgttccgtgtttcttagaatgagcctagaaccaaaggtggttttactgacagtggctcttgtggcctatctcgtcctgtttaatctgtctccttgttggcaatgggattgttgtggccagggactgggcaacctaaccaagccgaatggcaccacctccggtaccccctcatgctcttggaaggatctgaaaaccatgacaaacttttacctcgtgctgttttatatcactttgctgacactaagccgacagatagattactactgccgcctcgattgtttgtggaagaagaaattcaagaaggaacacgaagagtttgagaccatggagaacgttaaccgactcctcctggagaacgtgctgccagcccacgtggccgcccactttatcggggacaagctaaacgaagactggtatcaccaaagttatgactgcgtgtgtgtcatgttcgcctccgtcccagattttaaggtattttatacagagtgtgacgtgaacaaggagggtctggaatgcctgcgtctgttaaatgagattatcgctgactttgatgaattgctgctgaagcccaaatttagcggagtcgagaaaatcaagacgatcggctccacatacatggcggccgcagggctctccgtcgcctccggccatgaaaaccaggagcttgaaagacagcacgctcacatcggcgtgatggtggagttttctatcgctctcatgtcaaaacttgacggtatcaaccgtcacagttttaactcctttcgactgcgggtgggaatcaatcatggtccagtcatagcgggtgttattggcgctcgtaaacctcagtacgacatatggggcaacactgtgaatgttgcttcacgcatggagtccactggagagttaggcaaaatccaggttaccgaagagacatgtaccattctccagggcctcggctacagctgtgagtgcagaggacttataaacgtcaagggtaagggagagttgcgtacctatttcgtgtgtacagataccgcaaaatttcaaggcctggggctgaactag

SEQ ID NO: 42318 - DNA, 3243 bp, Artificial Sequence
  derived and/or modified sequence
atgcccgccaagggccggtacttcctgaacgagggcgaggagggcccggatcaggatgccctatatgagaaataccagctgacgtcacaacacgggcctctgctgcttactctactgcttgtcgctgcaacagcctgcgtagcactgattattatcgctttctctcagggcgacccctccagacaccaggccattctcggtatggcatttctcgtgttggccgtgttcgctgccctgtccgtcctcatgtatgtggagtgtctgctgcggcgatggttgcgggctctagccctgttaacgtgggcatgcctcgtggccctaggctacgtcctggtcttcgatgcttggactaaagccgcatgtgcctgggagcaagtgcctttctttctctttattgtctttgtggtgtacactcttctccctttctcaatgcgaggggccgtggctgtgggggccgtatccacagcgtcacatctgctggtcctgggtagtctgatggggggttttaccacgccatccgtacgtgtaggtttacagctgctggctaacgccgttatattcctgtgcggtaacctgaccggcgccttccacaagcaccagatgcaggatgccagccgcgatcttttcacctatactgtgaagtgtatacagatccggcgtaaactccgcattgaaaaacgacagcaggagaacctgttgctgtccgtgctgcccgcccatatcagcatgggcatgaaactagctataatagagcggctgaaggaacatggagataggaggtgtatgcccgacaataacttccatagcctgtatgtgaaaagacaccagaatgtttccattttatacgccgatatcgtgggcttcacccagctcgcctcagactgttccccaaaagagctggttgtcgtgctgaacgagctgttcgggaagttcgatcagatcgcgaaggcaaatgagtgtatgcggatcaagattctgggcgactgctactactgtgtgtccggattgcctgttagtttacccacccacgctaggaactgcgtgaagatggggctggatatgtgccaggccattaagcaagttagggaggccaccggagtcgatataaatatgagggtgggaattcactcaggcaacgtactctgcggagttatcgggttgcgcaagtggcagtacgacgtctggtcccatgatgtaagcctagctaacaggatggaagcggcgggcgtgcccggcagggtgcatatcaccgaggcgacgctcaaacatctggataaggcctatgaagttgaagacgggcatggacagcagcgggacccgtacctgaaagagatgaatatccggacatatctggtgattgaccctaggtcccagcagccgccgcccccctcgcagcacttgcctaggccaaagggtgacgccgcgctgaaaatgagagcctctgtaagaatgacacgttatctggaaagctggggagctgcacgccctttcgctcacctgaaccacagagagtctgtttcatctggagaaactcacgttccgaatggaagacgtcccaaatctgtgccgcagcgacaccggaggactcctgataggagtatgtccccgaaaggacgctctgaggacgactcgtatgacgacgagatgctctccgctatcgagggtctatcttccacacggccctgttgcagtaagtctgatgatttttacacttttggctctatttttttagagaagggtttcgaacgtgagtatcggctggccccaattcctcgcgctagacacgatttcgcgtgcgccagcctgattttcgtctgtattctgctggtgcacgtcctgttgatgccaaggactgcagctcttggggtatcctttggtctggtggcatgcgtcctggggctagttcttggcctttgttttgcgaccaagttttcaagatgctgtcctgctcgtgggactctctgcacaatttccgaacgggttgaaacccagcccctgctgagactgacgctcgccgtactgacaatcggtagcctgctgactgttgccatcattaacctgcccttgatgccattccaggttccagagctcccagtcggcaatgagaccggtctgctggcggcctcttctaaaactcgagcactgtgcgagcctctcccatattacacctgttcctgcgtgctcggtttcatagcctgcagtgtgttccttcggatgagtctggaaccaaaggtcgtcctattaacggtggctcttgtggcatacctggtgctgtttaatctaagcccctgctggcagtgggattgttgtggtcagggcctcgggaatctgacaaaacccaacggcacaacatccggcactcccagctgcagttggaaagacctaaaaacaatgaccaatttttatctggtgttattctacattacgctactgacactatcccgccaaattgactactactgtaggctcgactgtctgtggaagaaaaaattcaaaaaagagcatgaggagttcgaaaccatggagaacgtgaatcgcctcctgctggaaaacgttctcccggctcatgtcgccgcccacttcataggagacaagctgaatgaagattggtatcaccagtcctatgattgcgtgtgcgtaatgttcgctagcgtgccggattttaaggtcttctacactgaatgtgacgtaaataaagaaggactagagtgtctaagactcctgaatgaaattatcgccgactttgacgagctcctgctgaagcccaaatttagtggcgttgaaaagattaagaccattggcagcacatatatggccgccgccggtctcagcgtcgccagcggacacgagaatcaggagctagaacgccaacacgcccacatcggcgtgatggtggaattctcaattgcccttatgtcgaaacttgacggcatcaacagacattccttcaactcattccggctgagagtaggcatcaatcacggccccgtgattgccggagtcatcggagcccgtaaaccccagtatgacatatggggtaataccgttaatgtggctagtcgcatggagtctaccggcgagttaggaaaaatccaggtgaccgaagagacctgtaccatccttcagggcctaggctatagctgtgagtgccgtggcctgatcaatgtgaagggtaagggcgaacttcgcacctactttgtgtgtacagatacagcaaaattccagggactggggctcaattag

SEQ ID NO: 42319 - DNA, 3243 bp, Artificial Sequence
  derived and/or modified sequence
atgcccgctaagggtcggtatttcttgaatgaaggggaggagggtcccgaccaggatgctctctatgaaaaatatcagctcacttcccagcacggccctctgctcctgactctcctcctggtggctgcaaccgcttgtgtggcccttatcatcatagcgttttcccaaggggatccgtcccgccaccaggccatcttgggaatggcttttttggtgctggcagttttcgcagccctttctgttctcatgtatgtggaatgcctgctgcgaagatggctacgggcattggcacttttgacctgggcctgccttgtggctctcggctatgtgctggtgtttgatgcttggacaaaggccgcatgtgcgtgggagcaagtccctttcttcctgtttatcgtgtttgtcgtctatacactactgcccttctccatgaggggagctgtcgctgttggggcagtgagcaccgcatcacacctgctcgttctgggtagtctgatgggaggattcacgaccccctcggtcagagtcggtctgcagctcctggctaacgccgtaatctttctctgcggtaacctgaccggcgcatttcacaaacatcaaatgcaggacgcatcccgcgatctgtttacatacaccgtcaaatgtatccaaattaggcgcaaactccggattgaaaagaggcaacaggagaatcttctcttgtcagtactgcccgctcatatctcgatgggtatgaagctcgcaatcatagagcggctgaaagagcatggggaccgtaggtgtatgcctgacaacaacttccatagcctgtatgttaaaaggcaccagaatgtaagcatcctttatgcggatattgttggctttacccaactggcgagtgattgctcacctaaggaactggtagtcgtcttgaacgaactgtttggcaagttcgaccagatcgcgaaagcaaacgagtgcatgcggattaagattttgggagactgctattactgcgtttccggactgcccgtaagcctccccactcacgctagaaattgtgtgaagatgggactggatatgtgtcaggccataaaacaggtgcgcgaagcgacaggagtggacattaatatgcgggtgggcattcactccgggaatgtgctttgtggggtgattggcttgagaaagtggcagtatgatgtttggtcccatgacgtgtcactcgcaaatcgcatggaagccgcaggcgtgcccggacgagtgcacataactgaagccacactaaagcacttagataaggcctacgaggtggaggacggtcacgggcagcaaagggatccctatctgaaagagatgaatatccggacatacctcgtgattgatcctcgcagtcaacagcctcctcccccttcccagcacctgcctagaccaaagggtgacgcagctctgaaaatgcgtgcaagtgtaaggatgacgcgctatctagagtcatggggggctgcacgaccattcgctcacctgaatcatcgagagagcgtttcctccggcgaaacccacgttcccaacggacggagaccaaagtctgtgccccaacggcaccggaggacccctgacaggtcaatgtcccccaaaggtaggtcagaggacgactcctatgatgacgagatgctgtcagcaatcgaggggctgtccagtacaagaccatgctgctctaagtcagacgatttctacaccttcggttccatatttctcgaaaagggtttcgaaagggaatacaggctggcaccgatccccagggccagacacgacttcgcctgcgcaagcctgatcttcgtgtgcatattattggtgcacgtgctcttgatgcctagaaccgcagccctgggagtatcattcgggcttgtggcctgcgtgctgggattggtgttggggctgtgcttcgccaccaaattttcacgttgctgtcccgcacgtggaaccctgtgcaccatcagcgaacgggttgaaacacagcctctgctgcgccttacgctggcggtgctcactatcggatctctgctgacagttgcgatcattaacttgcccttgatgccctttcaggtacctgaactgcccgtcggtaacgagaccgggttgctcgcggctagcagcaagacacgcgcactgtgtgagccactgccctactacacgtgttcatgcgttctgggcttcatagcttgtagtgtctttctgcggatgagcctcgaaccgaaagtggtgttactaacagtggctctggttgcatacctggttctgttcaacctcagcccttgttggcagtgggattgctgcggtcagggcttgggaaatcttactaaacccaacggcactacgagtggaactccttcttgtagctggaaggatctgaaaacgatgacaaacttttatctcgtgctattttatattaccttgctcaccctgtcacgacagatcgactattactgtcgcttggactgtctctggaagaaaaaatttaagaaagagcacgaagagttcgaaactatggaaaacgtcaacagactgcttcttgaaaatgtcctccccgcacacgtcgccgctcacttcattggcgataagctgaatgaggactggtaccaccagagttacgattgtgtctgcgttatgttcgcctccgtgcctgactttaaagttttctatacagagtgtgatgtaaacaaagaaggcctggaatgtttacgcctgctcaacgagattatagcagattttgacgaacttctgctcaagcccaaattttcaggtgtggagaagatcaaaacaattggctctacatacatggcggcagccggattatccgtggcctccggacacgagaaccaggaactggagaggcagcatgcacacattggagtcatggtggagttttccattgcactgatgagcaagctagatgggatcaaccggcactctttcaactcctttcggctgagagtcggtattaaccacggaccagtaatcgctggcgttatcggagccaggaaacctcagtatgatatctggggcaataccgtgaatgtcgcctccagaatggaaagtacaggggagcttgggaagatccaggtcactgaggaaacttgcaccattctgcaaggtttaggctattcttgtgagtgtaggggattaatcaacgtgaagggcaaaggtgaactcaggacgtattttgtgtgtaccgacactgccaaatttcagggccttgggctgaattag

SEQ ID NO: 42320 - DNA, 3243 bp, Artificial Sequence
  derived and/or modified sequence
atgcctgctaagggcaggtatttcctcaatgagggcgaggaaggtccggatcaagacgccttgtatgaaaaataccaactgacatcccagcatgggcctctgttgttaaccttattgttggtagctgccaccgcttgcgtggccttgatcatcatcgcttttagccagggagacccttcaagacatcaagctatccttggtatggcatttctggtgcttgcagtctttgccgcacttagtgtcctcatgtatgtcgaatgtctgctgaggcgctggttgcgcgctttggctttgcttacttgggcctgccttgtcgctttgggctatgtcctagtgtttgatgcctggacaaaagcagcttgtgcgtgggaacaggtgcctttttttttattcattgtttttgtggtttatactttactgccattcagtatgagaggagctgtggctgtcggagcggtgtcgactgcctcccacctattagtgttaggttccctgatgggtggctttaccactccttccgtgagagtcggattacagctgctggcgaacgcagttatctttttgtgcgggaacctgactggtgctttccacaaacatcagatgcaggatgcaagcagagatcttttcacctatacagtaaaatgcattcaaattcgccgtaaactgaggatcgagaagcgccagcaagaaaacctgctgctatccgtgctccctgctcacatttccatgggtatgaaattggccatcatcgaacgtttgaaggagcatggggatcggagatgcatgccagacaacaattttcattccctgtacgtgaaacgacaccagaacgtcagcatcctgtatgccgacattgttggcttcacacagttggccagtgactgttcccccaaagagcttgtagttgtgcttaacgaactgtttggaaaatttgatcagatcgctaaagccaacgagtgcatgcgaataaaaatcctgggggactgctactattgcgtctccggcctgcccgtttcgctacctactcacgctaggaattgtgttaaaatgggactggatatgtgccaagccataaaacaagtgcgtgaggcgacgggggttgatattaacatgagggtgggtatccattctggcaatgtcttatgcggtgtcataggtttaagaaagtggcagtacgacgtctggagccatgacgtctcactggccaaccgaatggaagcagcaggtgtgcccggtcgagtgcacataactgaggcaacactcaagcatttggacaaagcctatgaagtagaggatggccacggacagcagcgagacccttacctgaaggagatgaacatccggacttatctcgtgattgatcctcggagtcagcagccccctccgccttcgcagcacctcccacgcccaaaaggggatgccgcactgaagatgcgagcaagcgtgaggatgacaaggtaccttgaatcgtggggagcagctaggcccttcgcacacctgaatcacagagagtctgtctcttcgggtgaaactcacgtccccaacggacggagaccgaagtcagtgcctcagcggcaccgccgtacgcccgaccggtccatgagtccgaaaggcaggagcgaggatgattcctatgatgacgagatgctgagtgctatcgagggattatcatcaacacgtccatgctgttcgaaatctgatgatttttacacatttggctcaatcttcctggagaaaggttttgaaagggaatatagacttgcacccatccctagggccagacatgatttcgcctgcgcatcacttattttcgtgtgcatccttcttgttcacgtgctgctgatgccgaggacggccgctctcggggtaagttttggactggtcgcctgcgttcttggactcgttttgggcctgtgttttgccacaaaattttcacgctgctgtcctgctcggggaacactgtgtacaatatccgagagggtcgagacacagccccttcttcggctcactctggccgtcctcaccataggttctttactgacggtggctatcatcaacctgcccctgatgccgtttcaagttccagagctgcccgtggggaatgaaacaggacttttggctgcctcttcaaagacgagggctctgtgtgagccgcttccttactacacatgctcctgcgtgttgggcttcatcgcctgctcggtttttctccgcatgagtttagagcccaaggtcgttcttctcaccgttgcattagtcgcatacctggttttgtttaacctgtccccatgctggcaatgggactgctgtggacagggattgggcaatttaaccaaaccgaatgggacaacaagtggaactccgtcttgctcatggaaagacctgaagacgatgaccaacttctatttagttttgttctacataaccctgttaacgttgtctcgccaaatcgactactattgtcgcctagactgcctgtggaagaaaaagttcaagaaggagcacgaagagttcgagacgatggagaacgtgaatagactgctgctggaaaatgtcctccctgcccacgtcgccgctcactttatcggggacaagctaaacgaggattggtatcaccagtcctacgactgtgtgtgcgttatgttcgccagtgtgcctgatttcaaagtcttttacaccgagtgtgacgtgaacaaggagggccttgaatgcctgcggctcctcaacgagatcattgcagattttgacgagcttttacttaagcctaaattctccggcgttgagaaaatcaagaccataggaagcacttacatggctgcagcgggtctcagtgtcgcttctggtcacgaaaaccaggagctagaaaggcagcatgcacacatcggcgtaatggtggagttttccatcgcccttatgtcgaagctcgacggtataaaccgacactcctttaactcctttagattgagagttggaatcaatcacggacctgtgatagccggagtgattggcgctcggaagccacagtacgatatctgggggaacactgtgaacgtagcctctaggatggagtcaactggtgagctggggaagatacaagttactgaggaaacatgcaccatactgcaggggctggggtacagctgcgagtgccgtggactgatcaacgtaaagggcaaaggcgaactgagaacctacttcgtgtgtaccgatacagcgaagttccaggggctcggcttgaattag

SEQ ID NO: 42321 - DNA, 3243 bp, Artificial Sequence
  derived and/or modified sequence
atgcccgccaagggcagatacttcctgaacgagggcgaggagggccccgaccaggacgccctgtacgagaagtaccagctgaccagccagcacggccccctgctgctgaccctgctgctggtggccgccaccgcctgcgtggccctgatcatcatcgccttcagccagggcgaccccagcagacaccaggccatcctgggcatggccttcctggtgctggccgtgttcgccgccctgagcgtgctgatgtacgtggagtgcctgctgagaagatggctgagagccctggccctgctgacctgggcctgcctggtggccctgggctacgtgctggtgttcgacgcctggaccaaggccgcctgcgcctgggagcaggtgcccttcttcctgttcatcgtgttcgtggtgtacaccctgctgcccttcagcatgagaggcgccgtggccgtgggcgccgtgagcaccgccagccacctgctggtgctgggcagcctgatgggcggcttcaccacccccagcgtgagagtgggcctgcagctgctggccaacgccgtgatcttcctgtgcggcaacctgaccggcgccttccacaagcaccagatgcaggacgccagcagagacctgttcacctacaccgtgaagtgcatccagatcagaagaaagctgagaatcgagaagagacagcaggagaacctgctgctgagcgtgctgcccgcccacatcagcatgggcatgaagctggccatcatcgagagactgaaggagcacggcgacagaagatgcatgcccgacaacaacttccacagcctgtacgtgaagagacaccagaacgtgagcatcctgtacgccgacatcgtgggcttcacccagctggccagcgactgcagccccaaggagctggtggtggtgctgaacgagctgttcggcaagttcgaccagatcgccaaggccaacgagtgcatgagaatcaagatcctgggcgactgctactactgcgtgagcggcctgcccgtgagcctgcccacccacgccagaaactgcgtgaagatgggcctggacatgtgccaggccatcaagcaggtgagagaggccaccggcgtggacatcaacatgagagtgggcatccacagcggcaacgtgctgtgcggcgtgatcggcctgagaaagtggcagtacgacgtgtggagccacgacgtgagcctggccaacagaatggaggccgccggcgtgcccggcagagtgcacatcaccgaggccaccctgaagcacctggacaaggcctacgaggtggaggacggccacggccagcagagagacccctacctgaaggagatgaacatcagaacctacctggtgatcgaccccagaagccagcagccccccccccccagccagcacctgcccagacccaagggcgacgccgccctgaagatgagagccagcgtgagaatgaccagatacctggagagctggggcgccgccagacccttcgcccacctgaaccacagagagagcgtgagcagcggcgagacccacgtgcccaacggcagaagacccaagagcgtgccccagagacacagaagaacccccgacagaagcatgagccccaagggcagaagcgaggacgacagctacgacgacgagatgctgagcgccatcgagggcctgagcagcaccagaccctgctgcagcaagagcgacgacttctacaccttcggcagcatcttcctggagaagggcttcgagagagagtacagactggcccccatccccagagccagacacgacttcgcctgcgccagcctgatcttcgtgtgcatcctgctggtgcacgtgctgctgatgcccagaaccgccgccctgggcgtgagcttcggcctggtggcctgcgtgctgggcctggtgctgggcctgtgcttcgccaccaagttcagcagatgctgccccgccagaggcaccctgtgcaccatcagcgagagagtggagacccagcccctgctgagactgaccctggccgtgctgaccatcggcagcctgctgaccgtggccatcatcaacctgcccctgatgcccttccaggtgcccgagctgcccgtgggcaacgagaccggcctgctggccgccagcagcaagaccagagccctgtgcgagcccctgccctactacacctgcagctgcgtgctgggcttcatcgcctgcagcgtgttcctgagaatgagcctggagcccaaggtggtgctgctgaccgtggccctggtggcctacctggtgctgttcaacctgagcccctgctggcagtgggactgctgcggccagggcctgggcaacctgaccaagcccaacggcaccaccagcggcacccccagctgcagctggaaggacctgaagaccatgaccaacttctacctggtgctgttctacatcaccctgctgaccctgagcagacagatcgactactactgcagactggactgcctgtggaagaagaagttcaagaaggagcacgaggagttcgagaccatggagaacgtgaacagactgctgctggagaacgtgctgcccgcccacgtggccgcccacttcatcggcgacaagctgaacgaggactggtaccaccagagctacgactgcgtgtgcgtgatgttcgccagcgtgcccgacttcaaggtgttctacaccgagtgcgacgtgaacaaggagggcctggagtgcctgagactgctgaacgagatcatcgccgacttcgacgagctgctgctgaagcccaagttcagcggcgtggagaagatcaagaccatcggcagcacctacatggccgccgccggcctgagcgtggccagcggccacgagaaccaggagctggagagacagcacgcccacatcggcgtgatggtggagttcagcatcgccctgatgagcaagctggacggcatcaacagacacagcttcaacagcttcagactgagagtgggcatcaaccacggccccgtgatcgccggcgtgatcggcgccagaaagccccagtacgacatctggggcaacaccgtgaacgtggccagcagaatggagagcaccggcgagctgggcaagatccaggtgaccgaggagacctgcaccatcctgcagggcctgggctacagctgcgagtgcagaggcctgatcaacgtgaagggcaagggcgagctgagaacctacttcgtgtgcaccgacaccgccaagttccagggcctgggcctgaactag

SEQ ID NO: 42322 - protein, 334 aa, Artificial Sequence
  derived and/or modified sequence
MFGKPDKMDVRCHSDAEAARVSKNAHKESRESKGAEGNLPAAFLKEPQGAFSASGAAEDCNKSKSNSAADPDYCRRILVRDAKGSIREIILPKGLDLDRPKRTRTSFTAEQLYRLEMEFQRCQYVVGRERTELARQLNLSETQVKVWFQNRRTKQKKDQGKDSELRSVVSETAATCSVLRLLEQGRLLSPPGLPALLPPCATGALGSALRGPSLPALGAGAAAGSAAAAAAAAPGPAGAASPHPPAVGGAPGPGPAGPGGLHAGAPAAGHSLFSLPVPSLLGSVASRLSSAPLTMAGSLAGNLQELSARYLSSSAFEPYSRTNNKEGAEKKALD

SEQ ID NO: 42323 - DNA, 1005 bp, Artificial Sequence
  derived and/or modified sequence
atgttcggcaagcccgacaagatggacgtgagatgccacagcgacgccgaggccgccagagtgagcaagaacgcccacaaggagagcagagagagcaagggcgccgagggcaacctgcccgccgccttcctgaaggagccccagggcgccttcagcgccagcggcgccgccgaggactgcaacaagagcaagagcaacagcgccgccgaccccgactactgcagaagaatcctggtgagagacgccaagggcagcatcagagagatcatcctgcccaagggcctggacctggacagacccaagagaaccagaaccagcttcaccgccgagcagctgtacagactggagatggagttccagagatgccagtacgtggtgggcagagagagaaccgagctggccagacagctgaacctgagcgagacccaggtgaaggtgtggttccagaacagaagaaccaagcagaagaaggaccagggcaaggacagcgagctgagaagcgtggtgagcgagaccgccgccacctgcagcgtgctgagactgctggagcagggcagactgctgagcccccccggcctgcccgccctgctgcccccctgcgccaccggcgccctgggcagcgccctgagaggccccagcctgcccgccctgggcgccggcgccgccgccggcagcgccgccgccgccgccgccgccgcccccggccccgccggcgccgccagcccccacccccccgccgtgggcggcgcccccggccccggccccgccggccccggcggcctgcacgccggcgcccccgccgccggccacagcctgttcagcctgcccgtgcccagcctgctgggcagcgtggccagcagactgagcagcgcccccctgaccatggccggcagcctggccggcaacctgcaggagctgagcgccagatacctgagcagcagcgccttcgagccctacagcagaaccaacaacaaggagggcgccgagaagaaggccctggactag

SEQ ID NO: 42324 - DNA, 1005 bp, Artificial Sequence
  derived and/or modified sequence
atgttcgggaagccggataaaatggacgtgaggtgccactcagatgccgaggcagctcgggtgtcaaaaaacgctcacaaggaatccagggaaagtaaaggagcggaggggaatctgccggcggcatttctcaaagagccccaaggggctttctctgcatcaggggcagccgaggattgcaacaaaagcaagtctaactctgccgctgatccagactactgccggcgcatcctcgtgcgtgatgccaagggaagtatcagagagatcatcctccccaaaggtttggacctggaccgccccaaaagaactcggacttcttttaccgctgagcagctgtaccggctagagatggagtttcagcgatgccagtatgtggtgggaagagagaggactgagctggcacgccagctaaatctgagtgaaactcaggttaaggtttggttccagaatcgcaggaccaaacagaagaaagatcaaggcaaggactctgagcttagatctgttgtgtccgagaccgccgctacttgttccgtgctgaggctgttggagcaggggcgactgctgtcacctcctgggttaccagctttgttaccaccgtgtgctaccggtgcccttggcagtgccttgcgtggaccatccctgcccgcgctcggtgctggcgctgccgctgggtctgccgcagccgcagccgctgccgcccccggccccgccggcgctgcttctccccatccccccgccgttgggggcgcccccggccctggtccagccgggccgggcggtctgcatgccggggcgccagctgcgggacacagtctctttagtcttcctgtgccatccctgctcggatccgtcgctagccgcctgtccagtgcaccactgaccatggccgggtctctagcaggcaatctgcaggagcttagcgcacgttacctgagctcatcagcatttgaaccctactcccggacgaacaacaaagagggtgccgagaagaaggcactggactag

SEQ ID NO: 42325 - DNA, 1005 bp, Artificial Sequence
  derived and/or modified sequence
atgtttgggaagccagacaagatggatgtgcgctgccacagtgatgctgaggccgcccgggtgtccaagaatgcccacaaggagagccgggagagcaaaggagctgagggcaacctgcctgctgccttcctgaaggagccccagggcgccttcagcgccagcggggctgctgaggactgcaacaagagcaagagcaacagcgctgctgaccctgactactgccgccgcatcctggtgagagatgccaagggcagcatccgggagatcatcctgcccaagggcctggacctggaccggcccaagaggaccaggaccagcttcaccgctgagcagctgtaccgcctggagatggagttccagcgctgccagtatgtggtgggccgggagaggacagagctggcccggcagctgaacctgtctgagacccaggtgaaggtgtggttccagaacagaaggaccaagcagaagaaggaccagggcaaggacagcgagctgcggtctgtggtgtctgaaacagctgccacctgcagcgtgctgcggctgctggagcagggccgcctgctgagccccccaggcctgcctgccctgctgcccccctgtgccaccggggccctgggcagcgccctgcggggccccagcctgcctgccctgggcgctggagctgctgctggcagcgctgctgctgctgctgctgctgcccctggccctgctggagctgccagcccccaccccccagctgtgggcggggcccctggccctggccctgctggccctgggggcctgcatgctggggccccagctgctggccacagcctcttcagcctgcctgtgcccagcctgctgggctctgtggccagccggctgagcagcgcccccctgaccatggccggcagcctggccggcaacctgcaggagctgagcgcccgctacctgagcagcagcgcctttgagccctacagcaggaccaacaacaaggagggcgctgagaagaaggccctggactag

SEQ ID NO: 42326 - DNA, 1005 bp, Artificial Sequence
  derived and/or modified sequence
atgttcggcaagcccgacaagatggacgtgcggtgccacagcgacgccgaggctgcccgggtttccaagaacgcacacaaagaatcacgcgagtcgaagggagctgagggcaatctgccggcggcttttctcaaagaacctcagggcgccttcagtgcgagcggagctgcggaggattgtaacaagagtaagtccaatagcgccgccgatcctgattactgccgcaggattctcgtgagagatgccaaaggtagcataagagagattattctccccaaaggcctagaccttgaccgacccaaacgtacacgcacctccttcacagcagaacagctttaccggctggagatggagtttcagaggtgccaatacgtggttggcagagaacggactgaactggcccgacagctgaacctgtctgaaacccaggtgaaagtttggttccagaataggcgaaccaaacagaagaaggaccagggtaaggattccgaactgcgatcagtcgtatccgagacagctgccacttgttccgtgctgaggctgctggagcaaggccgacttctgagtccaccaggcttgcccgcactcctccctccttgtgccacaggtgcactggggtcagcgctgagggggccaagtttgcccgccctgggagccggagctgcggctggctctgccgccgcagctgctgccgcagcgccgggacccgctggtgccgccagtccccaccctccggcagtggggggtgccccaggtccggggcccgccggacccggcgggctgcacgccggggctccagccgcaggtcatagcctgttcagtcttccagtgccctccctgcttggatccgttgcctcgagactttcttccgctccactaaccatggccggatccctcgccggcaatctgcaggagctgtcagctcggtacctgtctagctctgcctttgaaccatatagccggaccaacaataaggagggtgctgaaaaaaaggccctggattag

SEQ ID NO: 42327 - DNA, 1005 bp, Artificial Sequence
  derived and/or modified sequence
atgttcggaaagcccgataagatggatgtgcggtgtcatagcgacgcagaggcagcccgagtgagcaagaacgcacacaaagagtcacgagagtccaaaggggcagagggcaatctgcccgcagcgttcctgaaagagccgcagggagcatttagcgcctcgggagctgcggaggactgcaacaagtccaagtctaattcagcagccgaccccgattactgtaggcggattctggtgcgggacgcaaaagggtccattagagagatcatcctccccaagggcctggatttggatagaccaaagcgtacccggacaagttttaccgctgagcaactgtacagactggaaatggagttccagcgctgtcagtacgtagtggggagggagcgaacagagttggccaggcaactgaatctgagtgaaacgcaggtgaaagtgtggtttcagaaccgtagaactaaacagaaaaaggatcaaggcaaagatagcgaacttcgtagtgtggtctcggaaaccgctgccacctgctctgttctccggctcttggagcagggcaggttactatcccctcctggcctgcctgccctgttacccccttgtgctaccggggctcttgggtctgcacttcgcggtccatcgctgccagcactgggcgcaggggcagctgcaggctcagctgctgctgctgctgccgcagctccagggcctgccggtgcggcttctccacatccccctgccgtgggaggcgcacccggtccgggtcccgcaggaccaggcggtttgcatgccggagcacctgccgctgggcattccctcttcagcctgcctgtccctagccttttgggctcagtggcaagcagactttcctccgcccctctgaccatggccggatccctcgcgggaaacttgcaggaactgtcagccaggtatctatcttcttctgcttttgagccctactctcgtacaaataacaaggaaggggctgaaaagaaggctctcgactag

SEQ ID NO: 42328 - DNA, 1250 bp, Artificial Sequence
  derived and/or modified sequence
accagactggccgcctctcggcgagcgcgccactctcccgtcgccgctgacccgcgcgcggccgccgaagcctccccgcggggacattcattcttgccccttgcctgtcgccgggccgggcgtacgggccgcgttgtcgggggttttgtcccctttttcctcttttttttttccttctccgccccccccccttttttttttttttgctttttttttcctttctgtttttgttgttgttcttgcctatgttcgggaaaccagacaaaatggacgttcgatgccactcggacgccgaggctgcccgggtctcgaagaacgcgcacaaggagagtcgggagagcaagggcgcggaggggaacctcccagccgccttcctcaaggagccgcagggcgccttctcagcgtcgggcgctgctgaggattgtaacaaaagtaaatccaattccgcagcggacccggattactgccgccggatcctggtccgagatgccaaggggtccatccgagagatcatcctgcccaagggcctggacttggaccggcctaagaggacgcgcacgtccttcaccgcggagcagctctatcggctggagatggagttccagcgctgccagtacgtggtgggccgcgagaggaccgagctcgcccggcagcttaacctctccgagacccaggtgaaggtctggttccagaaccggcgcaccaagcagaagaaggaccagggcaaggactcggagctacgctcggtggtgtcggagaccgcggccacgtgcagcgtgctacggctgctggagcagggccgcctgttgtcgccgcccggcctgcctgcgctgctgccgccttgcgccacgggcgctctcggctcagcgctgcgcgggcccagcttgccggccctgggcgcgggcgccgctgcaggctcggccgccgcagccgccgccgccgccccgggcccagcgggcgctgcatccccgcacccgccggctgtgggcggtgctccaggtcccgggcccgccgggccggggggattgcacgcaggcgccccggccgcgggccacagcctcttcagcctgccggtgccctcgctgctcggctccgtcgccagccgcctgtcctccgccccgttaacaatggctggttcgctagctgggaatttgcaagaactctccgcccgatatctgagctcctcggccttcgagccttactcccggaccaacaataaagaaggggccgagaaaaaagcgctggactga

SEQ ID NO: 42329 - protein, 715 aa, Artificial Sequence
  derived and/or modified sequence
MARELYHEEFARAGKQAGLQVWRIEKLELVPVPQSAHGDFYVGDAYLVLHTAKTSRGFTYHLHFWLGKECSQDESTAAAIFTVQMDDYLGGKPVQNRELQGYESNDFVSYFKGGLKYKAGGVASGLNHVLTNDLTAKRLLHVKGRRVVRATEVPLSWDSFNKGDCFIIDLGTEIYQWCGSSCNKYERLKANQVATGIRYNERKGRSELIVVEEGSEPSELIKVLGEKPELPDGGDDDDIIADISNRKMAKLYMVSDASGSMRVTVVAEENPFSMAMLLSEECFILDHGAAKQIFVWKGKDANPQERKAAMKTAEEFLQQMNYSKNTQIQVLPEGGETPIFKQFFKDWRDKDQSDGFGKVYVTEKVAQIKQIPFDASKLHSSPQMAAQHNMVDDGSGKVEIWRVENNGRIQVDQNSYGEFYGGDCYIILYTYPRGQIIYTWQGANATRDELTTSAFLTVQLDRSLGGQAVQIRVSQGKEPVHLLSLFKDKPLIIYKNGTSKKGGQAPAPPTRLFQVRRNLASITRIVEVDVDANSLNSNDVFVLKLPQNSGYIWVGKGASQEEEKGAEYVASVLKCKTLRIQEGEEPEEFWNSLGGKKDYQTSPLLETQAEDHPPRLYGCSNKTGRFVIEEIPGEFTQDDLAEDDVMLLDAWEQIFIWIGKDANEVEKKESLKSAKMYLETDPSGRDKRTPIVIIKQGHEPPTFTGWFLGWDSSKW

SEQ ID NO: 42330 - protein, 468 aa, Artificial Sequence
  derived and/or modified sequence
MAKLYMVSDASGSMRVTVVAEENPFSMAMLLSEECFILDHGAAKQIFVWKGKDANPQERKAAMKTAEEFLQQMNYSKNTQIQVLPEGGETPIFKQFFKDWRDKDQSDGFGKVYVTEKVAQIKQIPFDASKLHSSPQMAAQHNMVDDGSGKVEIWRVENNGRIQVDQNSYGEFYGGDCYIILYTYPRGQIIYTWQGANATRDELTTSAFLTVQLDRSLGGQAVQIRVSQGKEPVHLLSLFKDKPLIIYKNGTSKKGGQAPAPPTRLFQVRRNLASITRIVEVDVDANSLNSNDVFVLKLPQNSGYIWVGKGASQEEEKGAEYVASVLKCKTLRIQEGEEPEEFWNSLGGKKDYQTSPLLETQAEDHPPRLYGCSNKTGRFVIEEIPGEFTQDDLAEDDVMLLDAWEQIFIWIGKDANEVEKKESLKSAKMYLETDPSGRDKRTPIVIIKQGHEPPTFTGWFLGWDSSKW

SEQ ID NO: 42331 - DNA, 2148 bp, Artificial Sequence
  derived and/or modified sequence
atggcccgcgagctttaccatgaagaattcgctcgggccgggaagcaggccggattgcaggtgtggagaatagagaaactggagctggtacccgtcccccagtcagcccacggcgatttttatgtgggcgacgcatatcttgtgttgcatactgctaaaactagccgaggcttcacgtaccacctgcacttttggttgggaaaggagtgctctcaggacgagtcaactgctgcagcaatctttacagttcagatggatgattatctgggcgggaagccggtgcagaatagggagctccagggctacgagtctaatgacttcgtcagttactttaagggtggtttgaagtacaaggcaggtggcgtggccagtggactcaatcatgtcttgaccaacgacttgaccgcgaagcggctgctccatgttaaagggaggcgggtagtccgcgctaccgaggtccccctcagttgggattcatttaataaaggagattgttttatcattgaccttggcacagagatttaccagtggtgcggcagctcctgtaataagtatgagagattaaaagcgaaccaggtggccacgggaattcgctataatgagcggaaggggcggtctgagttgatagtggtagaggagggctccgagccgtctgaactgatcaaggtgctaggagagaagccagagctgccagatgggggcgacgatgatgacatcatagcagacatcagcaacaggaagatggcgaagctgtacatggtttccgatgccagcggcagtatgcgagtcaccgtagtcgctgaagaaaaccccttttcaatggcgatgctcttaagcgaagaatgcttcatcctggaccacggagctgctaagcagatcttcgtgtggaagggcaaagatgctaatccacaggagcgaaaagctgcgatgaaaacagccgaggaatttttacagcagatgaattattccaaaaatacccagattcaggtgttgcccgaaggcggagagacgccaattttcaaacaattctttaaggactggagggacaaagaccagtcggatggcttcggcaaagtctacgttactgagaaagtcgcccagatcaagcagatcccattcgatgcctctaaactgcactctagccctcaaatggcagcacagcacaatatggttgatgacgggagcgggaaggtggagatctggagggttgaaaacaacgggaggatccaggttgaccagaacagttacggcgagttttatgggggcgactgttatataattctctacacgtacccgagaggccagataatctacacctggcagggcgccaacgccacccgcgatgagctgaccactagcgccttccttaccgtgcagctggacaggagcctcggcggacaggcagtacagattagggtgtctcaagggaaagaacccgtgcacctcctgagcttatttaaggataagccattaataatctataaaaatgggacatctaagaagggtggtcaagctcctgcccctcccacccgtctgtttcaggtgaggaggaatctggcgtctatcactagaattgtcgaggtagacgtcgacgcaaactctctgaactcaaacgatgtattcgtgctgaagctgccacagaatagcggctacatctgggtgggtaaaggtgcctcacaggaggaggaaaaaggggccgaatatgtggctagtgtactgaaatgcaagacgctgagaattcaggaaggtgaagaacccgaagaattttggaacagcctgggcggtaagaaggattaccagacttctccactcctagagactcaggccgaggaccatcctcccagactttatgggtgtagtaacaaaactgggagattcgtcattgaagaaattccgggcgaatttacccaggatgacctcgctgaggatgacgttatgctgctagatgcttgggaacagatatttatatggatcggaaaggacgccaacgaggtcgagaaaaaggagtctctgaagagcgcaaaaatgtatctcgaaacagatccctctggcagagacaagcggaccccgatcgtgatcataaagcaagggcacgagcccccaaccttcacgggatggttcctcggatgggattcatctaaatggtag

SEQ ID NO: 42332 - DNA, 1407 bp, Artificial Sequence
  derived and/or modified sequence
atggcaaaattgtatatggtgtccgatgctagcggatctatgcgggtgacggtggtcgcagaagaaaatcccttctctatggccatgcttttatcagaggaatgttttatcctcgaccacggcgccgccaagcagatcttcgtatggaaggggaaggatgccaacccccaggagcgcaaggcagcaatgaagacagccgaggagtttctgcaacagatgaattacagcaagaacactcagatacaggtactgcctgagggtggcgagactcccatttttaaacagttcttcaaagattggagggacaaggatcaatccgacgggttcgggaaggtctatgtaactgagaaagtggcccagatcaaacaaattcccttcgacgcctccaagctgcacagcagtccccagatggccgctcagcacaatatggtggacgacggctctggcaaagtcgaaatatggcgcgtcgagaataacggcaggatccaggtcgatcagaattcttacggggaattctatggtggcgattgttatatcatcctttacacttaccctagaggccagatcatctacacatggcagggtgccaatgccactcgggatgagctgacaaccagcgcctttctcaccgtccagcttgataggtccctgggcgggcaagccgtccaaatacgcgtctctcaaggaaaggaacctgtccacctgctcagcttgttcaaagataagccattgattatttacaaaaatggcacctccaaaaaaggtggacaggccccagcgccaccgacaagactgttccaagtccgccggaacttggcctcaattactaggattgtggaagtggacgtggacgcaaactccctaaattcgaatgacgtcttcgtcttaaagctcccacagaactcgggttacatctgggttggcaaaggggcgtctcaagaggaagaaaagggggctgagtatgtggcttccgtcttaaagtgcaagactctaagaatccaggaaggagaggagcctgaagaattctggaacagccttggaggcaaaaaagactaccagacaagcccgctcctcgagacacaggccgaggatcatccaccaagactgtatggatgtagcaacaagactgggagatttgttattgaggaaattccaggggagttcacgcaggatgacctcgcagaagacgacgttatgcttctggatgcctgggaacagatcttcatttggatcggtaaggatgccaacgaagttgagaagaaagaatctctgaagtctgccaaaatgtacttggagacagacccatccggaagagataagaggacccctatcgtgatcattaaacagggtcacgaaccaccaacttttacaggctggttcctgggttgggatagcagcaaatggtag

SEQ ID NO: 42333 - DNA, 1407 bp, Artificial Sequence
  derived and/or modified sequence
atggcgaagctttatatggttagcgatgcgagtgggtccatgcgcgtgactgtggttgcagaagagaatccattcagtatggctatgttgttgtctgaagagtgttttatcttagaccatggtgcagctaaacagatcttcgtgtggaagggcaaggatgccaacccacaggaacgcaaagccgcgatgaagacagcagaggaattcttgcagcagatgaattacagcaaaaatacgcagattcaggtccttcccgagggtggggagaccccaatctttaaacagttctttaaagattggcgagataaggaccagtctgacggatttggtaaggtatacgtaacggagaaggtggcccagatcaagcagatcccctttgacgcctcaaaactccactccagtccccaaatggctgcacaacacaatatggtggacgacggatctgggaaagtggaaatctggagagtcgagaataatggaaggattcaggtcgaccagaactcttatggtgagttctatggcggagattgttacatcattctctacacatatccacgaggccaaatcatttacacatggcagggcgccaatgccacccgggatgagctcacaacttccgcatttctgactgtacagctggacagaagcctgggcggccaggcagtgcagattagagtctctcagggcaaagaacctgtccacctgctcagtttgttcaaagataaacccttgattatttataagaatggtacaagtaagaagggtgggcaggctccagccccacccaccaggctattccaagtaaggcggaacttggcctccataacgcgtatagttgaggttgatgtggatgcgaacagcttgaattccaacgatgttttcgttcttaagcttccccaaaattcagggtacatttgggtaggcaagggcgcctcccaggaagaggaaaaaggcgccgaatacgtagccagcgtgttaaagtgtaagacattacggatacaggagggcgaggagccagaggaattctggaattctttgggtggtaaaaaagattaccagaccagcccattactggagacccaggcggaagatcaccccccaaggttgtacggctgcagcaataagactggccgctttgtcatagaagaaattcctggcgaattcacacaggatgacttagcggaggatgatgtgatgttgctcgacgcgtgggaacagattttcatttggattggaaaggacgccaatgaggttgaaaaaaaagaaagcttaaaatccgctaagatgtaccttgaaaccgatccaagcggccgcgacaagcgtacacccatagttatcattaaacaggggcacgaaccaccaacatttaccggttggtttctgggatgggattccagcaagtggtag

SEQ ID NO: 42334 - DNA, 2148 bp, Artificial Sequence
  derived and/or modified sequence
atggcccgggagctgtaccacgaggagtttgcccgggccggcaagcaggccggcctgcaggtgtggagaattgagaagctggagctggtgcctgtgccccagagcgcccatggagacttctacgtgggagatgcctacctggtgctgcacacagccaagaccagccggggcttcacctaccacctgcacttctggctgggcaaggaatgttcccaggatgagagcacagctgctgccatcttcaccgtgcagatggatgactacctgggcggcaagcctgtgcagaaccgggagctgcagggctatgagagcaatgactttgtgtcctacttcaagggcggcctgaagtacaaggccggcggcgtggccagcggcctgaaccacgtgctgaccaatgacctgacagccaagaggctgctgcacgtgaagggcagaagagtggtgcgggccacagaggtgcccctgtcctgggacagcttcaacaagggggactgcttcatcatcgacctgggcacagagatctaccagtggtgtggcagcagctgcaacaagtatgagcggctgaaggccaaccaggtggccaccggcatccgctacaatgaaaggaagggccgctctgagctgattgtggtggaggagggcagcgagcccagcgagctgatcaaggtgctgggggagaagccagagctgcctgatggaggagatgatgatgacatcatcgctgacatcagcaacaggaagatggccaagctgtacatggtgtctgatgccagcggctccatgagggtgacagtggtggccgaggagaaccccttctccatggccatgctgctgtctgaggagtgcttcatcctggaccatggagctgccaagcagatctttgtgtggaagggcaaggatgccaacccccaggagaggaaggccgccatgaagacagctgaggagttcctgcagcagatgaactacagcaagaacacccagatccaggtgctgcctgagggcggggagacccccatcttcaagcagttcttcaaggactggagggacaaggaccagagtgatggctttgggaaggtgtatgtgacagagaaggtggcccagatcaagcagatcccctttgatgccagcaagctgcacagcagcccccagatggccgcccagcacaacatggtggatgatggcagcggcaaggtggagatctggagggtggagaacaacggccgcatccaggtggaccagaacagctatggagagttctacggcggggactgctacatcatcctgtacacctacccccggggccagatcatctacacctggcagggcgccaatgccaccagagatgagctgaccaccagcgccttcctgactgtgcagctggacaggagcctgggcggccaggccgtgcagatccgggtgtcccagggcaaggagcctgtgcacctgctgagcctcttcaaggacaagcccctcatcatctacaagaatggcaccagcaagaagggcggccaggccccagccccacccaccaggctcttccaggtgagaagaaacctggccagcatcaccagaattgtggaggtggatgtggatgccaacagcctgaacagcaatgatgtgtttgtgctgaagctgccccagaacagcggctacatctgggtgggcaagggggccagccaggaggaggagaagggagcagaatatgtggcctctgtgctgaagtgcaagaccctgcgcatccaggagggggaggagcctgaggagttctggaacagcctgggcggcaagaaggactaccagaccagccccctgctggagacccaggccgaggaccaccccccccggctgtatggctgcagcaacaagacaggccgcttcgtcatcgaggagatccctggagagttcacccaggatgacctggccgaggatgatgtgatgctgctggatgcctgggagcagatcttcatctggattggcaaggatgccaatgaggtggagaagaaggagagcctgaagagcgccaagatgtacctggagacagaccccagcggccgggacaagaggacccccatcgtcatcatcaagcagggccacgagccccccaccttcaccggctggttcctgggctgggacagcagcaagtggtag

SEQ ID NO: 42335 - DNA, 1407 bp, Artificial Sequence
  derived and/or modified sequence
atggccaagctgtacatggtgtctgatgccagcggctccatgagggtgacagtggtggccgaggagaaccccttctccatggccatgctgctgtctgaggagtgcttcatcctggaccacggggccgccaagcagatctttgtgtggaagggcaaggatgccaacccccaggagaggaaggccgccatgaagacagctgaggagttcctgcagcagatgaactacagcaagaacacccagatccaggtgctgcctgagggcggggagacccccatcttcaagcagttcttcaaggactggagggacaaggaccagagtgatggctttgggaaggtgtatgtgacagagaaggtggcccagatcaagcagatcccctttgatgccagcaagctgcacagcagcccccagatggccgcccagcacaacatggtggatgatggcagcggcaaggtggagatctggagggtggagaacaacggccgcatccaggtggaccagaacagctatggagagttctatggaggagactgctacatcatcctgtacacctacccccggggccagatcatctacacctggcagggcgccaatgccaccagagatgagctgaccaccagcgccttcctgactgtgcagctggacaggagcctgggcggccaggccgtgcagatccgggtgtcccagggcaaggagcctgtgcacctgctgagcctcttcaaggacaagcccctcatcatctacaagaatggcaccagcaagaagggcggccaggccccagccccacccaccaggctcttccaggtgagaagaaacctggccagcatcacccgcatcgtggaggtggatgtggatgccaacagcctgaacagcaatgatgtgtttgtgctgaagctgccccagaacagcggctacatctgggtgggcaaaggagccagccaggaggaggagaagggagcagaatatgtggcctctgtgctgaagtgcaagaccctgcgcatccaggagggggaggagcctgaggagttctggaacagcctgggcggcaagaaggactaccagaccagccccctgctggagacccaggccgaggaccaccccccccggctgtatggctgcagcaacaagacaggccgctttgtgattgaggagatccctggagagttcacccaggatgacctggctgaagatgatgtgatgctgctggatgcctgggagcagatcttcatctggattggcaaggatgccaatgaggtggagaagaaggagagcctgaagagcgccaagatgtacctggagacagaccccagcggccgggacaagaggacccccatcgtcatcatcaagcagggccacgagccccccaccttcaccggctggttcctgggctgggacagcagcaagtggtag

SEQ ID NO: 42336 - DNA, 2148 bp, Artificial Sequence
  derived and/or modified sequence
atggcccgggagctgtaccacgaggagttcgcccgggccggcaagcaggccggtctgcaagtttggcgcattgagaaactggagctagtccccgttcctcagtctgctcacggggatttctacgtcggtgacgcttacctcgttctgcatactgctaaaacatcgagagggtttacttatcatcttcacttctggctgggaaaggagtgctcccaggacgagagcaccgccgctgcaatctttactgtccaaatggatgactatctggggggaaagccagtccagaaccgcgaactgcagggctacgagtcaaacgactttgtctcatatttcaagggaggattgaagtacaaggctggaggagtggcgagcggccttaaccatgtattaaccaatgatttgaccgccaagcgcctgttacatgtcaagggccgacgcgtggttcgtgccacagaggttcctctaagctgggactcctttaacaagggcgactgttttatcatagacctagggaccgagatttatcagtggtgcggatcatcctgcaacaagtatgagagactgaaggctaaccaagtagctaccggaatcagatacaatgaacgcaagggtagatccgagctgatcgtggtggaggagggatcggagccaagtgagctcattaaagtgcttggagagaagccagagttgcctgacggtggagacgacgatgatattattgccgatatctctaaccgcaaaatggcgaaactttacatggtgagtgacgcaagcggctctatgagggttacggtggtggccgaggaaaacccattcagcatggccatgttgttaagcgaggaatgcttcatcctggaccacggcgcggcgaagcaaatatttgtctggaagggtaaagatgcaaatccacaggaacgtaaagccgctatgaagaccgccgaggaatttcttcagcagatgaattacagcaagaatacgcagattcaagtgttacccgaaggaggagaaacacccattttcaagcagttcttcaaagactggcgggataaggaccaatctgatggttttggtaaggtgtacgtcactgagaaggttgcacagattaaacaaatcccctttgatgccagcaagctgcacagctcaccacagatggccgcccaacataacatggtagacgatggctccggcaaggtggagatctggcgcgttgagaataacgggcggattcaggtggatcaaaattcctacggggaattctatggtggcgactgttatatcatactctacacatacccgcgcggccagataatttacacatggcagggagccaatgctactcgggatgagttgacaacatcagccttcctgacagttcaacttgaccggtccttaggcgggcaggctgtgcagattagagtgagccagggcaaggaacccgttcacctactgtctctgtttaaagataagcccctgataatttacaagaacggcactagcaaaaagggaggccaggcgcctgcaccccccacgaggcttttccaagtgcggcgtaatctggcctcaattacccgaattgttgaggtcgatgtagacgcaaatagcctgaactcgaatgatgtgttcgttctcaagctgcctcagaacagtggctacatatgggttggcaagggcgcttcacaagaagaggaaaagggcgcagaatatgtggcttcggtgctgaagtgcaagacattgcgcatccaggaaggagaagaacccgaggaattttggaactctctgggcggcaagaaggattatcagacttcccctcttcttgagacccaggccgaagatcacccacccagactgtacgggtgtagcaacaaaaccgggaggttcgttatcgaggagatccctggcgaatttactcaggacgacctcgccgaggatgatgtgatgttactcgatgcatgggaacagatatttatttggatcggaaaggacgctaacgaggttgagaagaaagaatccctaaagtccgcaaagatgtacctcgagacagacccttccggacgagataagcggacacctatagtgatcatcaagcagggccacgagccccccaccttcactgggtggttcctgggttgggactcgtccaaatggtag

SEQ ID NO: 42337 - DNA, 1407 bp, Artificial Sequence
  derived and/or modified sequence
atggccaagctgtacatggtgagcgacgccagcggcagcatgcgggtcaccgtcgtggcagaggaaaacccattttcaatggctatgctgttaagcgaggagtgcttcatcctggaccatggagccgccaaacagatctttgtatggaagggtaaggatgctaatcctcaggagcggaaggcagccatgaagaccgccgaagaatttttacaacagatgaactacagtaagaatacgcagatccaagttctgccagaaggcggagagacgcctatcttcaaacagttctttaaagactggcgggataaggaccagtctgatggatttgggaaagtctatgttacagaaaaggtggctcaaatcaaacagattcccttcgacgcctctaaactgcattcaagcccccaaatggctgcacagcataacatggtagatgatggctctggcaaagttgagatctggagggtcgagaacaatggacgcatccaagtggaccagaattcatatggcgaattttacggaggggattgttacatcattctttacacatatccaaggggtcagatcatatatacctggcaaggagccaacgctactagagatgaactgacaacttctgccttcctgaccgtgcaacttgaccgttcccttggggggcaagcagttcagattcgagtttcccagggcaaggaacccgtgcatcttttaagcctcttcaaagacaaacctctgatcatttataaaaatgggaccagcaaaaagggaggccaagcgcccgcccctcccaccagactctttcaggtccggcgcaaccttgcctcaattaccagaatcgtggaagtggacgttgacgctaattcactgaactccaacgacgtgttcgtgctaaagcttccccagaattctgggtacatctgggttggaaagggagcttcacaagaagaggagaaaggggccgaatacgttgccagcgttctgaagtgcaaaactttgcggatccaggagggcgaggagccagaggagttctggaatagccttggtggcaaaaaagactaccaaacctctcccttactcgagactcaagctgaggaccacccaccaagactctatggatgctccaacaagaccggaaggtttgtgatcgaggagattcccggagagttcacacaggacgatctcgccgaagatgatgtcatgttgctggacgcgtgggaacagattttcatctggatagggaaggacgcgaatgaagtggaaaagaaagagtcgctaaagtccgcgaaaatgtacctggaaactgatcccagcgggagagacaaaagaacacccattgtaatcatcaagcaggggcatgagccaccaacatttacagggtggttcttgggttgggattcaagcaagtggtag

SEQ ID NO: 42338 - DNA, 1407 bp, Artificial Sequence
  derived and/or modified sequence
atggccaagctgtacatggtgagcgacgccagcggcagcatgcgggtgacagtcgtggcagaagaaaacccgttctcaatggccatgttgctgtccgaagagtgcttcatcctggatcacggagcagccaagcagatcttcgtctggaaaggtaaggacgctaatcctcaagagagaaaagccgccatgaaaacagctgaagaattcctgcagcagatgaactactccaagaatacacagattcaggtgctgcccgaaggaggtgaaacacccatctttaaacagttcttcaaggactggcgcgacaaggatcagtctgacggattcggaaaggtctatgttactgaaaaggtggcacagataaaacagattccttttgacgcctcaaaacttcacagtagcccccagatggcggcacagcataatatggtcgacgacggctcaggtaaggtcgagatctggcgggtcgaaaacaacgggcgtatccaagtggatcagaattcatatggggaattctacggcggagattgctacattatcctgtatacttatccaagggggcagattatatacacttggcaaggggctaatgctacacgtgatgagctaaccaccagtgccttcttgactgtgcaactggaccggagtttgggaggtcaggcagtgcaaatcagggtgtcacagggcaaagaaccagtgcacctcctgtccttattcaaggacaaaccactaattatatacaagaacggaacttccaaaaaaggcggccaagctcccgccccccctacacggctgtttcaggtccgaagaaaccttgccagcatcacaagaattgtcgaagtcgacgtagatgcaaactctttgaattccaatgatgtattcgtgcttaagctacctcaaaactctgggtacatttgggtggggaaaggcgcttcccaggaggaagaaaaaggggccgaatacgtagcctccgtgttaaaatgtaaaacactgcggatccaagagggcgaagagccagaagagttctggaactctttgggaggcaagaaagattatcagactagccccttgctcgagacccaagcagaggatcaccctccccgcctctacggctgtagtaacaaaacagggaggtttgtgatcgaagagataccgggtgagttcacccaggatgacttagcagaggacgatgtgatgctgttggatgcatgggaacagatttttatatggattggaaaggacgccaacgaggtcgaaaaaaaagagtctttgaaaagcgccaagatgtacctggagaccgatccttcaggccgtgataaacggacccctattgtgatcataaaacagggacacgaacccccaaccttcaccggctggttcctcgggtgggactcctccaagtggtag

SEQ ID NO: 42339 - DNA, 2148 bp, Artificial Sequence
  derived and/or modified sequence
atggctcgggaattataccacgaagaattcgctcgtgctgggaagcaggcaggactgcaggtttggaggatcgagaagctggaactggttcccgtccctcaatcagcccacggtgacttttacgtgggagatgcctacttggtccttcataccgccaaaaccagccgcggatttacgtaccatctccatttttggctgggtaaggagtgtagtcaggacgaaagcacagccgcagccatttttacagtgcagatggacgattatctaggagggaagccagttcaaaacagagaacttcagggctacgaatctaacgactttgtaagttatttcaagggcggtctgaagtacaaggctggaggggtggcaagtggattgaaccatgtgttaacgaatgatctcactgctaaaagacttctgcacgttaaggggaggagagtcgttcgcgctacagaagtgcctctgtcttgggacagcttcaataaaggagattgctttataatcgatctggggaccgagatctaccagtggtgcggaagctcttgtaataagtacgagcgactaaaagcaaatcaggtcgcgaccggaattcgatataacgaaaggaagggccgtagcgagttgatcgtagttgaggaagggagtgagcctagcgagctgattaaggttctcggagaaaaacccgagctgccagatgggggagacgacgacgacataatcgcggacatctcaaatagaaaaatggcgaagctgtacatggtgagtgacgcttccggatcgatgagggtcacggtggttgctgaggagaacccctttagcatggccatgttactgtccgaagagtgcttcattctcgatcatggggcagccaaacagattttcgtgtggaagggcaaagatgccaatccccaggagaggaaggccgctatgaagaccgcggaggaattcctccagcagatgaattatagcaagaacacgcaaattcaggtgcttccggagggcggtgaaactccgatcttcaaacagtttttcaaggattggagggacaaggaccagagtgacggatttggcaaggtttacgtaactgagaaggtcgcccagatcaagcagattccattcgacgcaagtaaacttcactcatccccccagatggcagctcagcataatatggtcgatgatggatccggcaaggtggaaatctggcgggtggagaataacgggagaattcaggtcgaccagaattcttacggagagttctatggcggtgattgctacattatcttgtacacttatccgcgaggacagattatttatacctggcagggcgctaatgccacccgcgatgaactcacaacctctgcattcttgacggtgcaattagacagatctctgggcggacaagctgtccaaataagggtatcccagggtaaagagccagtgcatctcctttctctgttcaaggacaaaccgttgattatctataaaaacggcacttccaaaaagggtggccaggccccagcgccacccacccgcctgttccaggtcagacgtaatctcgcatctatcactcggatcgtggaagtggatgtcgacgccaatagcctcaactcaaatgacgtgttcgtgctgaagttaccccaaaattctggctatatctgggtgggcaagggtgcatctcaggaggaagagaagggagctgagtacgttgcctccgtactgaagtgcaagaccttgagaatccaggaaggggaggaacccgaggagttttggaatagtcttggtggaaagaaggattatcaaacatccccactcctcgagactcaggcagaagatcacccccctagactgtacggatgtagcaataaaactggtcggttcgtgatagaggaaatcccaggcgaatttacacaggatgaccttgccgaagatgatgttatgctcctcgacgcctgggaacagatttttatttggattggaaaagatgccaacgaggtcgagaaaaaggagtcactcaaatccgccaagatgtatttggagacggatccttccggtagggataaacgcactcccattgtaatcattaaacagggccatgagcctccaacttttacaggatggttccttgggtgggacagctccaaatggtag

SEQ ID NO: 42340 - DNA, 1407 bp, Artificial Sequence
  derived and/or modified sequence
atggctaagctgtatatggtcagcgacgccagcggctccatgagggtgacagtggtagccgaagagaatcccttcagtatggccatgctcctgtcggaggagtgcttcattcttgatcatggtgctgctaaacagatatttgtgtggaaaggtaaggacgcaaatccacaggagcggaaagctgccatgaaaacggctgaagagtttctgcagcagatgaattatagcaagaatacccaaatccaagtcctgccagagggtggagagacacctatcttcaaacagtttttcaaagactggagggacaaggatcagagtgatggtttcggcaaagtctacgtcacggaaaaggtggctcaaataaagcaaatccccttcgatgctagcaaactgcacagcagcccacagatggccgctcagcataacatggtggatgacggatctgggaaggttgaaatatggcgggtcgaaaataatggacggatacaggtggaccagaacagctatggggagttttacgggggagattgctatataattctttacacatatcctaggggccaaatcatatacacctggcaaggcgcaaacgctactagggacgagctaactacctccgcattcttgactgttcagctcgatagatctttgggcggacaggctgtgcagatcagagtgtcccagggtaaggagcctgtacatttactgtccctgtttaaggataaaccattgatcatttacaagaatggtacatcaaaaaagggtggtcaggcaccagcacctcctacaaggctgtttcaagtgagacgtaatttagcatcaataactcgaatcgttgaggtagacgtggatgcgaactctctgaatagcaatgatgtgttcgtactgaaactgcctcagaattccggctacatctgggtcggcaagggcgcatctcaggaggaagagaaaggagccgagtatgtcgctagcgtactcaagtgcaaaacccttcggatccaagaaggtgaggagccagaagagttctggaattcactgggtggaaagaaagactatcagacgagtcctctactcgagacccaggccgaggaccacccccctcgactttatgggtgctcaaacaagaccggcagattcgtaattgaggagataccaggtgaattcacccaggatgatctggcagaggatgacgttatgctgctggatgcatgggagcagatcttcatttggattggcaaggacgcaaacgaggtggaaaaaaaagaaagtctcaaaagcgcaaagatgtatctggagaccgacccaagtggtcgggacaaacggacccctattgttatcatcaaacagggccatgaacccccaacatttaccggatggttccttggttgggactctagcaaatggtag

SEQ ID NO: 42341 - DNA, 1407 bp, Artificial Sequence
  derived and/or modified sequence
atggccaagctgtatatggtgtcagatgcgtctggttcaatgagggttaccgttgttgcagaggagaatccgttttccatggcaatgctgctgagcgaggaatgctttatactggatcatggggcagctaagcagatattcgtgtggaagggaaaagacgccaatccccaagaacgaaaggctgcgatgaaaaccgcggaggagtttctgcaacagatgaattattcaaaaaacacccagatccaggttcttccggaaggaggagaaacccccatctttaagcagtttttcaaggattggcgggacaaagaccagagcgacggctttggcaaggtttacgtaaccgagaaagtagcccagatcaaacagatccccttcgacgcgagcaaactacatagcagcccgcagatggccgcacagcacaatatggtggatgatggttctggaaaggtagaaatctggcgcgtcgagaataatgggagaatccaggtcgaccaaaattcatatggagaattctacggcggagactgctatatcattctgtacacctaccccaggggacagattatctacacatggcagggtgcgaacgccaccagggacgagctcacaaccagcgcattcctgacggtgcagctggaccggagtctcggcggtcaggcggtgcagataagagtgtcccaggggaaagagcctgtgcacctgcttagcctgtttaaggataagccactgattatatataaaaacggtacttccaagaaaggcggacaggctcccgctcctcccactaggctgttccaggtccgcagaaatctggccagtattactcgtatcgtggaagtcgacgtggacgcgaacagtctcaatagtaatgatgtcttcgtcttgaaacttccgcagaactcaggatacatctgggtcggaaaaggcgcatctcaggaagaggagaaaggggctgaatacgtcgccagtgtccttaaatgtaagaccttgcggatccaggaaggagaagagcctgaagagttctggaactctctgggaggaaagaaagattatcaaacgtctcctcttctagaaactcaggcggaagaccatccacctcgcctctacgggtgtagtaataagacaggtaggttcgtgattgaagagattccaggagagttcacccaagatgatttggctgaggacgatgtgatgctactggatgcatgggaacagatcttcatctggatcgggaaggacgcgaatgaggttgagaagaaggaatccctgaagtctgcaaaaatgtatctagagacagatccatcagggagggacaaaagaaccccaatcgtcatcataaagcagggtcatgagccaccaaccttcactggttggtttctgggatgggattctagtaaatggtag

SEQ ID NO: 42342 - DNA, 3137 bp, Artificial Sequence
  derived and/or modified sequence
aacactataaagtggcggcgaataaggttcctcctgctgctctcggtttagtccaagatcagcgatatcacgcgtcccccggagcatcgcgtgcaggagccatggcgcgggagctataccacgaagagttcgcccgggcgggcaagcaggcggggctgcaggtctggaggattgagaagctggagctggtgcccgtgccccagagcgctcacggcgacttctacgtcggggatgcctacctggtgctgcacacggccaagacgagccgaggcttcacctaccacctgcacttctggctcggaaaggagtgttcccaggatgaaagcacagctgctgccatcttcactgttcagatggatgactatttgggtggcaagccagtgcagaatagagaacttcaaggatatgagtctaatgactttgttagctatttcaaaggcggtctgaaatacaaggctggaggcgtggcatctggattaaatcatgttcttacgaacgacctgacagccaagaggctcctacatgtgaagggtcgtagagtggtgagagccacagaagttccccttagctgggacagtttcaacaagggtgactgcttcatcattgaccttggcaccgaaatttatcagtggtgtggttcctcgtgcaacaaatatgaacgtctgaaggcaaaccaggtagctactggcattcggtacaatgaaaggaaaggaaggtctgaactaattgtcgtggaagaaggaagtgaaccctcagaacttataaaggtcttaggggaaaagccagagcttccagatggaggtgatgatgatgacattatagcagacataagtaacaggaaaatggctaaactatacatggtttcagatgcaagtggctccatgagagtgactgtggtggcagaagaaaaccccttctcaatggcaatgctgctgtctgaagaatgctttattttggaccacggggctgccaaacaaattttcgtatggaaaggtaaagatgctaatccccaagagaggaaggctgcaatgaagacagctgaagaatttctacagcaaatgaattattccaagaatacccaaattcaagttcttccagaaggaggtgaaacaccaatcttcaaacagttttttaaggactggagagataaagatcagagtgatggcttcgggaaagtttatgtcacagagaaagtggctcaaataaaacaaattccctttgatgcctcaaaattacacagttctccgcagatggcagcccagcacaatatggtggatgatggttctggcaaagtggagatttggcgtgtagaaaacaatggtaggatccaagttgaccaaaactcatatggtgaattctatggtggtgactgctacatcatactctacacctatcccagaggacagattatctacacgtggcaaggagcaaatgccacacgagatgagctgacaacatctgcgttcctgactgttcagttggatcggtcccttggaggacaggctgtgcagatccgagtctcccaaggcaaagagcctgttcacctactgagtttgttcaaagacaaaccgctcattatttacaagaatggaacatcaaagaaaggaggtcaggcacctgctccccctacacgcctctttcaagtccggagaaacctggcatctatcaccagaattgtggaggttgatgttgatgcaaattcactgaattctaacgatgtttttgtcctgaaactgccacaaaatagtggctacatctgggtaggaaaaggtgctagccaggaggaggagaaaggagcagagtatgtagcaagtgtcctaaagtgcaaaaccttaaggatccaagaaggcgaggagccagaggagttctggaattcccttggagggaaaaaagactaccagacctcaccactactggaaacccaggctgaagaccatccacctcggctttacggctgctctaacaaaactggaagatttgttattgaagagattccaggagagttcacccaggatgatttagctgaagatgatgtcatgttactagatgcttgggaacagatatttatttggattggcaaagatgctaatgaagttgagaaaaaagaatctctgaagtctgccaaaatgtaccttgagacagacccttctggaagagacaagaggacaccaattgtcatcataaaacagggccatgagccacccacattcacaggctggttcctgggctgggattccagcaagtggtaaattggtatttgtaaaaagcaaacaaacattacaaggcagttatctcattgctgttttgggagaggaacgggaaaagctttttgcttatttgtcttttgaaaattaaggctgggcgcggtggctcacacctgtaatcccagcactttgagaggatgaggtaggcggatcactggggtcaggatttcgagaccagcctggccaacatggcgaaacctcgcctctactaaaaatacaaaaaaattagctgcgcgtggtggtgcacgcctgtagtccctgctacttggaaggctgagacaggaaaattgcttgaacccaggaggctgaggttgcagtgagccaggattgcgccaccacactccagcctgggcaacagagactctgtctcaaaaaaaaaaaaaaaaaaaattaacctcaaccaaacgcctattttttaatgcttagttttggcttgaaattcttcttcacctggagttttcttacgttaatacattaaaataacctgaaggaaactttcgttatgggccaatattagctcttatggaaactgatttatatcttttttatgacctttcaaaagtaaaatactatgcataatctagaaagatttgtcagataggaaattttataatgcattagccattagtcagagttgttttttaacatgccagagaaaaagttgtaatgccttggaagttattctcttttctatagattgtgttcaaaagatgtgtatacttgcaataaggtttatgttaaggtggctttaacaattggttgctattttccttctttagtcaatatgactttgatgtcattaactgctaagtgttattttctaagaggaattttatcttttttttaaccttattaaaagcctttgaaaacaca

SEQ ID NO: 42343 - DNA, 2518 bp, Artificial Sequence
  derived and/or modified sequence
ggaaatttatcagtggtgtggttcctcgtgcaacaaatatgaacgtctgaaggcaaaccaggtagctactggcattcggtacaatgaaaggaaaggaaggtctgaactaattgtcgtggaagaaggaagtgaaccctcagaacttataaaggtcttaggggaaaagccagagcttccagatggaggtgatgatgatgacattatagcagacataagtaacaggaaaatggctaaactatacatggtttcagatgcaagtggctccatgagagtgactgtggtggcagaagaaaaccccttctcaatggcaatgctgctgtctgaagaatgctttattttggaccacggggctgccaaacaaattttcgtatggaaaggtaaagatgctaatccccaagagaggaaggctgcaatgaagacagctgaagaatttctacagcaaatgaattattccaagaatacccaaattcaagttcttccagaaggaggtgaaacaccaatcttcaaacagttttttaaggactggagagataaagatcagagtgatggcttcgggaaagtttatgtcacagagaaagtggctcaaataaaacaaattccctttgatgcctcaaaattacacagttctccgcagatggcagcccagcacaatatggtggatgatggttctggcaaagtggagatttggcgtgtagaaaacaatggtaggatccaagttgaccaaaactcatatggtgaattctatggtggtgactgctacatcatactctacacctatcccagaggacagattatctacacgtggcaaggagcaaatgccacacgagatgagctgacaacatctgcgttcctgactgttcagttggatcggtcccttggaggacaggctgtgcagatccgagtctcccaaggcaaagagcctgttcacctactgagtttgttcaaagacaaaccgctcattatttacaagaatggaacatcaaagaaaggaggtcaggcacctgctccccctacacgcctctttcaagtccggagaaacctggcatctatcaccagaattgtggaggttgatgttgatgcaaattcactgaattctaacgatgtttttgtcctgaaactgccacaaaatagtggctacatctgggtaggaaaaggtgctagccaggaggaggagaaaggagcagagtatgtagcaagtgtcctaaagtgcaaaaccttaaggatccaagaaggcgaggagccagaggagttctggaattcccttggagggaaaaaagactaccagacctcaccactactggaaacccaggctgaagaccatccacctcggctttacggctgctctaacaaaactggaagatttgttattgaagagattccaggagagttcacccaggatgatttagctgaagatgatgtcatgttactagatgcttgggaacagatatttatttggattggcaaagatgctaatgaagttgagaaaaaagaatctctgaagtctgccaaaatgtaccttgagacagacccttctggaagagacaagaggacaccaattgtcatcataaaacagggccatgagccacccacattcacaggctggttcctgggctgggattccagcaagtggtaaattggtatttgtaaaaagcaaacaaacattacaaggcagttatctcattgctgttttgggagaggaacgggaaaagctttttgcttatttgtcttttgaaaattaaggctgggcgcggtggctcacacctgtaatcccagcactttgagaggatgaggtaggcggatcactggggtcaggatttcgagaccagcctggccaacatggcgaaacctcgcctctactaaaaatacaaaaaaattagctgcgcgtggtggtgcacgcctgtagtccctgctacttggaaggctgagacaggaaaattgcttgaacccaggaggctgaggttgcagtgagccaggattgcgccaccacactccagcctgggcaacagagactctgtctcaaaaaaaaaaaaaaaaaaaattaacctcaaccaaacgcctattttttaatgcttagttttggcttgaaattcttcttcacctggagttttcttacgttaatacattaaaataacctgaaggaaactttcgttatgggccaatattagctcttatggaaactgatttatatcttttttatgacctttcaaaagtaaaatactatgcataatctagaaagatttgtcagataggaaattttataatgcattagccattagtcagagttgttttttaacatgccagagaaaaagttgtaatgccttggaagttattctcttttctatagattgtgttcaaaagatgtgtatacttgcaataaggtttatgttaaggtggctttaacaattggttgctattttccttctttagtcaatatgactttgatgtcattaactgctaagtgttattttctaagaggaattttatcttttttttaaccttattaaaagcctttgaaaac

SEQ ID NO: 42344 - DNA, 2660 bp, Artificial Sequence
  derived and/or modified sequence
caagatggtctcgatctcctgacctcgtgatccgcccgcctcagcctcccaaagatctgggattacaggcgtgagccactgcacccggccagaagctttttcatttattcgtccagcagcatcttgtactagtcctgactggaaatttatcagtggtgtggttcctcgtgcaacaaatatgaacgtctgaaggcaaaccaggtagctactggcattcggtacaatgaaaggaaaggaaggtctgaactaattgtcgtggaagaaggaagtgaaccctcagaacttataaaggtcttaggggaaaagccagagcttccagatggaggtgatgatgatgacattatagcagacataagtaacaggaaaatggctaaactatacatggtttcagatgcaagtggctccatgagagtgactgtggtggcagaagaaaaccccttctcaatggcaatgctgctgtctgaagaatgctttattttggaccacggggctgccaaacaaattttcgtatggaaaggtaaagatgctaatccccaagagaggaaggctgcaatgaagacagctgaagaatttctacagcaaatgaattattccaagaatacccaaattcaagttcttccagaaggaggtgaaacaccaatcttcaaacagttttttaaggactggagagataaagatcagagtgatggcttcgggaaagtttatgtcacagagaaagtggctcaaataaaacaaattccctttgatgcctcaaaattacacagttctccgcagatggcagcccagcacaatatggtggatgatggttctggcaaagtggagatttggcgtgtagaaaacaatggtaggatccaagttgaccaaaactcatatggtgaattctatggtggtgactgctacatcatactctacacctatcccagaggacagattatctacacgtggcaaggagcaaatgccacacgagatgagctgacaacatctgcgttcctgactgttcagttggatcggtcccttggaggacaggctgtgcagatccgagtctcccaaggcaaagagcctgttcacctactgagtttgttcaaagacaaaccgctcattatttacaagaatggaacatcaaagaaaggaggtcaggcacctgctccccctacacgcctctttcaagtccggagaaacctggcatctatcaccagaattgtggaggttgatgttgatgcaaattcactgaattctaacgatgtttttgtcctgaaactgccacaaaatagtggctacatctgggtaggaaaaggtgctagccaggaggaggagaaaggagcagagtatgtagcaagtgtcctaaagtgcaaaaccttaaggatccaagaaggcgaggagccagaggagttctggaattcccttggagggaaaaaagactaccagacctcaccactactggaaacccaggctgaagaccatccacctcggctttacggctgctctaacaaaactggaagatttgttattgaagagattccaggagagttcacccaggatgatttagctgaagatgatgtcatgttactagatgcttgggaacagatatttatttggattggcaaagatgctaatgaagttgagaaaaaagaatctctgaagtctgccaaaatgtaccttgagacagacccttctggaagagacaagaggacaccaattgtcatcataaaacagggccatgagccacccacattcacaggctggttcctgggctgggattccagcaagtggtaaattggtatttgtaaaaagcaaacaaacattacaaggcagttatctcattgctgttttgggagaggaacgggaaaagctttttgcttatttgtcttttgaaaattaaggctgggcgcggtggctcacacctgtaatcccagcactttgagaggatgaggtaggcggatcactggggtcaggatttcgagaccagcctggccaacatggcgaaacctcgcctctactaaaaatacaaaaaaattagctgcgcgtggtggtgcacgcctgtagtccctgctacttggaaggctgagacaggaaaattgcttgaacccaggaggctgaggttgcagtgagccaggattgcgccaccacactccagcctgggcaacagagactctgtctcaaaaaaaaaaaaaaaaaaaattaacctcaaccaaacgcctattttttaatgcttagttttggcttgaaattcttcttcacctggagttttcttacgttaatacattaaaataacctgaaggaaactttcgttatgggccaatattagctcttatggaaactgatttatatcttttttatgacctttcaaaagtaaaatactatgcataatctagaaagatttgtcagataggaaattttataatgcattagccattagtcagagttgttttttaacatgccagagaaaaagttgtaatgccttggaagttattctcttttctatagattgtgttcaaaagatgtgtatacttgcaataaggtttatgttaaggtggctttaacaattggttgctattttccttctttagtcaatatgactttgatgtcattaactgctaagtgttattttctaagaggaattttatcttttttttaaccttattaaaagcctttgaaaacac

SEQ ID NO: 42345 - DNA, 2148 bp, Artificial Sequence
  derived and/or modified sequence
atggccagagagctgtaccacgaggagttcgccagagccggcaagcaggccggcctgcaggtgtggagaatcgagaagctggagctggtgcccgtgccccagagcgcccacggcgacttctacgtgggcgacgcctacctggtgctgcacaccgccaagaccagcagaggcttcacctaccacctgcacttctggctgggcaaggagtgcagccaggacgagagcaccgccgccgccatcttcaccgtgcagatggacgactacctgggcggcaagcccgtgcagaacagagagctgcagggctacgagagcaacgacttcgtgagctacttcaagggcggcctgaagtacaaggccggcggcgtggccagcggcctgaaccacgtgctgaccaacgacctgaccgccaagagactgctgcacgtgaagggcagaagagtggtgagagccaccgaggtgcccctgagctgggacagcttcaacaagggcgactgcttcatcatcgacctgggcaccgagatctaccagtggtgcggcagcagctgcaacaagtacgagagactgaaggccaaccaggtggccaccggcatcagatacaacgagagaaagggcagaagcgagctgatcgtggtggaggagggcagcgagcccagcgagctgatcaaggtgctgggcgagaagcccgagctgcccgacggcggcgacgacgacgacatcatcgccgacatcagcaacagaaagatggccaagctgtacatggtgagcgacgccagcggcagcatgagagtgaccgtggtggccgaggagaaccccttcagcatggccatgctgctgagcgaggagtgcttcatcctggaccacggcgccgccaagcagatcttcgtgtggaagggcaaggacgccaacccccaggagagaaaggccgccatgaagaccgccgaggagttcctgcagcagatgaactacagcaagaacacccagatccaggtgctgcccgagggcggcgagacccccatcttcaagcagttcttcaaggactggagagacaaggaccagagcgacggcttcggcaaggtgtacgtgaccgagaaggtggcccagatcaagcagatccccttcgacgccagcaagctgcacagcagcccccagatggccgcccagcacaacatggtggacgacggcagcggcaaggtggagatctggagagtggagaacaacggcagaatccaggtggaccagaacagctacggcgagttctacggcggcgactgctacatcatcctgtacacctaccccagaggccagatcatctacacctggcagggcgccaacgccaccagagacgagctgaccaccagcgccttcctgaccgtgcagctggacagaagcctgggcggccaggccgtgcagatcagagtgagccagggcaaggagcccgtgcacctgctgagcctgttcaaggacaagcccctgatcatctacaagaacggcaccagcaagaagggcggccaggcccccgccccccccaccagactgttccaggtgagaagaaacctggccagcatcaccagaatcgtggaggtggacgtggacgccaacagcctgaacagcaacgacgtgttcgtgctgaagctgccccagaacagcggctacatctgggtgggcaagggcgccagccaggaggaggagaagggcgccgagtacgtggccagcgtgctgaagtgcaagaccctgagaatccaggagggcgaggagcccgaggagttctggaacagcctgggcggcaagaaggactaccagaccagccccctgctggagacccaggccgaggaccacccccccagactgtacggctgcagcaacaagaccggcagattcgtgatcgaggagatccccggcgagttcacccaggacgacctggccgaggacgacgtgatgctgctggacgcctgggagcagatcttcatctggatcggcaaggacgccaacgaggtggagaagaaggagagcctgaagagcgccaagatgtacctggagaccgaccccagcggcagagacaagagaacccccatcgtgatcatcaagcagggccacgagccccccaccttcaccggctggttcctgggctgggacagcagcaagtggtag

SEQ ID NO: 42346 - DNA, 1407 bp, Artificial Sequence
  derived and/or modified sequence
atggccaagctgtacatggtgagcgacgccagcggcagcatgagagtgaccgtggtggccgaggagaaccccttcagcatggccatgctgctgagcgaggagtgcttcatcctggaccacggcgccgccaagcagatcttcgtgtggaagggcaaggacgccaacccccaggagagaaaggccgccatgaagaccgccgaggagttcctgcagcagatgaactacagcaagaacacccagatccaggtgctgcccgagggcggcgagacccccatcttcaagcagttcttcaaggactggagagacaaggaccagagcgacggcttcggcaaggtgtacgtgaccgagaaggtggcccagatcaagcagatccccttcgacgccagcaagctgcacagcagcccccagatggccgcccagcacaacatggtggacgacggcagcggcaaggtggagatctggagagtggagaacaacggcagaatccaggtggaccagaacagctacggcgagttctacggcggcgactgctacatcatcctgtacacctaccccagaggccagatcatctacacctggcagggcgccaacgccaccagagacgagctgaccaccagcgccttcctgaccgtgcagctggacagaagcctgggcggccaggccgtgcagatcagagtgagccagggcaaggagcccgtgcacctgctgagcctgttcaaggacaagcccctgatcatctacaagaacggcaccagcaagaagggcggccaggcccccgccccccccaccagactgttccaggtgagaagaaacctggccagcatcaccagaatcgtggaggtggacgtggacgccaacagcctgaacagcaacgacgtgttcgtgctgaagctgccccagaacagcggctacatctgggtgggcaagggcgccagccaggaggaggagaagggcgccgagtacgtggccagcgtgctgaagtgcaagaccctgagaatccaggagggcgaggagcccgaggagttctggaacagcctgggcggcaagaaggactaccagaccagccccctgctggagacccaggccgaggaccacccccccagactgtacggctgcagcaacaagaccggcagattcgtgatcgaggagatccccggcgagttcacccaggacgacctggccgaggacgacgtgatgctgctggacgcctgggagcagatcttcatctggatcggcaaggacgccaacgaggtggagaagaaggagagcctgaagagcgccaagatgtacctggagaccgaccccagcggcagagacaagagaacccccatcgtgatcatcaagcagggccacgagccccccaccttcaccggctggttcctgggctgggacagcagcaagtggtag

SEQ ID NO: 42347 - protein, 1057 aa, Artificial Sequence
  derived and/or modified sequence
MACPALGLEALQPLQPEPPPEPAFSEAQKWIEQVTGRSFGDKDFRTGLENGILLCELLNAIKPGLVKKINRLPTPIAGLDNIILFLRGCKELGLKESQLFDPSDLQDTSNRVTVKSLDYSRKLKNVLVTIYWLGKAANSCTSYSGTTLNLKEFEGLLAQMRKDTDDIESPKRSIRDSGYIDCWDSERSDSLSPPRHGRDDSFDSLDSFGSRSRQTPSPDVVLRGSSDGRGSDSESDLPHRKLPDVKKDDMSARRTSHGEPKSAVPFNQYLPNKSNQTAYVPAPLRKKKAEREEYRKSWSTATSPLGGERPFRYGPRTPVSDDAESTSMFDMRCEEEAAVQPHSRARQEQLQLINNQLREEDDKWQDDLARWKSRRRSVSQDLIKKEEERKKMEKLLAGEDGTSERRKSIKTYREIVQEKERRERELHEAYKNARSQEEAEGILQQYIERFTISEAVLERLEMPKILERSHSTEPNLSSFLNDPNPMKYLRQQSLPPPKFTATVETTIARASVLDTSMSAGSGSPSKTVTPKAVPMLTPKPYSQPKNSQDVLKTFKVDGKVSVNGETVHREEEKERECPTVAPAHSLTKSQMFEGVARVHGSPLELKQDNGSIEINIKKPNSVPQELAATTEKTEPNSQEDKNDGGKSRKGNIELASSEPQHFTTTVTRCSPTVAFVEFPSSPQLKNDVSEEKDQKKPENEMSGKVELVLSQKVVKPKSPEPEATLTFPFLDKMPEANQLHLPNLNSQVDSPSSEKSPVMTPQFKFWAWDPEEERRRQEKWQQEQERLLQERYQKEQDKLKEEWEKAQKEVEEEERRYYEEERKIIEDTVVPFTVSSSSADQLSTSSSMTEGSGTMNKIDLGNCQDEKQDRRWKKSFQGDDSDLLLKTRESDRLEEKGSLTEGALAHSGNPVSKGVHEDHQLDTEAGAPHCGTNPQLAQDPSQNQQTSNPTHSSEDVKPKTLPLDKSINHQIESPSERRKSISGKKLCSSCGLPLGKGAAMIIETLNLYFHIQCFRCGICKGQLGDAVSGTDVRIRNGLLNCNDCYMRSRSAGQPTTL

SEQ ID NO: 42348 - DNA, 3174 bp, Artificial Sequence
  derived and/or modified sequence
atggcctgccccgccctgggcctggaggccctgcagcccctgcagcccgagcccccccccgagcccgccttcagcgaggcccagaagtggatcgagcaggtgaccggcagaagcttcggcgacaaggacttcagaaccggcctggagaacggcatcctgctgtgcgagctgctgaacgccatcaagcccggcctggtgaagaagatcaacagactgcccacccccatcgccggcctggacaacatcatcctgttcctgagaggctgcaaggagctgggcctgaaggagagccagctgttcgaccccagcgacctgcaggacaccagcaacagagtgaccgtgaagagcctggactacagcagaaagctgaagaacgtgctggtgaccatctactggctgggcaaggccgccaacagctgcaccagctacagcggcaccaccctgaacctgaaggagttcgagggcctgctggcccagatgagaaaggacaccgacgacatcgagagccccaagagaagcatcagagacagcggctacatcgactgctgggacagcgagagaagcgacagcctgagcccccccagacacggcagagacgacagcttcgacagcctggacagcttcggcagcagaagcagacagacccccagccccgacgtggtgctgagaggcagcagcgacggcagaggcagcgacagcgagagcgacctgccccacagaaagctgcccgacgtgaagaaggacgacatgagcgccagaagaaccagccacggcgagcccaagagcgccgtgcccttcaaccagtacctgcccaacaagagcaaccagaccgcctacgtgcccgcccccctgagaaagaagaaggccgagagagaggagtacagaaagagctggagcaccgccaccagccccctgggcggcgagagacccttcagatacggccccagaacccccgtgagcgacgacgccgagagcaccagcatgttcgacatgagatgcgaggaggaggccgccgtgcagccccacagcagagccagacaggagcagctgcagctgatcaacaaccagctgagagaggaggacgacaagtggcaggacgacctggccagatggaagagcagaagaagaagcgtgagccaggacctgatcaagaaggaggaggagagaaagaagatggagaagctgctggccggcgaggacggcaccagcgagagaagaaagagcatcaagacctacagagagatcgtgcaggagaaggagagaagagagagagagctgcacgaggcctacaagaacgccagaagccaggaggaggccgagggcatcctgcagcagtacatcgagagattcaccatcagcgaggccgtgctggagagactggagatgcccaagatcctggagagaagccacagcaccgagcccaacctgagcagcttcctgaacgaccccaaccccatgaagtacctgagacagcagagcctgcccccccccaagttcaccgccaccgtggagaccaccatcgccagagccagcgtgctggacaccagcatgagcgccggcagcggcagccccagcaagaccgtgacccccaaggccgtgcccatgctgacccccaagccctacagccagcccaagaacagccaggacgtgctgaagaccttcaaggtggacggcaaggtgagcgtgaacggcgagaccgtgcacagagaggaggagaaggagagagagtgccccaccgtggcccccgcccacagcctgaccaagagccagatgttcgagggcgtggccagagtgcacggcagccccctggagctgaagcaggacaacggcagcatcgagatcaacatcaagaagcccaacagcgtgccccaggagctggccgccaccaccgagaagaccgagcccaacagccaggaggacaagaacgacggcggcaagagcagaaagggcaacatcgagctggccagcagcgagccccagcacttcaccaccaccgtgaccagatgcagccccaccgtggccttcgtggagttccccagcagcccccagctgaagaacgacgtgagcgaggagaaggaccagaagaagcccgagaacgagatgagcggcaaggtggagctggtgctgagccagaaggtggtgaagcccaagagccccgagcccgaggccaccctgaccttccccttcctggacaagatgcccgaggccaaccagctgcacctgcccaacctgaacagccaggtggacagccccagcagcgagaagagccccgtgatgaccccccagttcaagttctgggcctgggaccccgaggaggagagaagaagacaggagaagtggcagcaggagcaggagagactgctgcaggagagataccagaaggagcaggacaagctgaaggaggagtgggagaaggcccagaaggaggtggaggaggaggagagaagatactacgaggaggagagaaagatcatcgaggacaccgtggtgcccttcaccgtgagcagcagcagcgccgaccagctgagcaccagcagcagcatgaccgagggcagcggcaccatgaacaagatcgacctgggcaactgccaggacgagaagcaggacagaagatggaagaagagcttccagggcgacgacagcgacctgctgctgaagaccagagagagcgacagactggaggagaagggcagcctgaccgagggcgccctggcccacagcggcaaccccgtgagcaagggcgtgcacgaggaccaccagctggacaccgaggccggcgccccccactgcggcaccaacccccagctggcccaggaccccagccagaaccagcagaccagcaaccccacccacagcagcgaggacgtgaagcccaagaccctgcccctggacaagagcatcaaccaccagatcgagagccccagcgagagaagaaagagcatcagcggcaagaagctgtgcagcagctgcggcctgcccctgggcaagggcgccgccatgatcatcgagaccctgaacctgtacttccacatccagtgcttcagatgcggcatctgcaagggccagctgggcgacgccgtgagcggcaccgacgtgagaatcagaaacggcctgctgaactgcaacgactgctacatgagaagcagaagcgccggccagcccaccaccctgtag

SEQ ID NO: 42349 - DNA, 3174 bp, Artificial Sequence
  derived and/or modified sequence
atggcttgtccagccctggggctggaggccctgcaaccattgcaacccgagccgccccccgagccggctttctccgaggcccagaagtggattgaacaagtcaccggacggagtttcggagacaaagactttagaacggggctggaaaatgggatcttgttgtgtgaactcctgaatgccataaagcctggactggtgaagaaaattaaccgactcccaactcctatcgcagggttggacaacattatcctattcctcaggggctgtaaagagctgggcctaaaagaaagtcagctgtttgacccctcagatctgcaagacacatctaacagagtgacagttaagtccctggattactctcgcaagctgaagaatgtgttggtaactatttattggctcggaaaggcggctaacagctgtacctcttattctggcacgaccctcaacttaaaagagtttgagggtttactggctcaaatgcgaaaagatactgatgacatcgaaagcccaaagcgatcgataagagactcaggttacattgactgctgggacagcgagcgcagcgactccttgtctccgcctaggcatggaagagatgatagttttgattcactagactccttcggctctagatcaaggcaaacacctagtcccgacgtggtcctccgcgggagctccgatgggagaggaagcgattccgaatccgatctaccacaccgcaaactgcctgatgtgaagaaggatgatatgtccgcccgccggacctcacacggagagccgaagtccgcagtgccattcaaccaatacctcccaaacaaatctaaccagacagcatacgtgcctgccccccttaggaagaagaaggccgaacgcgaggaatatcggaagtcttggtccaccgcgaccagccctctcggaggcgaacggccttttcgatacggacctagaaccccagttagcgacgatgccgagtctacaagtatgtttgatatgcgctgtgaggaggaggccgccgtgcagccgcactctcgggcccgtcaggaacagctgcagcttattaataaccagctcagagaggaggacgataaatggcaagacgacttagcccgctggaagtctaggaggcggtcagtgtctcaggatctcataaaaaaagaggaagaacgcaagaaaatggaaaaattacttgccggcgaggacggcacttcagaaaggagaaaatctattaagacgtatagagagatcgtgcaagagaaagagcgaagagaacgggagcttcacgaagcctataaaaatgcccgctcccaggaagaggccgagggaattctacagcagtatattgaacgcttcacgatcagtgaagcggttctggaacgactcgaaatgccgaagattctggaacgcagccatagcactgaaccaaacctttcctccttccttaacgaccctaatcctatgaagtacctgcgccagcagtccctgcccccgcctaagttcacagccacggtggaaaccacgatcgccagagctagtgtgttggatacgtccatgagcgccggctcaggcagtcctagtaaaacagtcacgccaaaagccgtccctatgctcacccctaaaccatactcacagccaaaaaacagtcaggatgtcctgaaaacctttaaggttgacgggaaggtaagcgttaacggcgagacagtgcaccgagaagaagagaaggaacgggaatgtcccaccgttgccccagcccattccctgactaaaagccaaatgtttgagggggtggcgcgcgtccacggttctccactggagctgaagcaggataatggttcgatagagatcaacatcaagaagccgaacagcgtgccacaggagctggctgctacaaccgaaaagacggaaccgaactctcaggaggacaagaatgatggaggaaagagccggaaggggaatatcgaactcgcctcgtctgaaccccagcattttacaacaacagtgacccggtgttcccctaccgtcgcatttgtggaattcccatcatctccccagcttaagaatgacgtgagcgaggaaaaagatcagaagaagccagagaacgagatgtcaggtaaggttgaacttgtgctcagccagaaggtagtgaaacctaagtcaccagagccagaggcaactttgacatttccttttctagataaaatgcctgaagccaatcagcttcatctccctaatcttaatagtcaggtggatagccccagctcagaaaaatctcccgttatgactcctcagtttaagttttgggcttgggatcctgaagaggaacgtaggcggcaagagaagtggcagcaggaacaggaacggcttctgcaagagaggtatcagaaggaacaggataagctcaaagaagaatgggaaaaggctcaaaaagaggttgaggaagaggagcgccgttactacgaggaagaacgaaagattatcgaagataccgtggtgcctttcaccgtgtcctcctcgtctgctgaccagttgagcacatcctcttccatgacagagggctccggcacaatgaataagatcgatctcgggaactgtcaggatgagaagcaagaccgaaggtggaagaaatccttccagggggacgacagcgatctgctgctgaagactcgtgagagtgataggctggaagaaaagggctctctgacggaaggggctctggcccactcaggtaaccccgtcagcaagggcgtgcacgaggatcatcagttagacaccgaagccggagctccgcattgcggaacaaatcctcagctcgcccaagatcccagccagaaccaacagacaagcaaccccactcatagcagcgaggatgtcaagccaaagaccctgcccctggacaagtctataaatcaccaaatcgagagtccaagcgaaagacgcaagtctattagtggaaaaaaactctgttcaagctgtggtctgcccctgggaaagggagccgcgatgattattgaaacactgaacttgtactttcatatacagtgtttcagatgcggcatttgcaagggccaacttggcgacgctgtcagcggcaccgatgtgcgaatccgaaatggtcttctcaactgtaatgactgttacatgcgttccagatccgctggtcagccgaccacactctag

SEQ ID NO: 42350 - DNA, 3174 bp, Artificial Sequence
  derived and/or modified sequence
atggcctgcccagccctgggcctggaggccctgcagcccctgcagcctgagcccccacctgagcccgccttcagcgaggcccagaagtggattgagcaggtgacaggccgcagctttggagacaaggacttcagaacaggcctggagaatggcatcctgctgtgtgagctgctgaatgccatcaagccaggcctggtgaagaagatcaaccggctgcccacccccatcgccggcctggacaacatcatcctcttcctgcggggctgcaaggagctgggcctgaaggagagccagctgtttgaccccagcgacctgcaggacaccagcaacagagtgacagtgaagagcctggactacagcaggaagctgaagaatgtgctggtgaccatctactggctgggcaaggccgccaacagctgcaccagctacagcggcaccaccctgaacctgaaggagtttgagggcctgctggcccagatgaggaaggacacagatgacatcgagagccccaagaggagcatccgggacagcggctacatcgactgctgggacagcgagaggagtgacagcctgagccccccaagacatggaagagatgacagctttgacagcctggacagctttggcagccgcagccggcagacccccagcccagatgtggtgctgcggggcagcagtgatggccggggcagtgacagcgagagtgacctgccccacaggaagctgcctgatgtgaagaaggatgacatgtctgcccggaggaccagccatggagagcccaagtctgctgtgcccttcaaccagtacctgcccaacaagagcaaccagacagcctacgtgcctgcccccctgaggaagaagaaggccgagcgggaggagtacaggaagtcctggagcacagccaccagccccctgggcggggagcggcccttccgctatggccccaggacccctgtgtctgatgatgctgagagcacctccatgtttgacatgagatgtgaggaggaggccgctgtgcagccccacagccgggcccggcaggagcagctgcagctgatcaacaaccagctgcgggaggaggatgacaagtggcaggatgacctggcccgctggaagagcagaagaagatctgtgtcccaggacctgatcaagaaggaggaggagaggaagaagatggagaagctgctggccggagaagatggcaccagcgagaggaggaagagcatcaagacctaccgggagatcgtgcaggagaaggagcggcgggagcgggagctgcacgaggcctacaagaatgcccggagccaggaggaggccgagggcatcctgcagcagtacatcgagcgcttcaccatcagcgaggccgtgctggagcggctggagatgcccaagatcctggagaggagccacagcacagagcccaacctgagcagcttcctgaatgaccccaaccccatgaagtacctgcggcagcagagcctgcccccacccaagttcaccgccaccgtggagaccaccatcgcccgggcctctgtgctggacacctccatgtctgctggcagcggcagccccagcaagacagtgacccccaaggctgtgcccatgctgacccccaagccctacagccagcccaagaacagccaggatgtgctgaagaccttcaaggtggatggcaaggtgtctgtgaatggagagaccgtgcaccgggaggaggagaaggagcgggagtgccccaccgtggccccagcccacagcctgaccaagagccagatgtttgagggcgtggcccgggtgcacggcagccccctggagctgaagcaggacaatggcagcattgagatcaacatcaagaagcccaacagcgtgccccaggagctggccgccaccacagagaagacagagcccaacagccaggaggacaagaatgatggcggcaagagcaggaaaggaaacatcgagctggccagcagcgagccccagcacttcaccaccaccgtgacccgctgcagccccaccgtggcctttgtggagttccccagcagcccccagctgaagaatgatgtgtctgaggagaaggaccagaagaagccagaaaatgagatgtctgggaaggtggagctggtgctgagccagaaggtggtgaagcccaagagccctgagcctgaggccaccctgaccttccccttcctggacaagatgcctgaggccaaccagctgcacctgcccaacctgaacagccaggtggacagccccagcagcgagaagagccctgtgatgaccccccagttcaagttctgggcctgggaccctgaggaggagcggcggcggcaggagaagtggcagcaggagcaggagcggctgctgcaggagcgctaccagaaggagcaggacaagctgaaggaggagtgggagaaggcccagaaggaggtggaggaggaggagcggcgctactatgaggaggagaggaagatcatcgaggacacagtggtgcccttcaccgtgagcagcagcagcgctgaccagctgagcaccagcagctccatgacagagggcagcggcaccatgaacaagattgacctgggcaactgccaggatgagaagcaggaccggcgctggaagaagagcttccagggagatgacagcgacctgctgctgaagacccgggagagtgaccggctggaggagaagggcagcctgacagagggcgccctggcccacagcggcaaccctgtgtccaaaggagtgcatgaggaccaccagctggacacagaagctggggccccccactgcggcaccaacccccagctggcccaggaccccagccagaaccagcagaccagcaaccccacccacagcagtgaagatgtgaagcccaagaccctgcccctggacaagagcatcaaccaccagatcgagagccccagcgagaggaggaagagcatcagcggcaagaagctgtgcagcagctgtggcctgcccctgggcaagggggccgccatgatcatcgagaccctgaacctgtacttccacatccagtgcttccgctgtggcatctgcaagggccagctgggagatgctgtgtctggaacagatgtgcgcatcagaaatggcctgctgaactgcaatgactgctacatgaggagccgctctgctggccagcccaccaccctgtag

SEQ ID NO: 42351 - DNA, 5057 bp, Artificial Sequence
  derived and/or modified sequence
ggcgacggcggcggccgtcctcatcccggcgcttgagaggacgcggggctgcgcaaatggcttgtcccgctctcggtctggaagctcttcagcccctgcagcccgagccgccccccgagcccgccttctccgaggcgcagaagtggattgagcaagtaactggcagaagttttggtgataaagattttcggacaggtttagaaaatggaatcctcctctgcgagttgctgaatgctataaagccaggacttgttaaaaagatcaatagattgcctacccccattgcaggactggacaatattatcttattcttgagaggttgtaaagagctcggccttaaagaatctcaactttttgacccgagtgacctccaggatacatccaacagagtaacagtcaagagccttgattatagtaggaagctgaaaaatgtattagttaccatttactggctgggaaaagcagcaaacagctgcacatcctacagcggaacgacactaaacctgaaggagtttgaaggattgttggctcagatgcgaaaggacactgatgacattgaaagtcctaaacgcagtatccgagacagtggctacatcgactgctgggattccgagcgcagcgactccctctctcctcctcgccacggcagagatgattccttcgacagcctggattcctttggctctcgctctcggcagacgccttcaccagatgtagtcctcaggggaagcagcgatgggagaggaagcgactctgaatccgacttgcctcatcggaagctgccagatgtgaagaaggatgacatgtctgcacggcggacttcccatggtgagccgaaatcagcagtgccttttaaccagtacctcccgaacaaaagcaatcagacggcctacgtccccgcgcctctgagaaagaagaaagcagagagagaggaataccgcaagagctggagtaccgccacctccccgctgggtggggagaggcccttcagatacggtccgagaactcctgtgtctgatgacgcagagagcaccagcatgtttgacatgcggtgtgaggaggaggccgcggtgcagccgcacagcagggcccgccaggagcagctgcagctgataaataaccagctgagggaagaggacgacaaatggcaagatgacctggctcgttggaagagtcgtagaagaagtgtttctcaggacttaatcaagaaagaggaagaaaggaaaaaaatggagaagttactggctggagaagatgggacaagtgaacgaaggaaaagcatcaaaacctacagagaaattgttcaagaaaaagagcggagagagagagagctgcatgaagcatataagaacgctcggtcccaggaggaggcagaggggatccttcaacagtacattgagaggttcaccatcagtgaggctgttctcgaacgcttggagatgccaaaaattctggaaagaagccattcaacagagccaaatttatcctccttcctgaatgaccccaatcccatgaaatacctgcggcaacagtcactgcctccacccaaattcactgccactgttgaaaccaccattgctcgtgccagtgttctggataccagcatgtcagcaggcagtgggtctccaagcaaaactgtcactcccaaagcagtgcctatgctgacacccaagccttactcccagcccaaaaattctcaagatgttctgaagacctttaaggtagacgggaaagtcagtgtgaatggagagacggttcatagagaggaggagaaggaaagagagtgtcccacggtggcacctgcccactccttaaccaaatcccagatgtttgaaggtgtggccagagtgcacgggtctccactggagctgaaacaagacaacggtagcatcgagatcaacataaagaagccaaactctgttccccaagagctcgcagcaaccactgagaaaacggaaccgaatagtcaagaggacaagaatgatggtggaaaatcaagaaaagggaatatagaacttgcctcatcagaaccacagcattttacaacaactgtgactcgatgcagcccgaccgtggcctttgtggaatttccctccagcccccagctgaagaatgatgtgtcggaagaaaaagaccagaagaaaccagaaaatgaaatgagtggaaaggtggagttggtgctgtcacaaaaggtggtaaagccaaaatctccagaacccgaagcaacgctgacatttccatttctggacaaaatgcctgaagccaaccaactacatttgccaaatctcaattctcaagtggattctccaagcagtgagaagtcacctgttatgacacctcagtttaagttctgggcatgggacccagaagaggagcgcaggcgacaggaaaaatggcaacaggaacaggaacgtttgctccaggagagataccagaaggagcaggacaagctgaaagaagagtgggaaaaggcccaaaaggaggtggaagaggaagaacgcagatactatgaggaggagcgtaagataattgaagacactgtggttccatttactgtttcttcaagttccgctgaccagctgtctacctcttcctccatgactgaaggcagtgggacaatgaataagatagacctgggaaactgtcaagatgaaaaacaagacagaagatggaagaaatcattccagggagatgacagtgacttattgctgaagactagggaaagtgatcgactggaggagaagggcagcctaactgaaggggccttggctcattctgggaaccctgtatcaaaaggagtccatgaagaccatcagctggataccgaggctggggccccacactgtggaacaaacccacagcttgctcaggatccatcccagaatcagcagacatcaaatccaacgcacagttcagaagatgtgaagccaaaaaccctcccgctggataaaagcattaaccatcagatcgagtctcccagtgaaaggcggaagtctataagtggaaagaagctgtgctcttcctgtgggcttcctttgggtaaaggagctgcaatgatcatcgagaccctcaatctctattttcacatccagtgtttcaggtgtggaatttgtaaaggccagcttggagatgcagtgagtgggacggatgttaggattcgaaatggtctcctgaactgtaatgattgctacatgcgatccagaagtgccgggcagcctacaacattgtgacacggctttcaagcttccggatcactcaccatttctttactgagagtgtcccctggcaactgcttaacaaaatcccaagctcaggggcttctcagcatttacctaatttctgaaaggctcttctgaaaggtggtatctgttctttcgtagcacagtgtttatgtttttcctgtttattgttttggttttttttttttttttgcatttgcacagtatacacaaaagaatatggggttgtaatgatcctgaatagctcaaaaaaggttttagcatggtcaaacaggcttatggtttaaaatgtgttattctcttctttgggaattagctaaatgatgcaataaacctgttttgttttagaatgtctaggaattaaacactttatgtttacagaattgagctgcagaaagtgcaagacatgccaatttgagacacacggtcttctaagactgaaggataaatttaatgcatttcagaaactaaacatcacagcaagctctatctctgagctataatttgtttttaatgcaaagacactagtttgataatatatactgtaatcctgaaacatttgtgttacttacctttggaggtagaaattataccaataaattattgcaccgttagtattagattctgtgtaccttggaagttatgtcattaatataggctggttcatcaaataaagcaaaaccttgcaatatcagctagatttacactccgggacgttgcccaaaggtaggaagaaagcagagggaaatatttcagtcatcatttccaaagtcattatcaaaatctgtgaggaagtttaatcttccaaagagtcaatgtcagacatcaggcctctgttgcctgcttctctcgaggcactagattaggagtcttcaataagagacttaacatgaggtatatggaagatgaggcaccgagataagttcatcattaggtgtgagcactgctcacccttgctggcaagttctccttaagggcctgaagcacaggtgtccaaagaaaagcgttaagtccatcttaatagaatctatgtggtatatgatgtggtcagcccctggtctgtgatcagcaagaacctacagcacagattatgccctgcccacttcaatgaatacctactctcctccattctccatcactttttttgctatcaagaactccggaccttgcccatggagaagtttagagaggaactcttgtggagagctggtttattttctgccctgtgcgacgagtttcagctggccaagaaaggagtcaagttattaaaaagcatcacaatgtagatctccaggctggttttttgttttttgttgttaagactggggaaagggggactatttattctgccttaaatcaatggcaaataagtcaagatgacattttgtgaatgtagactatggatacactcctaatagattgatgtagtcataaaagggggtcaagtagatgtttttctgttatgtaagcaataatttttccgtgtcttattgagtatggctagcgattatttattacatgctagatgggttctttgcatgtgggttccatataggtgcagaaatttcctcagccactggagggatttcgaccatatttgtcatttggatgagctgttattagattgaaatctacacatcatttcattaaaaattgtgccttagaaaacgcaaagctgttgcacatggcgataaattatggatgcagtacattgaagagagatgaagtcacttccaagtttccaagacttctcatggaggtgtttgctgttttacaggaaaaaataaaaataaaaaaagaaaaaaagaaaaaattaaa

SEQ ID NO: 42352 - DNA, 3174 bp, Artificial Sequence
  derived and/or modified sequence
atggcctgccccgccctgggcctggaggccctgcagcccctgcagcccgagcccccccctgagccggccttttctgaagcacagaaatggattgaacaggtgactgggcgctcatttggcgataaggactttcgcaccgggctggagaacggcatcttgctgtgtgaactgttgaatgcgatcaagccagggctggtgaaaaagataaacagactgccaacgccaattgcaggcctagacaacattatccttttcctcagggggtgcaaagagcttgggcttaaggaatcccaactcttcgatccaagtgacctgcaagatacctctaaccgggtcacagtgaaaagcttggattactctaggaagctgaagaatgtgctggtcaccatctattggctcggcaaagcggcaaattcctgtacctcctacagtggtactactttgaatctgaaagaattcgagggcttgctggcacagatgcgaaaagacaccgatgacatcgagtctcctaagcgaagcattcgcgactccgggtatatcgactgttgggatagcgagcgtagtgatagcctttcccctcctcggcacggacgcgacgactccttcgatagcctagactccttcggttccaggtcacgccagaccccaagccctgacgtcgtcctgcgtggatctagtgatggaagagggagcgattcagaatctgatttgccgcatcgtaagctccccgacgtgaaaaaagatgacatgagtgcgcggagaacatctcacggtgagcctaaatcagcggtgcctttcaaccagtacctacctaataaaagcaatcaaacagcctacgtgcccgccccattaagaaagaagaaggccgagcgtgaagaataccgcaaaagctggtctaccgctacatccccattggggggcgaacgcccattcaggtacggcccccgaacaccagtgtctgacgacgcagaatcgacttctatgttcgacatgaggtgcgaagaggaggcagcagtacagcctcacagcagagcacggcaagaacagcttcagcttatcaacaatcagctgcgtgaggaggacgacaaatggcaagatgacctggccagatggaaatctcgtcgaagatccgtgagccaggaccttatcaaaaaagaggaggaaagaaaaaaaatggagaagcttctagcaggagaggatggtaccagcgaacggcggaaaagcattaaaacgtacagggaaatcgtgcaggaaaaggaacgaagggagcgagaactgcatgaggcatataaaaacgctcggagccaagaggaagcagaaggaatcttgcagcaatacatcgaaagatttaccatctccgaggcagtcctggagagacttgagatgcccaagattttggagcgctcccacagtacggaacccaacctcagttcttttctcaacgacccaaatcctatgaaatacctgagacagcagagtctccccccaccaaagtttaccgcgacagtcgagacaacgatcgccagagcgagtgtgctggatacaagcatgtccgccggatcggggagcccatccaagaccgtcactcctaaggccgttcccatgcttacaccaaaaccatatagccagcctaagaattctcaggatgtgctgaagacctttaaggtggacggtaaggtcagcgttaacggggaaactgtccacagagaggaggagaaagagagagaatgccctactgtagctccagcacatagcctgaccaaatcacagatgtttgagggcgttgcacgtgtccatggttctcccctggagttaaaacaagataacggttctatcgaaatcaacatcaaaaagccaaacagcgtgccacaggaactcgctgcaacaacagagaaaacagaacccaatagccaagaggataagaacgacggaggaaagtcccgcaaaggaaacatcgagttagcaagtagcgaacctcaacacttcacaactactgtaactcggtgttcccctacagtggcattcgtcgaattcccgtcctctccacagctgaaaaacgacgttagcgaggagaaagaccaaaagaagcccgagaacgaaatgagcggcaaggtggaactagtcctgtcacaaaaggtggtaaagccaaagtcacctgaacccgaggccactttgactttccccttcctcgacaagatgccagaagcgaatcagctacacctcccgaatttaaattcccaggtcgactccccatccagtgaaaaatctcctgtgatgaccccacagttcaaattctgggcgtgggaccccgaggaagagagaagaaggcaggaaaagtggcaacaggaacaggaacgactcttgcaggagaggtatcagaaagaacaagacaagttgaaagaggaatgggagaaagcacaaaaagaggttgaagaggaagagcggagatactacgaagaggagcggaaaatcattgaggataccgtagtgcctttcacagtgtctagctccagtgcagaccagcttagtaccagttcctctatgacggaagggagcggcacaatgaacaaaatcgacctgggcaattgccaagatgaaaagcaggatagacgttggaagaaatcattccagggagacgactctgacctcctcctgaaaacacgcgagtctgatcgccttgaagagaagggatccttgactgagggggccttggcccattcaggtaacccagtctcaaaaggcgtgcacgaggatcatcagctcgacaccgaagctggagccccccactgtggtactaatccacagcttgcacaagacccaagccaaaatcagcagactagtaatcctactcactcaagcgaagacgtgaaacccaagacgcttccgctcgacaaatctataaaccaccagatcgaaagtccctcagaacgaaggaagagcatctctggaaaaaaactctgcagttcatgtggcctgccgttgggaaagggtgccgctatgatcatcgagactctcaacctttatttccatatccagtgcttcagatgtggcatctgcaagggtcagcttggtgacgccgtgagcggtaccgacgtgcgtattaggaatgggctgctgaattgtaatgattgttatatgagatccagatcagccgggcagcctaccactctgtag

SEQ ID NO: 42353 - DNA, 3174 bp, Artificial Sequence
  derived and/or modified sequence
atggcttgtcccgcactcggattggaggcgctccagcctctccagccggagcctccccctgaaccagcattttcggaggctcagaagtggattgaacaggttactggtagaagcttcggagacaaggactttcgcacgggactggaaaacggcattctgctatgcgaactcctgaacgctatcaagccaggactggtaaaaaagatcaaccgattgccgacccctatagccggactagacaatataatcttgtttctgagagggtgcaaagaactgggcctcaaggagagccagttatttgacccttccgatctgcaagatacgagcaatcgtgtcacagttaaaagcctggactacagtcggaagctgaaaaacgttctggtgaccatatattggctgggcaaggcagccaacagttgcaccagttattctgggaccacattgaatctgaaggaattcgaggggctgctggcgcagatgaggaaggataccgacgacatagagtccccaaaaaggtccattagagacagtgggtacatcgattgttgggatagcgaacgatcagatagcctgtcgcccccacgtcacgggagagatgactcattcgactccctcgattctttcggcagtagatcaagacagaccccatctcccgacgtggtccttaggggctcttcagacggtcgcggaagtgattcagaatccgatctacctcacaggaaactccccgacgtaaagaaagacgacatgagtgccaggaggacctctcacggagagcccaagagcgcagtccccttcaaccagtacctgccaaataagtccaatcagaccgcttacgtaccggctcctctgagaaagaagaaggccgagagagaggagtacagaaaaagctggtccacagccacgtccccacttggtggggaaagacctttccggtatggaccaagaactcctgttagtgatgacgctgaatccaccagcatgttcgatatgcggtgtgaggaagaagccgcagtccagccccattcccgggcacggcaggaacagctgcagctgatcaacaatcagttgcgggaagaagacgacaaatggcaagatgatctcgctaggtggaaatctagacgtcgcagcgtctcgcaggacctgataaagaaagaagaggagcggaagaaaatggagaaactgcttgctggtgaggacggcacttctgagaggcggaagagcattaaaacttacagggaaatagtccaggaaaaagaacggagagagcgtgagctgcacgaggcctacaaaaatgcccgttcccaggaggaagcagaaggcattcttcaacagtatattgagcggttcaccatcagcgaagcagtgcttgaaagattagaaatgccaaaaatccttgaaagaagccattccaccgaaccgaatttgagcagctttcttaatgatcctaacccaatgaaataccttagacagcaatctctgccaccaccaaagttcacggctacagtcgagaccacaattgccagggctagcgtgttagacacatcaatgtctgccggaagcgggtctcccagcaagaccgtgactcctaaggccgtgcccatgctgacgcctaagccatattcacagccaaagaactctcaggatgtgctaaaaacttttaaagttgacggcaaggtgagcgttaatggagagactgtacaccgggaggaggagaaagagcgtgaatgtcccactgtggcccctgcacactctttaaccaaatcccagatgtttgaaggagttgccagagttcacggttcacctctcgaactcaaacaggacaacgggagcattgaaatcaatatcaagaagcctaatagcgtgccgcaggagctggccgctacaaccgagaaaaccgagcccaacagtcaggaggacaagaacgatggcggaaagtcacgcaaagggaatattgagctggcctcctcagaaccgcagcacttcactacaacggttacaagatgcagcccgacagtagcatttgtggagttcccgtctagccctcagctgaagaacgacgtctcagaagagaaggaccagaagaaacctgagaacgaaatgtcgggtaaagtggaactggtactgagtcagaaagtggtgaaaccaaagtctcccgagcctgaggcgacactgacatttccatttctggacaaaatgccggaggccaatcaattgcatctgcccaatctcaactcacaggtggattcaccttcaagcgagaagtccccagtcatgaccccccaattcaagttctgggcatgggaccccgaggaggaaaggcgcaggcaagaaaaatggcaacaggaacaggagcggctgcttcaggaacggtatcagaaagaacaggacaaactaaaagaggaatgggagaaggctcagaaagaggtcgaggaggaggaaaggcgctattatgaagaggagcgcaaaatcattgaagacactgtcgtgccattcactgttagctcatcctctgctgaccaactgtccacatccagctctatgaccgagggtagcgggacaatgaataagatcgaccttggaaactgtcaagatgaaaaacaggaccgccgttggaaaaagtcttttcagggcgacgattctgacctgttgttaaaaacacgagagtcggatcggctagaagagaaggggtcattgaccgagggagcactggctcattcaggtaatcccgtgtctaaaggggtccacgaggaccaccagctcgatactgaggccggtgcacctcactgtggtactaatccacagctcgcgcaggatccatctcaaaatcagcagacctccaacccaacacactcctctgaggatgttaagcccaagactctgccccttgacaaatcaattaatcaccagatcgaatcaccgtctgaaaggcggaagagcatcagcggtaaaaagctttgctcgagttgtggcctgccgctcggcaagggagccgctatgattattgaaactctgaacttgtattttcatatccagtgttttagatgcggaatttgcaagggccagctgggagatgccgtctccggaacagacgtacgtattcgtaatggcctgctaaattgcaacgactgctatatgcgctctaggtccgcaggccagcctacgactttatag

SEQ ID NO: 42354 - protein, 1056 aa, Artificial Sequence
  derived and/or modified sequence
MACPALGLEALQPLQPEPPPEPAFSEAQKWIEQVTGRSFGDKDFRTGLENGILLCELLNAIKPGLVKKINRLPTPIAGLDNIILFLRGCKELGLKESQLFDPSDLQDTSNRVTVKSLDYSRKLKNVLVTIYWLGKAANSCTSYSGTTLNLKEFEGLLAQMRKDTDDIESPKRSIRDSGYIDCWDSERSDSLSPPRHGRDDSFDSLDSFGSRSRQTPSPDVVLRGSSDGRGSDSESDLPHRKLPDVKKDDMSARRTSHGEPKSAVPFNQYLPNKSNQTAYVPAPLRKKKAEREEYRKSWSTATSPLGGERPFRYGPRTPVSDDAESTSMFDMRCEEEAAVQPHSRARQEQLQLINNQLREEDDKWQDDLARWKSRRRSVSQDLIKKEEERKKMEKLLAGEDGTSERRKSIKTYREIVQEKERRERELHEAYKNARSQEEAEGILQQYIERFTISEAVLERLEMPKILERSHSTEPNLSSFLNDPNPMKYLRQQSLPPPKFTATVETTIARASVLDTSMSAGSGSPSKTVTPKAVPMLTPKPYSQPKNSQDVLKTFKVDGKVSVNGETVHREEEKERECPTVAPAHSLTKSQMFEGVARVHGSPLELKQDNGSIEINIKKPNSVPQELAATTEKTEPNSQEDKNDGGKSRKGNIELASSEPQHFTTTVTRCSPTVAFVEFPSSPQLKNDVSEEKDQKKPENEMSGKVELVLSQKVVKPKSPEPEATLTFPFLDKMPEANQLHLPNLNSQVDSPSSEKSPVMTPFKFWAWDPEEERRRQEKWQQEQERLLQERYQKEQDKLKEEWEKAQKEVEEEERRYYEEERKIIEDTVVPFTVSSSSADQLSTSSSMTEGSGTMNKIDLGNCQDEKQDRRWKKSFQGDDSDLLLKTRESDRLEEKGSLTEGALAHSGNPVSKGVHEDHQLDTEAGAPHCGTNPQLAQDPSQNQQTSNPTHSSEDVKPKTLPLDKSINHQIESPSERRKSISGKKLCSSCGLPLGKGAAMIIETLNLYFHIQCFRCGICKGQLGDAVSGTDVRIRNGLLNCNDCYMRSRSAGQPTTL

SEQ ID NO: 42355 - DNA, 2694 bp, Artificial Sequence
  derived and/or modified sequence
atgagaaaggacaccgacgacatcgagagccccaagagaagcatcagagacagcggctacatcgactgctgggacagcgagagaagcgacagcctgagcccccccagacacggcagagacgacagcttcgacagcctggacagcttcggcagcagaagcagacagacccccagccccgacgtggtgctgagaggcagcagcgacggcagaggcagcgacagcgagagcgacctgccccacagaaagctgcccgacgtgaagaaggacgacatgagcgccagaagaaccagccacggcgagcccaagagcgccgtgcccttcaaccagtacctgcccaacaagagcaaccagaccgcctacgtgcccgcccccctgagaaagaagaaggccgagagagaggagtacagaaagagctggagcaccgccaccagccccctgggcggcgagagacccttcagatacggccccagaacccccgtgagcgacgacgccgagagcaccagcatgttcgacatgagatgcgaggaggaggccgccgtgcagccccacagcagagccagacaggagcagctgcagctgatcaacaaccagctgagagaggaggacgacaagtggcaggacgacctggccagatggaagagcagaagaagaagcgtgagccaggacctgatcaagaaggaggaggagagaaagaagatggagaagctgctggccggcgaggacggcaccagcgagagaagaaagagcatcaagacctacagagagatcgtgcaggagaaggagagaagagagagagagctgcacgaggcctacaagaacgccagaagccaggaggaggccgagggcatcctgcagcagtacatcgagagattcaccatcagcgaggccgtgctggagagactggagatgcccaagatcctggagagaagccacagcaccgagcccaacctgagcagcttcctgaacgaccccaaccccatgaagtacctgagacagcagagcctgcccccccccaagttcaccgccaccgtggagaccaccatcgccagagccagcgtgctggacaccagcatgagcgccggcagcggcagccccagcaagaccgtgacccccaaggccgtgcccatgctgacccccaagccctacagccagcccaagaacagccaggacgtgctgaagaccttcaaggtggacggcaaggtgagcgtgaacggcgagaccgtgcacagagaggaggagaaggagagagagtgccccaccgtggcccccgcccacagcctgaccaagagccagatgttcgagggcgtggccagagtgcacggcagccccctggagctgaagcaggacaacggcagcatcgagatcaacatcaagaagcccaacagcgtgccccaggagctggccgccaccaccgagaagaccgagcccaacagccaggaggacaagaacgacggcggcaagagcagaaagggcaacatcgagctggccagcagcgagccccagcacttcaccaccaccgtgaccagatgcagccccaccgtggccttcgtggagttccccagcagcccccagctgaagaacgacgtgagcgaggagaaggaccagaagaagcccgagaacgagatgagcggcaaggtggagctggtgctgagccagaaggtggtgaagcccaagagccccgagcccgaggccaccctgaccttccccttcctggacaagatgcccgaggccaaccagctgcacctgcccaacctgaacagccaggtggacagccccagcagcgagaagagccccgtgatgacccccttcaagttctgggcctgggaccccgaggaggagagaagaagacaggagaagtggcagcaggagcaggagagactgctgcaggagagataccagaaggagcaggacaagctgaaggaggagtgggagaaggcccagaaggaggtggaggaggaggagagaagatactacgaggaggagagaaagatcatcgaggacaccgtggtgcccttcaccgtgagcagcagcagcgccgaccagctgagcaccagcagcagcatgaccgagggcagcggcaccatgaacaagatcgacctgggcaactgccaggacgagaagcaggacagaagatggaagaagagcttccagggcgacgacagcgacctgctgctgaagaccagagagagcgacagactggaggagaagggcagcctgaccgagggcgccctggcccacagcggcaaccccgtgagcaagggcgtgcacgaggaccaccagctggacaccgaggccggcgccccccactgcggcaccaacccccagctggcccaggaccccagccagaaccagcagaccagcaaccccacccacagcagcgaggacgtgaagcccaagaccctgcccctggacaagagcatcaaccaccagatcgagagccccagcgagagaagaaagagcatcagcggcaagaagctgtgcagcagctgcggcctgcccctgggcaagggcgccgccatgatcatcgagaccctgaacctgtacttccacatccagtgcttcagatgcggcatctgcaagggccagctgggcgacgccgtgagcggcaccgacgtgagaatcagaaacggcctgctgaactgcaacgactgctacatgagaagcagaagcgccggccagcccaccaccctgtag

SEQ ID NO: 42356 - DNA, 3171 bp, Artificial Sequence
  derived and/or modified sequence
atggcctgccccgccctgggcctggaggccctgcagcccctgcagcccgagcccccccccgagcccgccttcagcgaggcccagaagtggatcgagcaggtgaccggcagaagcttcggcgacaaggacttcagaaccggcctggagaacggcatcctgctgtgcgagctgctgaacgccatcaagcccggcctggtgaagaagatcaacagactgcccacccccatcgccggcctggacaacatcatcctgttcctgagaggctgcaaggagctgggcctgaaggagagccagctgttcgaccccagcgacctgcaggacaccagcaacagagtgaccgtgaagagcctggactacagcagaaagctgaagaacgtgctggtgaccatctactggctgggcaaggccgccaacagctgcaccagctacagcggcaccaccctgaacctgaaggagttcgagggcctgctggcccagatgagaaaggacaccgacgacatcgagagccccaagagaagcatcagagacagcggctacatcgactgctgggacagcgagagaagcgacagcctgagcccccccagacacggcagagacgacagcttcgacagcctggacagcttcggcagcagaagcagacagacccccagccccgacgtggtgctgagaggcagcagcgacggcagaggcagcgacagcgagagcgacctgccccacagaaagctgcccgacgtgaagaaggacgacatgagcgccagaagaaccagccacggcgagcccaagagcgccgtgcccttcaaccagtacctgcccaacaagagcaaccagaccgcctacgtgcccgcccccctgagaaagaagaaggccgagagagaggagtacagaaagagctggagcaccgccaccagccccctgggcggcgagagacccttcagatacggccccagaacccccgtgagcgacgacgccgagagcaccagcatgttcgacatgagatgcgaggaggaggccgccgtgcagccccacagcagagccagacaggagcagctgcagctgatcaacaaccagctgagagaggaggacgacaagtggcaggacgacctggccagatggaagagcagaagaagaagcgtgagccaggacctgatcaagaaggaggaggagagaaagaagatggagaagctgctggccggcgaggacggcaccagcgagagaagaaagagcatcaagacctacagagagatcgtgcaggagaaggagagaagagagagagagctgcacgaggcctacaagaacgccagaagccaggaggaggccgagggcatcctgcagcagtacatcgagagattcaccatcagcgaggccgtgctggagagactggagatgcccaagatcctggagagaagccacagcaccgagcccaacctgagcagcttcctgaacgaccccaaccccatgaagtacctgagacagcagagcctgcccccccccaagttcaccgccaccgtggagaccaccatcgccagagccagcgtgctggacaccagcatgagcgccggcagcggcagccccagcaagaccgtgacccccaaggccgtgcccatgctgacccccaagccctacagccagcccaagaacagccaggacgtgctgaagaccttcaaggtggacggcaaggtgagcgtgaacggcgagaccgtgcacagagaggaggagaaggagagagagtgccccaccgtggcccccgcccacagcctgaccaagagccagatgttcgagggcgtggccagagtgcacggcagccccctggagctgaagcaggacaacggcagcatcgagatcaacatcaagaagcccaacagcgtgccccaggagctggccgccaccaccgagaagaccgagcccaacagccaggaggacaagaacgacggcggcaagagcagaaagggcaacatcgagctggccagcagcgagccccagcacttcaccaccaccgtgaccagatgcagccccaccgtggccttcgtggagttccccagcagcccccagctgaagaacgacgtgagcgaggagaaggaccagaagaagcccgagaacgagatgagcggcaaggtggagctggtgctgagccagaaggtggtgaagcccaagagccccgagcccgaggccaccctgaccttccccttcctggacaagatgcccgaggccaaccagctgcacctgcccaacctgaacagccaggtggacagccccagcagcgagaagagccccgtgatgacccccttcaagttctgggcctgggaccccgaggaggagagaagaagacaggagaagtggcagcaggagcaggagagactgctgcaggagagataccagaaggagcaggacaagctgaaggaggagtgggagaaggcccagaaggaggtggaggaggaggagagaagatactacgaggaggagagaaagatcatcgaggacaccgtggtgcccttcaccgtgagcagcagcagcgccgaccagctgagcaccagcagcagcatgaccgagggcagcggcaccatgaacaagatcgacctgggcaactgccaggacgagaagcaggacagaagatggaagaagagcttccagggcgacgacagcgacctgctgctgaagaccagagagagcgacagactggaggagaagggcagcctgaccgagggcgccctggcccacagcggcaaccccgtgagcaagggcgtgcacgaggaccaccagctggacaccgaggccggcgccccccactgcggcaccaacccccagctggcccaggaccccagccagaaccagcagaccagcaaccccacccacagcagcgaggacgtgaagcccaagaccctgcccctggacaagagcatcaaccaccagatcgagagccccagcgagagaagaaagagcatcagcggcaagaagctgtgcagcagctgcggcctgcccctgggcaagggcgccgccatgatcatcgagaccctgaacctgtacttccacatccagtgcttcagatgcggcatctgcaagggccagctgggcgacgccgtgagcggcaccgacgtgagaatcagaaacggcctgctgaactgcaacgactgctacatgagaagcagaagcgccggccagcccaccaccctgtag

SEQ ID NO: 42357 - DNA, 2694 bp, Artificial Sequence
  derived and/or modified sequence
atgcggaaggacaccgatgatattgagtctcctaaacgttcgatacgggactccggctacattgattgctgggatagcgaacggagcgactccctatcaccaccacgtcatggccgtgacgactcctttgactctttggacagctttggaagcaggagtcgccagacccccagccccgatgtggtcctgagaggtagttctgatggacgaggatccgattctgagagcgatctcccccatcgtaagctgcccgatgtgaaaaaggatgatatgagcgctagaagaacgagtcatggtgagccaaaatcagcggttccattcaaccagtacctacccaataaatctaaccagaccgcatacgttccggctccactgagaaagaagaaagccgagagggaggagtatagaaagtcgtggtctaccgctacctcaccgctgggcggcgaaagacctttcagatacggccctagaaccccagtttcagatgatgccgaatctacctcaatgtttgatatgcggtgcgaagaggaggcagcagtgcagccccactctcgtgccaggcaggagcaattgcagttgatcaacaaccagttacgggaagaagacgacaagtggcaggacgatttggctcggtggaagagcaggagacgctcagtatcacaagacttgatcaaaaaagaagaggagcgtaagaaaatggagaagctgctcgctggcgaggacggaacctccgagagacgaaaatcaatcaaaacttatcgtgagatcgttcaagagaaggaaaggagagaacgcgagctgcacgaggcttataagaatgcccgatctcaggaggaggccgaagggatccttcaacagtacattgaacgctttaccatctctgaggccgttctcgagaggctagagatgcctaaaatcttggagcggagccacagcactgaaccaaatctcagttcgtttctcaatgacccaaatcccatgaaatatttgcggcagcagtcactgccccctccgaaattcacggctactgtagaaaccaccatcgcccgggcctcagtgttggacacaagcatgtcagcgggtagcggctcgccaagtaagacggtgactccaaaggcggtccccatgcttacgccaaaaccttactcccagcccaagaatagccaggacgtcctgaaaacattcaaagtagacggtaaggtgtctgtgaatggagaaactgtccatagagaagaagagaaagagcgtgaatgtccaaccgtggcgcctgcccacagcttaaccaagagtcagatgttcgagggcgtagcccgcgtccatggctcacccctcgaattgaagcaggacaacgggtcaatcgagataaacattaaaaaacctaattccgtgccacaagagctagcagcaaccacggaaaaaactgagcccaattcccaggaggacaaaaatgacggagggaagtcccgtaagggcaacatcgagctcgccagctccgagccccagcacttcaccacaacagttacccgatgcagtcctacggtggcattcgtcgaattcccatcttccccacaactgaagaacgacgtctctgaggagaaagaccagaaaaagcccgagaatgagatgagcggcaaagtggaactcgtgctgagtcagaaagttgtcaagccgaagagcccagaaccggaggcaacactgaccttcccttttctggacaaaatgcctgaagccaatcagctccatctgcccaatctgaattctcaggtggacagcccatcgtcagaaaagagtccagtgatgacccccttcaagttctgggcctgggatcccgaagaagaaagacgcagacaggaaaaatggcagcaagagcaggaacgcctgcttcaggagcggtaccaaaaagagcaggacaaactgaaagaagagtgggagaaggcccaaaaggaggtggaagaggaggagagacgatactacgaagaagagaggaaaataatcgaggacacagtcgtcccattcactgtctcaagttctagcgcggaccaactcagtacctcatcttcaatgacagagggctccgggacaatgaacaaaatagaccttggaaattgtcaggacgaaaagcaggataggagatggaagaaatcatttcagggcgatgatagcgacctactgctgaagacccgggagtcagatcgcctggaagaaaaagggtccctcactgaaggagcgctcgctcactctggcaaccctgtgtctaagggagttcacgaggaccaccagctcgacacggaagccggagccccacattgtggaacaaaccctcaactagcccaggatccttcccagaaccaacaaacgtccaaccccactcattcctcagaagacgtcaagcctaagaccctgcctctcgacaagagcataaaccatcaaatagaatctccctctgagagaagaaagtctatctccggaaagaagctgtgcagcagctgcggtctcccactcggtaagggagcagccatgataatcgagaccctaaacttgtacttccacattcagtgcttcagatgtggcatttgtaagggacagctgggcgacgcggtgtctggcaccgacgtacggattaggaatggtcttttgaattgcaacgattgttacatgaggtcacgaagtgccggtcagcccaccactttatag

SEQ ID NO: 42358 - DNA, 3171 bp, Artificial Sequence
  derived and/or modified sequence
atggcttgccctgctctgggtctggaggcattgcagccccttcaaccggagcccccgcccgaaccagccttctcagaggcccagaaatggatagagcaggtgactggacgatcttttggagataaggactttaggaccggacttgaaaatggtatcctcctctgcgagttgcttaatgctattaagcccgggctagttaagaagatcaatagattaccaactcccattgccgggctagataatataatcctctttctgaggggctgtaaagagttaggactgaaagagagtcagctgttcgacccttccgaccttcaggacactagtaatcgggtcaccgtcaaatcactggattacagccggaagcttaaaaacgtcttggtgactatctactggttggggaaggctgcaaactcatgtacctcctattctggcaccacactgaatctcaaggaatttgagggacttctggcacagatgagaaaggataccgatgatattgagtccccaaagagatcaatccgggattcaggctatatcgattgctgggatagcgagaggtcggactcactatccccccctcggcacggcagagatgacagcttcgacagcctggattcctttggctctcggtctaggcaaacaccaagtcctgatgtggtgctgagaggcagctcagacggtcgcggaagcgacagcgagagcgatctgccgcaccgcaagttgccagacgtaaaaaaagacgacatgtccgcgcggcgaacatctcatggggaacccaaatcagctgtccccttcaaccaatatctccctaacaagtctaaccagacagcctacgtgcccgcacccctgcggaaaaagaaggccgagcgggaagaataccgcaaatcctggtctaccgctacatctccactcggaggcgaaagaccattccgatatggcccacggacacctgtgagtgacgacgcagagtctaccagcatgtttgacatgagatgtgaagaagaggcagcagtgcagccccattctagagcccggcaggagcagcttcagctgataaataatcagttgcgggaagaggacgacaagtggcaagacgacttagcacggtggaaatcaaggcgtcgtagcgtttcgcaggatctcattaagaaagaggaggaaaggaagaagatggaaaaactactcgctggcgaggatggcacctccgagcgccggaaatcaattaaaacatatcgggaaattgtgcaggagaaagagcggagagagagggaactgcacgaggcctacaaaaatgcaaggtctcaggaagaagccgaaggtatccttcagcagtacattgaacgatttaccataagtgaggcagttctggagcggctcgagatgcccaagattcttgaaagatcccactctaccgagccaaacctttctagcttccttaatgaccctaacccaatgaagtacctgcgtcagcagtctttgcctcccccaaaattcacagcaaccgtggagaccacaattgcccgggcgtccgtgctggacacgtcgatgtcggcgggatccggcagcccatcgaagacagtgacacctaaagcagtgcccatgctcaccccaaaaccgtattcacagcctaagaacagccaggatgtcctgaaaacctttaaagtagacgggaaagtgtctgtcaacggggaaacagtccacagggaagaagagaaggaacgcgagtgtcccactgtggcccccgcccacagcctaacaaagtcccagatgttcgaaggcgttgccagagttcacggaagccctctggagctcaagcaagataatggctctatcgaaattaacattaagaagccaaacagcgtgccccaagagctcgccgccacaaccgaaaaaaccgagcctaactctcaggaggacaagaacgatgggggcaagagtagaaagggcaatatagaactcgcatctagtgaaccacagcattttacgaccaccgtgacccgctgctccccaaccgtggcctttgtggaattcccctcgtccccccagctgaaaaatgacgtatcggaggagaaggaccaaaagaaacctgagaacgaaatgagcgggaaggtcgaactagtcttgagtcagaaggtggttaagccaaagtcccctgagcctgaagcaacattgacatttcccttccttgataaaatgcccgaggccaatcagctccacctccctaacctcaatagtcaggtggacagcccatcatcagaaaagagtcctgtgatgacacccttcaagttttgggcatgggaccccgaggaggaacggagacggcaagagaagtggcaacaggaacaggagcgccttctgcaagagaggtaccagaaagagcaagacaaactcaaggaggaatgggagaaggcacaaaaggaagtggaagaggaagagagaaggtactacgaagaggagagaaaaattattgaggatacagtggtgcctttcactgtgtcctcttcatcggcagatcagttgagcacctcaagcagcatgacagagggatcagggaccatgaataagatcgacttggggaattgtcaggacgagaagcaagatcgacgctggaagaaaagcttccagggcgatgattctgatctccttctgaaaactagggaatctgatcgcctggaagagaagggcagcctcacagaaggggcgctggcgcacagtggaaatccagtgtcgaaaggagttcacgaggatcaccagcttgatactgaagccggcgctccccactgcgggaccaacccacaactggctcaggaccccagccagaaccagcagacctcaaaccccacgcatagcagcgaagacgtgaagcctaaaaccttacctctggacaaatccatcaatcatcaaatagaaagcccatcggagcgccggaagtcaatatctggcaagaaattatgcagtagctgtggcctgcctctcgggaagggcgcagccatgatcatcgaaacattgaacctgtatttccatatacaatgtttccggtgcgggatctgtaagggccagctgggggacgcagtctccggcaccgatgtgaggattcggaatggcctcctcaactgcaatgattgctatatgcgttccagaagtgcggggcagccgaccactttgtag

SEQ ID NO: 42359 - DNA, 2694 bp, Artificial Sequence
  derived and/or modified sequence
atgaggaaggacacagatgacatcgagagccccaagaggagcatccgggacagcggctacatcgactgctgggacagcgagaggagtgacagcctgagcccccccaggcatggaagagatgacagctttgacagcctggacagctttggcagccgcagccggcagacccccagcccagatgtggtgctgcggggcagcagtgatggccggggcagtgacagcgagagtgacctgccccacaggaagctgcctgatgtgaagaaggatgacatgtctgcccggaggaccagccacggggagcccaagtctgctgtgcccttcaaccagtacctgcccaacaagagcaaccagacagcctacgtgcctgcccccctgaggaagaagaaggccgagcgggaggagtacaggaagtcctggagcacagccaccagccccctgggcggggagcggcccttccgctatggccccaggacccctgtgtctgatgatgctgagagcacctccatgtttgacatgagatgtgaggaggaggccgctgtgcagccccacagccgggcccggcaggagcagctgcagctgatcaacaaccagctgcgggaggaggatgacaagtggcaggatgacctggcccgctggaagagcagaagaagatctgtgtcccaggacctgatcaagaaggaggaggagaggaagaagatggagaagctgctggccggggaggatggcaccagcgagaggaggaagagcatcaagacctaccgggagatcgtgcaggagaaggagcggcgggagcgggagctgcacgaggcctacaagaatgcccggagccaggaggaggccgagggcatcctgcagcagtacatcgagcgcttcaccatcagcgaggccgtgctggagcggctggagatgcccaagatcctggagaggagccacagcacagagcccaacctgagcagcttcctgaatgaccccaaccccatgaagtacctgcggcagcagagcctgcccccacccaagttcaccgccaccgtggagaccaccatcgcccgggcctctgtgctggacacctccatgtctgctggcagcggcagccccagcaagacagtgacccccaaggctgtgcccatgctgacccccaagccctacagccagcccaagaacagccaggatgtgctgaagaccttcaaggtggatggcaaggtgtctgtgaatggagaaacagtgcaccgggaggaggagaaggagagagaatgtcccaccgtggccccagcccacagcctgaccaagagccagatgtttgaaggagtggcccgggtgcacggcagccccctggagctgaagcaggacaatggcagcattgagatcaacatcaagaagcccaacagcgtgccccaggagctggccgccaccacagagaagacagagcccaacagccaggaggacaagaatgatggcggcaagagcaggaagggcaacatcgagctggccagcagcgagccccagcacttcaccaccaccgtgacccgctgcagccccaccgtggcctttgtggagttccccagcagcccccagctgaagaatgatgtgtctgaggagaaggaccagaagaagccagaaaatgagatgtctgggaaggtggagctggtgctgagccagaaggtggtgaagcccaagagccctgagcctgaggccaccctgaccttccccttcctggacaagatgcctgaggccaaccagctgcacctgcccaacctgaacagccaggtggacagccccagcagcgagaagagccctgtgatgacccccttcaagttctgggcctgggaccctgaggaggagcggcggcggcaggagaagtggcagcaggagcaggagcggctgctgcaggagcgctaccagaaggagcaggacaagctgaaggaggagtgggagaaggcccagaaggaggtggaggaggaggagcggcgctactatgaggaggagaggaagatcatcgaggacacagtggtgcccttcaccgtgagcagcagcagcgctgaccagctgagcaccagcagctccatgacagagggcagcggcaccatgaacaagattgacctgggcaactgccaggatgagaagcaggaccggcgctggaagaagagcttccagggagatgacagcgacctgctgctgaagacccgggagagtgaccggctggaggagaagggcagcctgacagagggcgccctggcccacagcggcaaccctgtgtccaaaggagtgcatgaggaccaccagctggacacagaagctggggccccccactgcggcaccaacccccagctggcccaggaccccagccagaaccagcagaccagcaaccccacccacagcagtgaagatgtgaagcccaagaccctgcccctggacaagagcatcaaccaccagatcgagagccccagcgagaggaggaagagcatcagcggcaagaagctgtgcagcagctgtggcctgcccctgggcaagggggccgccatgatcatcgagaccctgaacctgtacttccacatccagtgcttccgctgtggcatctgcaagggccagctgggagatgctgtgtctggaacagatgtgcgcatcagaaatggcctgctgaactgcaatgactgctacatgaggagccgctctgctggccagcccaccaccctgtag

SEQ ID NO: 42360 - DNA, 3171 bp, Artificial Sequence
  derived and/or modified sequence
atggcctgcccagccctgggcctggaggccctgcagcccctgcagcctgagcccccacctgagcccgccttcagcgaggcccagaagtggattgagcaggtgacaggccgcagctttggagacaaggacttcagaacaggcctggagaatggcatcctgctgtgtgagctgctgaatgccatcaagccaggcctggtgaagaagatcaaccggctgcccacccccatcgccggcctggacaacatcatcctcttcctgcggggctgcaaggagctgggcctgaaggagagccagctgtttgaccccagcgacctgcaggacaccagcaacagagtgacagtgaagagcctggactacagcaggaagctgaagaatgtgctggtgaccatctactggctgggcaaggccgccaacagctgcaccagctacagcggcaccaccctgaacctgaaggagtttgagggcctgctggcccagatgaggaaggacacagatgacatcgagagccccaagaggagcatccgggacagcggctacatcgactgctgggacagcgagaggagtgacagcctgagccccccaagacatggaagagatgacagctttgacagcctggacagctttggcagccgcagccggcagacccccagcccagatgtggtgctgcggggcagcagtgatggccggggcagtgacagcgagagtgacctgccccacaggaagctgcctgatgtgaagaaggatgacatgtctgcccggaggaccagccatggagagcccaagtctgctgtgcccttcaaccagtacctgcccaacaagagcaaccagacagcctacgtgcctgcccccctgaggaagaagaaggccgagcgggaggagtacaggaagtcctggagcacagccaccagccccctgggcggggagcggcccttccgctatggccccaggacccctgtgtctgatgatgctgagagcacctccatgtttgacatgagatgtgaggaggaggccgctgtgcagccccacagccgggcccggcaggagcagctgcagctgatcaacaaccagctgcgggaggaggatgacaagtggcaggatgacctggcccgctggaagagcagaagaagatctgtgtcccaggacctgatcaagaaggaggaggagaggaagaagatggagaagctgctggccggagaagatggcaccagcgagaggaggaagagcatcaagacctaccgggagatcgtgcaggagaaggagcggcgggagcgggagctgcacgaggcctacaagaatgcccggagccaggaggaggccgagggcatcctgcagcagtacatcgagcgcttcaccatcagcgaggccgtgctggagcggctggagatgcccaagatcctggagaggagccacagcacagagcccaacctgagcagcttcctgaatgaccccaaccccatgaagtacctgcggcagcagagcctgcccccacccaagttcaccgccaccgtggagaccaccatcgcccgggcctctgtgctggacacctccatgtctgctggcagcggcagccccagcaagacagtgacccccaaggctgtgcccatgctgacccccaagccctacagccagcccaagaacagccaggatgtgctgaagaccttcaaggtggatggcaaggtgtctgtgaatggagagaccgtgcaccgggaggaggagaaggagcgggagtgccccaccgtggccccagcccacagcctgaccaagagccagatgtttgagggcgtggcccgggtgcacggcagccccctggagctgaagcaggacaatggcagcattgagatcaacatcaagaagcccaacagcgtgccccaggagctggccgccaccacagagaagacagagcccaacagccaggaggacaagaatgatggcggcaagagcaggaaaggaaacatcgagctggccagcagcgagccccagcacttcaccaccaccgtgacccgctgcagccccaccgtggcctttgtggagttccccagcagcccccagctgaagaatgatgtgtctgaggagaaggaccagaagaagccagaaaatgagatgtctgggaaggtggagctggtgctgagccagaaggtggtgaagcccaagagccctgagcctgaggccaccctgaccttccccttcctggacaagatgcctgaggccaaccagctgcacctgcccaacctgaacagccaggtggacagccccagcagcgagaagagccctgtgatgacccccttcaagttctgggcctgggaccctgaggaggagcggcggcggcaggagaagtggcagcaggagcaggagcggctgctgcaggagcgctaccagaaggagcaggacaagctgaaggaggagtgggagaaggcccagaaggaggtggaggaggaggagcggcgctactatgaggaggagaggaagatcattgaagatactgtggtgcccttcaccgtgagcagcagcagcgctgaccagctgagcaccagcagctccatgacagagggcagcggcaccatgaacaagattgacctgggcaactgccaggatgagaagcaggaccggcgctggaagaagagcttccagggagatgacagcgacctgctgctgaagacccgggagagtgaccggctggaggagaagggcagcctgacagaaggagccctggcccacagcggcaaccctgtgtccaagggcgtgcatgaggaccaccagctggacacagaggccggggccccccactgcggcaccaacccccagctggcccaggaccccagccagaaccagcagaccagcaaccccacccacagcagtgaagatgtgaagcccaagaccctgcccctggacaagagcatcaaccaccagatcgagagccccagcgagaggaggaagagcatcagcggcaagaagctgtgcagcagctgtggcctgcccctgggcaaaggagctgccatgatcatcgagaccctgaacctgtacttccacatccagtgcttccgctgtggcatctgcaagggccagctgggagatgctgtgtctggaacagatgtgcgcatcagaaatggcctgctgaactgcaatgactgctacatgaggagccgctctgctggccagcccaccaccctgtag

SEQ ID NO: 42361 - DNA, 3439 bp, Artificial Sequence
  derived and/or modified sequence
agcctgcttgtggacagagcaggggttggcagtggtgacgactgttttgggaaaggaaatgtaagggcatttcggctgctgtgctggggctgacgaggagcacacaggagagatgcccctcccatctcccagagtgggttggctggagttcattgcggagcatgaggacgtgtgggggacaatattatcttattcttgagaggttgtaaagagctcggccttaaagaatctcaactttttgacccgagtgacctccaggatacatccaacagagtaacagtcaagtattagttaccatttactggctgggaaaagcagcaaacagctgcacatcctacagcggaacgacactaaacctgaaggagtttgaaggattgttggctcagatgcgaaaggacactgatgacattgaaagtcctaaacgcagtatccgagacagtggctacatcgactgctgggattccgagcgcagcgactccctctctcctcctcgccacggcagagatgattccttcgacagcctggattcctttggctctcgctctcggcagacgccttcaccagatgtagtcctcaggggaagcagcgatgggagaggaagcgactctgaatccgacttgcctcatcggaagctgccagatgtgaagaaggatgacatgtctgcacggcggacttcccatggtgagccgaaatcagcagtgccttttaaccagtacctcccgaacaaaagcaatcagacggcctacgtccccgcgcctctgagaaagaagaaagcagagagagaggaataccgcaagagctggagtaccgccacctccccgctgggtggggagaggcccttcagatacggtccgagaactcctgtgtctgatgacgcagagagcaccagcatgtttgacatgcggtgtgaggaggaggccgcggtgcagccgcacagcagggcccgccaggagcagctgcagctgataaataaccagctgagggaagaggacgacaaatggcaagatgacctggctcgttggaagagtcgtagaagaagtgtttctcaggacttaatcaagaaagaggaagaaaggaaaaaaatggagaagttactggctggagaagatgggacaagtgaacgaaggaaaagcatcaaaacctacagagaaattgttcaagaaaaagagcggagagagagagagctgcatgaagcatataagaacgctcggtcccaggaggaggcagaggggatccttcaacagtacattgagaggttcaccatcagtgaggctgttctcgaacgcttggagatgccaaaaattctggaaagaagccattcaacagagccaaatttatcctccttcctgaatgaccccaatcccatgaaatacctgcggcaacagtcactgcctccacccaaattcactgccactgttgaaaccaccattgctcgtgccagtgttctggataccagcatgtcagcaggcagtgggtctccaagcaaaactgtcactcccaaagcagtgcctatgctgacacccaagccttactcccagcccaaaaattctcaagatgttctgaagacctttaaggtagacgggaaagtcagtgtgaatggagagacggttcatagagaggaggagaaggaaagagagtgtcccacggtggcacctgcccactccttaaccaaatcccagatgtttgaaggtgtggccagagtgcacgggtctccactggagctgaaacaagacaacggtagcatcgagatcaacataaagaagccaaactctgttccccaagagctcgcagcaaccactgagaaaacggaaccgaatagtcaagaggacaagaatgatggtggaaaatcaagaaaagggaatatagaacttgcctcatcagaaccacagcattttacaacaactgtgactcgatgcagcccgaccgtggcctttgtggaatttccctccagcccccagctgaagaatgatgtgtcggaagaaaaagaccagaagaaaccagaaaatgaaatgagtggaaaggtggagttggtgctgtcacaaaaggtggtaaagccaaaatctccagaacccgaagcaacgctgacatttccatttctggacaaaatgcctgaagccaaccaactacatttgccaaatctcaattctcaagtggattctccaagcagtgagaagtcacctgttatgacaccttttaagttctgggcatgggacccagaagaggagcgcaggcgacaggaaaaatggcaacaggaacaggaacgtttgctccaggagagataccagaaggagcaggacaagctgaaagaagagtgggaaaaggcccaaaaggaggtggaagaggaagaacgcagatactatgaggaggagcgtaagataattgaagacactgtggttccatttactgtttcttcaagttccgctgaccagctgtctacctcttcctccatgactgaaggcagtgggacaatgaataagatagacctgggaaactgtcaagatgaaaaacaagacagaagatggaagaaatcattccagggagatgacagtgacttattgctgaagactagggaaagtgatcgactggaggagaagggcagcctaactgaaggggccttggctcattctgggaaccctgtatcaaaaggagtccatgaagaccatcagctggataccgaggctggggccccacactgtggaacaaacccacagcttgctcaggatccatcccagaatcagcagacatcaaatccaacgcacagttcagaagatgtgaagccaaaaaccctcccgctggataaaagcattaaccatcagatcgagtctcccagtgaaaggcggaagtctataagtggaaagaagctgtgctcttcctgtgggcttcctttgggtaaaggagctgcaatgatcatcgagaccctcaatctctattttcacatccagtgtttcaggtgtggaatttgtaaaggccagcttggagatgcagtgagtgggacggatgttaggattcgaaatggtctcctgaactgtaatgattgctacatgcgatccagaagtgccgggcagcctacaacattgtgacacggctttcaagcttccggatcactcaccatttctttactgagagtgtcccctggcaactgcttaacaaaatcccaagctcaggggcttctcagcatttacctaatttctgaaaggctcttctgaaaggtggtatctgttctttcgtagcacagtgtttatgtttttcctgtttattgttttggttttttttttttttttgcatttgcacagtatacacaaaagaatatggggttgtaatgatcctgaatagctcaaaaaaggttttagcatggtcaaacaggcttatggtttaaaatgtgttattctcttctttgggaattagctaaatgatgcaataaacctgttttgttttagaa

SEQ ID NO: 42362 - DNA, 5054 bp, Artificial Sequence
  derived and/or modified sequence
ggcgacggcggcggccgtcctcatcccggcgcttgagaggacgcggggctgcgcaaatggcttgtcccgctctcggtctggaagctcttcagcccctgcagcccgagccgccccccgagcccgccttctccgaggcgcagaagtggattgagcaagtaactggcagaagttttggtgataaagattttcggacaggtttagaaaatggaatcctcctctgcgagttgctgaatgctataaagccaggacttgttaaaaagatcaatagattgcctacccccattgcaggactggacaatattatcttattcttgagaggttgtaaagagctcggccttaaagaatctcaactttttgacccgagtgacctccaggatacatccaacagagtaacagtcaagagccttgattatagtaggaagctgaaaaatgtattagttaccatttactggctgggaaaagcagcaaacagctgcacatcctacagcggaacgacactaaacctgaaggagtttgaaggattgttggctcagatgcgaaaggacactgatgacattgaaagtcctaaacgcagtatccgagacagtggctacatcgactgctgggattccgagcgcagcgactccctctctcctcctcgccacggcagagatgattccttcgacagcctggattcctttggctctcgctctcggcagacgccttcaccagatgtagtcctcaggggaagcagcgatgggagaggaagcgactctgaatccgacttgcctcatcggaagctgccagatgtgaagaaggatgacatgtctgcacggcggacttcccatggtgagccgaaatcagcagtgccttttaaccagtacctcccgaacaaaagcaatcagacggcctacgtccccgcgcctctgagaaagaagaaagcagagagagaggaataccgcaagagctggagtaccgccacctccccgctgggtggggagaggcccttcagatacggtccgagaactcctgtgtctgatgacgcagagagcaccagcatgtttgacatgcggtgtgaggaggaggccgcggtgcagccgcacagcagggcccgccaggagcagctgcagctgataaataaccagctgagggaagaggacgacaaatggcaagatgacctggctcgttggaagagtcgtagaagaagtgtttctcaggacttaatcaagaaagaggaagaaaggaaaaaaatggagaagttactggctggagaagatgggacaagtgaacgaaggaaaagcatcaaaacctacagagaaattgttcaagaaaaagagcggagagagagagagctgcatgaagcatataagaacgctcggtcccaggaggaggcagaggggatccttcaacagtacattgagaggttcaccatcagtgaggctgttctcgaacgcttggagatgccaaaaattctggaaagaagccattcaacagagccaaatttatcctccttcctgaatgaccccaatcccatgaaatacctgcggcaacagtcactgcctccacccaaattcactgccactgttgaaaccaccattgctcgtgccagtgttctggataccagcatgtcagcaggcagtgggtctccaagcaaaactgtcactcccaaagcagtgcctatgctgacacccaagccttactcccagcccaaaaattctcaagatgttctgaagacctttaaggtagacgggaaagtcagtgtgaatggagagacggttcatagagaggaggagaaggaaagagagtgtcccacggtggcacctgcccactccttaaccaaatcccagatgtttgaaggtgtggccagagtgcacgggtctccactggagctgaaacaagacaacggtagcatcgagatcaacataaagaagccaaactctgttccccaagagctcgcagcaaccactgagaaaacggaaccgaatagtcaagaggacaagaatgatggtggaaaatcaagaaaagggaatatagaacttgcctcatcagaaccacagcattttacaacaactgtgactcgatgcagcccgaccgtggcctttgtggaatttccctccagcccccagctgaagaatgatgtgtcggaagaaaaagaccagaagaaaccagaaaatgaaatgagtggaaaggtggagttggtgctgtcacaaaaggtggtaaagccaaaatctccagaacccgaagcaacgctgacatttccatttctggacaaaatgcctgaagccaaccaactacatttgccaaatctcaattctcaagtggattctccaagcagtgagaagtcacctgttatgacaccttttaagttctgggcatgggacccagaagaggagcgcaggcgacaggaaaaatggcaacaggaacaggaacgtttgctccaggagagataccagaaggagcaggacaagctgaaagaagagtgggaaaaggcccaaaaggaggtggaagaggaagaacgcagatactatgaggaggagcgtaagataattgaagacactgtggttccatttactgtttcttcaagttccgctgaccagctgtctacctcttcctccatgactgaaggcagtgggacaatgaataagatagacctgggaaactgtcaagatgaaaaacaagacagaagatggaagaaatcattccagggagatgacagtgacttattgctgaagactagggaaagtgatcgactggaggagaagggcagcctaactgaaggggccttggctcattctgggaaccctgtatcaaaaggagtccatgaagaccatcagctggataccgaggctggggccccacactgtggaacaaacccacagcttgctcaggatccatcccagaatcagcagacatcaaatccaacgcacagttcagaagatgtgaagccaaaaaccctcccgctggataaaagcattaaccatcagatcgagtctcccagtgaaaggcggaagtctataagtggaaagaagctgtgctcttcctgtgggcttcctttgggtaaaggagctgcaatgatcatcgagaccctcaatctctattttcacatccagtgtttcaggtgtggaatttgtaaaggccagcttggagatgcagtgagtgggacggatgttaggattcgaaatggtctcctgaactgtaatgattgctacatgcgatccagaagtgccgggcagcctacaacattgtgacacggctttcaagcttccggatcactcaccatttctttactgagagtgtcccctggcaactgcttaacaaaatcccaagctcaggggcttctcagcatttacctaatttctgaaaggctcttctgaaaggtggtatctgttctttcgtagcacagtgtttatgtttttcctgtttattgttttggttttttttttttttttgcatttgcacagtatacacaaaagaatatggggttgtaatgatcctgaatagctcaaaaaaggttttagcatggtcaaacaggcttatggtttaaaatgtgttattctcttctttgggaattagctaaatgatgcaataaacctgttttgttttagaatgtctaggaattaaacactttatgtttacagaattgagctgcagaaagtgcaagacatgccaatttgagacacacggtcttctaagactgaaggataaatttaatgcatttcagaaactaaacatcacagcaagctctatctctgagctataatttgtttttaatgcaaagacactagtttgataatatatactgtaatcctgaaacatttgtgttacttacctttggaggtagaaattataccaataaattattgcaccgttagtattagattctgtgtaccttggaagttatgtcattaatataggctggttcatcaaataaagcaaaaccttgcaatatcagctagatttacactccgggacgttgcccaaaggtaggaagaaagcagagggaaatatttcagtcatcatttccaaagtcattatcaaaatctgtgaggaagtttaatcttccaaagagtcaatgtcagacatcaggcctctgttgcctgcttctctcgaggcactagattaggagtcttcaataagagacttaacatgaggtatatggaagatgaggcaccgagataagttcatcattaggtgtgagcactgctcacccttgctggcaagttctccttaagggcctgaagcacaggtgtccaaagaaaagcgttaagtccatcttaatagaatctatgtggtatatgatgtggtcagcccctggtctgtgatcagcaagaacctacagcacagattatgccctgcccacttcaatgaatacctactctcctccattctccatcactttttttgctatcaagaactccggaccttgcccatggagaagtttagagaggaactcttgtggagagctggtttattttctgccctgtgcgacgagtttcagctggccaagaaaggagtcaagttattaaaaagcatcacaatgtagatctccaggctggttttttgttttttgttgttaagactggggaaagggggactatttattctgccttaaatcaatggcaaataagtcaagatgacattttgtgaatgtagactatggatacactcctaatagattgatgtagtcataaaagggggtcaagtagatgtttttctgttatgtaagcaataatttttccgtgtcttattgagtatggctagcgattatttattacatgctagatgggttctttgcatgtgggttccatataggtgcagaaatttcctcagccactggagggatttcgaccatatttgtcatttggatgagctgttattagattgaaatctacacatcatttcattaaaaattgtgccttagaaaacgcaaagctgttgcacatggcgataaattatggatgcagtacattgaagagagatgaagtcacttccaagtttccaagacttctcatggaggtgtttgctgttttacaggaaaaaataaaaataaaaaaagaaaaaaagaaaaaattaaa

SEQ ID NO: 42363 - DNA, 2694 bp, Artificial Sequence
  derived and/or modified sequence
atgcggaaggacaccgacgacatcgagagccccaagcggagcatcagggattccggctatattgactgctgggattccgaacggagcgactcactgtcccctcctaggcatggccgcgacgatagcttcgatagtctcgatagctttggttcaagatctcgtcaaacccccagtccagatgtggtccttagaggtagttcagacggcagaggtagcgattccgagtcagacctgccccaccgcaagctgcccgacgttaagaaagatgatatgagtgcacggcgaacttctcatggcgaacccaaatcagccgtgccatttaaccaatacctgcccaacaagagcaaccaaacagcctatgtgcccgcccctctccgtaaaaagaaagccgagagagaggagtacagaaaaagttggagcactgccaccagtcccctagggggcgagcgaccgttccgttacggcccccgtacacccgtctccgatgatgcggaaagcacgagcatgtttgatatgagatgtgaagaagaggcagcggtccagccacacagcagagctcgccaagagcagcttcagctgataaacaatcagcttcgtgaggaggatgataagtggcaggacgatctggcacgctggaagagccgcaggagatccgtgtctcaagatcttattaagaaagaagaggaacgcaagaagatggaaaagctgttggctggggaggacggcacgtccgaacgcaggaaaagcattaaaacttaccgggagatcgtgcaggagaaggagcggcgggaaagagaactacatgaggcttataagaatgcccgcagccaggaagaggccgaagggatactccagcagtacatagaaaggttcactatcagcgaagccgttctggagagattagaaatgcctaagattttagagagaagccattccacagagcccaacctcagttccttcttaaacgaccccaatcctatgaagtatctgcggcagcaatcgctacctccacccaaatttactgccacagtggagacgaccatagctcgagcgtcagtattagacacttccatgtccgcaggaagtgggtccccttccaaaactgtaactcccaaagcagtcccaatgctcacacccaagccatactcccagccaaagaacagccaagatgtacttaagacatttaaagtcgacggaaaggtcagtgtgaacggtgagacagtgcatcgggaagaggagaaagagagggagtgtcctactgtggctccagcccactcactcactaagagtcagatgttcgaaggtgttgcacgggttcacggaagccccctcgagttaaaacaggataacgggtccattgagattaacatcaaaaaacccaattctgtgcctcaggagctggccgcaacaaccgaaaaaactgagcccaattcccaggaggataagaatgacggagggaagagccgtaagggcaatattgagctggcttcctctgaacctcagcattttactacaacagtcacccgctgttcacccacggtggcattcgtcgagtttcccagcagtcctcagctgaaaaatgatgtttctgaagagaaagatcaaaaaaagcccgaaaatgagatgagtgggaaggtggaactggtgctttcccagaaagtcgttaaacccaagagccccgagcccgaggccaccctcacgttcccctttcttgataagatgccagaagccaaccagcttcacctgcccaacctaaatagccaggtggatagcccctcctccgaaaagtcccccgtgatgacaccatttaaattctgggcgtgggaccctgaagaagaaaggcgccgccaggaaaaatggcagcaagagcaggaaaggcttttacaggagcggtaccagaaggaacaggacaagctgaaggaagagtgggagaaagcacagaaggaagtagaggaagaagagcggcggtattatgaagaggaaaggaagatcatcgaggacactgtagtccctttcacagtgagcagctccagcgctgaccagctcagtacttcatccagcatgaccgagggcagcggaactatgaacaaaatcgacctcggtaattgtcaagatgagaaacaggatcgtcggtggaagaaatcgtttcagggtgacgactccgacctgctgcttaaaacaagagagagtgatcgattggaggagaagggatccttgaccgagggtgctctggcccattctgggaatcctgtcagtaagggcgtgcacgaagatcatcagttggatactgaagccggcgcccctcattgcggcaccaacccccagttagctcaggatccctcccagaatcaacagacaagtaacccaactcattcgagtgaagatgtgaaaccaaaaacgctacccctggacaagagcattaatcatcagatcgagagcccgagtgagcggcggaagtctatctctgggaagaagctgtgctcttcttgtggactccctctcggcaaaggggctgcgatgattattgagacgcttaatctgtactttcacattcaatgctttcgctgtggtatttgtaagggacagctgggggatgctgtcagtggaacagacgtgaggatccgaaatggactcctgaattgtaacgattgttacatgcggtcccggtctgctggccagccaacaactctgtag

SEQ ID NO: 42364 - DNA, 3171 bp, Artificial Sequence
  derived and/or modified sequence
atggcctgccccgccctgggcctggaggccctgcagcccctgcagccagagcccccacccgagcccgccttttccgaagcacagaagtggatcgaacaggtaacaggtcgctcatttggggacaaagactttaggaccggtctggagaacggcatcctactctgcgagttactaaatgccatcaaaccgggattagtgaaaaagatcaatcggctccctacccctattgccgggctggataatataatactcttcctgcgagggtgtaaagaactggggctgaaagagtcacagctattcgacccctctgatctgcaagatacctccaacagggttacagtcaagagcctcgattactcacggaaactcaagaacgttctggtgactatctactggcttggcaaagcagcaaactcatgtacgagctacagtggaacaaccttgaatctaaaggaattcgagggtctgctggcccagatgaggaaggacacagatgatattgagagtcccaagcgctcgatacgggacagcggttacatcgactgctgggattcagaaagatcagattccctgtcgcctcctcgccacggaagagacgattctttcgatagtttggacagtttcgggtccagatccagacagacccccagcccagatgtggtactgcggggatcctccgatggaagaggatccgatagcgagagtgaccttccacacagaaagctccccgacgttaagaaagacgacatgtccgctcgccgaaccagccacggggagcctaagtccgcagtcccctttaaccaatatctgcctaacaaaagcaatcagacagcatacgtgcctgctcccctacggaaaaaaaaggccgaacgtgaggagtacagaaaatcttggtcgaccgctacatcaccacttggcggcgaaaggcctttccgctacgggccgcggacaccagtgtctgacgatgctgagtccacaagcatgttcgacatgaggtgtgaggaggaggcagccgtccagccccattcacgagcccgacaggagcagctgcagttaatcaacaaccagcttcgcgaggaagacgacaaatggcaggacgacctggcgcgatggaagagtcgccgaagaagtgtgagtcaggatttgatcaaaaaggaggaagaacggaagaaaatggaaaaactcctggcaggggaggatgggacttccgaaagacgcaaatccatcaagacctatcgcgaaatagtacaggagaaggaacgccgggagcgggaactgcatgaggcctataaaaatgcacggtctcaagaggaagccgaaggtattctgcaacagtatatagaacggttcaccatttctgaggccgtcctggagcggcttgaaatgccaaagatcttggaaaggagtcactccaccgaacctaacctatctagctttctcaatgatcctaacccgatgaagtatttgagacagcagtcactaccaccacccaaattcacagccacagtggagacgactattgcgcgtgcctcggtcttagacaccagcatgtcggctggatctgggagcccatctaagaccgtgacaccaaaagccgtgcccatgctcacccccaaaccgtattcacagccaaaaaatagtcaagacgtcttgaaaacgtttaaggttgatggcaaagtctccgttaacggtgagacagtacacagggaggaagaaaaggaacgcgaatgtccgaccgtggcgcccgctcatagcctcaccaaatctcagatgttcgagggagtggccagagttcacggtagccccttagaacttaagcaagataacggctccattgagataaatatcaagaagcccaacagcgttccccaggaacttgctgctacaacggaaaaaacagaacctaacagtcaggaagataagaacgatggcggcaaatccagaaagggtaacatcgagctggcgagttcagagccccagcatttcaccacgacagtgacacgatgctcccccacagtggcgttcgtcgagttcccatccagtccgcaactgaaaaacgatgtatccgaagaaaaggatcagaagaaacctgagaatgagatgagtggcaaggtggaattggtcctgtctcaaaaggtggtgaaacccaaatcccctgaacctgaggcgacactgacctttcctttcctggataaaatgcccgaagccaaccagctgcacctgccaaacctaaatagccaggtagacagcccttcctctgaaaaatcacccgttatgaccccttttaagttttgggcctgggatccggaggaggagagacgcagacaggagaaatggcaacaggagcaggaaagacttctacaggaacggtatcagaaagaacaggacaaactcaaagaagaatgggagaaggcccagaaagaggtggaggaggaggagaggcgctactatgaagaggagagaaagattatagaagatacggtggtacctttcactgtctcttcatcgtccgcagatcagttgtctacctctagttctatgactgaaggcagcggcacaatgaataagatcgatctaggcaattgtcaagatgaaaagcaggacagacgctggaagaaatcttttcaaggcgacgactccgacctactcttgaagacccgtgaaagcgacaggctcgaggaaaagggatcgctgacagagggcgccctcgcccactctggaaatccggtgagtaaaggtgtacatgaagaccaccagctggataccgaggcaggcgctccgcattgtggaaccaacccacaactcgctcaggatcccagccagaaccagcaaacctccaatcccacccacagctccgaagatgttaagcccaaaacactgccattagacaagtccattaaccatcaaatcgagtctccatcagaaagaagaaaatcaatctcggggaaaaagctctgttcttcctgtggtcttcctctaggcaaaggcgcagctatgattatcgagacccttaacctctatttccacattcagtgttttagatgtggtatttgtaaaggacagttgggagatgccgtctctggcactgacgtgcgcatccggaatggattgctgaattgtaatgactgctacatgcggagccggtccgccggacagcccacgactctgtag

SEQ ID NO: 42365 - DNA, 2694 bp, Artificial Sequence
  derived and/or modified sequence
atgagaaaggacaccgatgacattgagtctccgaaaagatcaataagagattccggctatatcgactgttgggatagtgagcgtagcgattcactgtcgcctccgaggcacggccgtgacgattcatttgattcactagattccttcgggtcaagatctagacagaccccctcgccagatgttgtgctgcgcggatcatctgacggcaggggcagcgattccgagagcgacctgccacaccgaaagctccccgatgttaaaaaagatgatatgagcgcacggagaactagtcacggagaacccaagtccgctgtgcccttcaatcagtacctgcccaacaaaagcaaccagactgcgtacgttcccgctcccctaagaaagaaaaaggcggagcgcgaggaatatcgaaagagttggagtactgcgacgtctcccttgggcggtgagcgaccctttcggtacggtcccagaaccccggtctctgacgatgctgaaagtacctccatgttcgacatgcggtgtgaagaggaagctgccgtgcagcctcactccagagcccgtcaggaacagcttcaactcattaacaaccagttgagggaggaggatgataagtggcaggatgatctcgctagatggaagtcccgcaggaggtcagtttcccaagatttgatcaaaaaagaggaagagaggaagaagatggagaagcttctggccggagaagacggcacaagtgagcggagaaagtccatcaaaacctaccgagagattgttcaggaaaaagagagacgcgaaagggaacttcacgaggcttacaagaatgctcgtagccaagaagaagcggaggggatactccagcaatatatcgagcgctttaccatctcagaagcagtcttggaaagactggaaatgcccaaaatcctcgagagatctcacagtacagaacctaatctgtcatcatttcttaatgaccctaacccaatgaagtacctcagacaacaatcactgccgccacctaagtttacagcgaccgtggagaccaccatcgccagagcctcggttctggacacttctatgtctgccggttctgggagcccaagtaaaacagtaacacccaaggccgtccctatgttaacacccaaaccatactcacagccaaaaaattcccaggatgtgctgaagacttttaaggtggacggcaaggtgtccgtcaacggggaaacagtccacagggaggaagaaaaggagagagagtgcccgacagtggctcccgcacactctctcaccaagtcccagatgttcgaaggcgtggcgcgagtgcacggctcacccctggaactgaaacaggacaacggctcaattgagattaatattaagaagcccaactctgtccctcaagaactggcggctacaacggagaagaccgaacccaatagccaggaggacaagaacgatggaggaaagagtcggaaggggaacatagaactggcctctagcgagccccaacactttactactacagtgaccaggtgcagcccaaccgtggcttttgtggaattccccagcagccctcagcttaaaaatgatgtgtcagaagaaaaagaccagaaaaagccggaaaatgaaatgagcgggaaggttgaattagtccttagccagaaggttgtgaagccaaagagccccgagcccgaagccaccctcacttttccatttctggacaaaatgcccgaagccaaccagctccacctccccaacctgaattcacaggtggatagcccatcatctgagaaatcccccgtgatgaccccctttaaattttgggcgtgggaccccgaagaggagaggcggcgacaggaaaagtggcagcaggagcaggagaggcttctgcaggagcgctatcagaaggagcaggacaagcttaaggaagagtgggaaaaagcccagaaggaagtggaggaggaagagcgcaggtactatgaggaagagaggaaaataattgaggatacggtggtccctttcaccgtgtcctcctcctctgccgaccagctatcgacgtcttcaagtatgacagaagggtccggcaccatgaacaagattgaccttgggaactgccaggatgaaaagcaagatcgcaggtggaagaagagcttccaaggggacgatagcgatcttcttttgaagacgagggagtcggatagactcgaggagaaaggcagcctgacggaaggagcactggctcactccggaaatcccgtgtcaaagggggtgcatgaagaccatcagctcgacacggaagccggtgcccctcactgcggaacgaatccgcagctcgcccaagatcccagccagaatcagcagaccagcaatccaactcacagctctgaggacgtgaagcctaagactttaccactcgataaatccattaaccaccaaatcgaatccccaagcgagagacgtaagtctatctctggcaaaaaactatgttctagctgcggtctgccgttgggaaagggtgccgcaatgatcattgagactctgaacctctacttccacattcaatgctttagatgtggtatatgtaagggacagctgggcgatgccgtgagcggcaccgacgtgagaatccgcaatggcctactgaattgtaacgattgctatatgagaagtaggtcagccggacaacccaccacactgtag

SEQ ID NO: 42366 - DNA, 3171 bp, Artificial Sequence
  derived and/or modified sequence
atggcatgtcccgctctcggcctggaagcactacaacccttgcagcctgaaccaccgccagaacccgctttttcggaggcacagaagtggattgagcaagttaccggtcggagctttggagataaggattttcgaacggggctggagaatgggatcctcctgtgtgagctgctgaatgccattaagcccggtcttgtgaagaagattaaccgccttcccactcccattgccggtctcgacaacatcatactattcttacggggatgcaaagaacttggcctgaaggagagccaactgttcgatccttctgatcttcaggacacatctaatagagtcaccgtgaagtcgctagactactctcggaaactaaagaacgttctggtgaccatctactggctaggtaaggccgctaactcatgcacgtcctacagtgggacaactctgaatctcaaggaattcgaaggactgttagcccagatgagaaaagacactgacgacatcgagtctcccaagaggtctatacgggattcagggtatattgactgctgggacagcgaaagatcagatagcctaagtccgcctcgccacggtcgcgatgatagctttgacagtctcgacagctttgggagcaggtctagacagacgccatcaccggacgtcgtgctgcgcggatcttctgacggacgagggtccgactctgagagcgacctgcctcaccggaagctaccagacgtgaaaaaagatgatatgagtgccaggagaacatctcacggcgagccaaagagcgccgtcccttttaaccagtacttgcccaacaagtccaatcagaccgcatacgttccagcaccccttcgaaagaaaaaggcggagcgggaggaatacagaaagtcctggtctaccgccacatcaccactaggaggggagcgcccatttcggtatgggcctcgtacccctgtctccgatgacgccgagtccacatcaatgttcgacatgaggtgtgaagaggaggctgcagtgcagccacactcaagagcaagacaggagcagttgcagctgatcaacaaccagctccgggaagaggatgataagtggcaggatgatctcgcccgttggaagtctaggcggcgaagcgtctcacaagacctgatcaaaaaggaggaggagcggaaaaagatggagaagcttctcgcaggcgaggatggaacctcagagaggcgtaagtcaatcaaaacctaccgcgagatcgttcaggaaaaggaacgcagagagagagaactgcatgaagcgtataagaacgccagatcacaggaggaggcggaaggtatactgcagcagtacatcgaacggttcactatttcagaagccgtcctggaaaggctagaaatgcccaagatactggagaggtctcacagcacggaacccaatctcagcagcttcctaaacgaccctaatccaatgaaatatctgcggcaacagtcattaccgcctccgaagtttacagccacagtggagaccacaatcgcccgagcatccgtcttggatacctcgatgtcagccggaagcggctccccgtccaagacggttactcctaaggcagttccaatgctgacacctaaaccttacagtcagccaaagaacagtcaggacgtgctgaagacctttaaagtcgacgggaaagtgtccgtcaatggtgaaacagtgcatcgagaggaggaaaaagaaagggagtgtcctaccgtcgctccagctcacagtctcactaagagtcagatgttcgagggcgtagctcgcgtgcatgggagtccccttgagctgaaacaggataacggctctattgaaatcaacatcaaaaaacccaacagcgtaccacaagagcttgcagccaccaccgagaaaacagagcccaattctcaggaggataagaacgacgggggtaagtctaggaaggggaacatcgaactagcatcgtcagagccccaacacttcaccacgacggtcaccagatgctcccccacagtcgcgtttgttgaatttccctctagtccccaacttaagaatgacgtgagcgaagaaaaggatcagaagaagccagagaacgaaatgtcgggcaaagtggagttggtgctgtcacaaaaggtggtcaagcccaagagtccggagccggaagcaactttaacctttcctttcctcgataaaatgccagaagctaaccagcttcatctaccaaatttgaattcccaggtcgatagcccgagctccgagaaatcccccgtgatgacgcctttcaagttctgggcttgggacccagaagaagagagacggagacaagaaaaatggcagcaagaacaggaacgccttctgcaggagcgctatcagaaggaacaagacaaattgaaggaggagtgggaaaaggcccaaaaagaggtcgaagaggaagaacgtcgttactatgaggaggagcgaaagataatcgaggatactgtggtgccgttcaccgttagtagtagcagtgccgaccagctctccacctcaagttctatgaccgaaggaagtggaacgatgaataaaatcgacttgggcaactgtcaggatgaaaaacaggatcgacggtggaaaaagtcttttcagggggacgactcagatctgctattgaagacacgcgagtccgaccgtctggaagagaaaggaagcctgactgaaggggctctagcgcattccggtaaccctgtgagcaagggggtgcacgaagaccaccaacttgataccgaagctggagccccacactgcgggaccaacccgcaacttgcccaggacccttctcagaatcagcagacctccaatcccactcatagtagcgaagatgtcaaacccaagaccctgcccttggacaaaagcatcaaccatcagatcgagtcaccctcagagcgacgcaagtccatcagcggcaagaagctgtgctccagctgcggcctcccgctgggcaaaggggcagcaatgatcatagaaactttgaatctatattttcacatccagtgcttccggtgcggtatatgtaaggggcagctgggggatgccgtgtctgggacagatgtgcggatccgaaatggccttctcaactgcaacgattgctacatgagatcgcgcagcgcgggtcagcctacaaccctctag

SEQ ID NO: 42367 - protein, 902 aa, Artificial Sequence
  derived and/or modified sequence
MDSERQVKDTDDIESPKRSIRDSGYIDCWDSERSDSLSPPRHGRDDSFDSLDSFGSRSRQTPSPDVVLRGSSDGRGSDSESDLPHRKLPDVKKDDMSARRTSHGEPKSAVPFNQYLPNKSNQTAYVPAPLRKKKAEREEYRKSWSTATSPLGGERPFRYGPRTPVSDDAESTSMFDMRCEEEAAVQPHSRARQEQLQLINNQLREEDDKWQDDLARWKSRRRSVSQDLIKKEEERKKMEKLLAGEDGTSERRKSIKTYREIVQEKERRERELHEAYKNARSQEEAEGILQQYIERFTISEAVLERLEMPKILERSHSTEPNLSSFLNDPNPMKYLRQQSLPPPKFTATVETTIARASVLDTSMSAGSGSPSKTVTPKAVPMLTPKPYSQPKNSQDVLKTFKVDGKVSVNGETVHREEEKERECPTVAPAHSLTKSQMFEGVARVHGSPLELKQDNGSIEINIKKPNSVPQELAATTEKTEPNSQEDKNDGGKSRKGNIELASSEPQHFTTTVTRCSPTVAFVEFPSSPQLKNDVSEEKDQKKPENEMSGKVELVLSQKVVKPKSPEPEATLTFPFLDKMPEANQLHLPNLNSQVDSPSSEKSPVMTPFKFWAWDPEEERRRQEKWQQEQERLLQERYQKEQDKLKEEWEKAQKEVEEEERRYYEEERKIIEDTVVPFTVSSSSADQLSTSSSMTEGSGTMNKIDLGNCQDEKQDRRWKKSFQGDDSDLLLKTRESDRLEEKGSLTEGALAHSGNPVSKGVHEDHQLDTEAGAPHCGTNPQLAQDPSQNQQTSNPTHSSEDVKPKTLPLDKSINHQIESPSERRKSISGKKLCSSCGLPLGKGAAMIIETLNLYFHIQCFRCGICKGQLGDAVSGTDVRIRNGLLNCNDCYMRSRSAGQPTTL

SEQ ID NO: 42368 - protein, 897 aa, Artificial Sequence
  derived and/or modified sequence
MRKDTDDIESPKRSIRDSGYIDCWDSERSDSLSPPRHGRDDSFDSLDSFGSRSRQTPSPDVVLRGSSDGRGSDSESDLPHRKLPDVKKDDMSARRTSHGEPKSAVPFNQYLPNKSNQTAYVPAPLRKKKAEREEYRKSWSTATSPLGGERPFRYGPRTPVSDDAESTSMFDMRCEEEAAVQPHSRARQEQLQLINNQLREEDDKWQDDLARWKSRRRSVSQDLIKKEEERKKMEKLLAGEDGTSERRKSIKTYREIVQEKERRERELHEAYKNARSQEEAEGILQQYIERFTISEAVLERLEMPKILERSHSTEPNLSSFLNDPNPMKYLRQQSLPPPKFTATVETTIARASVLDTSMSAGSGSPSKTVTPKAVPMLTPKPYSQPKNSQDVLKTFKVDGKVSVNGETVHREEEKERECPTVAPAHSLTKSQMFEGVARVHGSPLELKQDNGSIEINIKKPNSVPQELAATTEKTEPNSQEDKNDGGKSRKGNIELASSEPQHFTTTVTRCSPTVAFVEFPSSPQLKNDVSEEKDQKKPENEMSGKVELVLSQKVVKPKSPEPEATLTFPFLDKMPEANQLHLPNLNSQVDSPSSEKSPVMTPFKFWAWDPEEERRRQEKWQQEQERLLQERYQKEQDKLKEEWEKAQKEVEEEERRYYEEERKIIEDTVVPFTVSSSSADQLSTSSSMTEGSGTMNKIDLGNCQDEKQDRRWKKSFQGDDSDLLLKTRESDRLEEKGSLTEGALAHSGNPVSKGVHEDHQLDTEAGAPHCGTNPQLAQDPSQNQQTSNPTHSSEDVKPKTLPLDKSINHQIESPSERRKSISGKKLCSSCGLPLGKGAAMIIETLNLYFHIQCFRCGICKGQLGDAVSGTDVRIRNGLLNCNDCYMRSRSAGQPTTL

SEQ ID NO: 42369 - DNA, 2709 bp, Artificial Sequence
  derived and/or modified sequence
atggacagcgagagacaggtgaaggacaccgacgacatcgagagccccaagagaagcatcagagacagcggctacatcgactgctgggacagcgagagaagcgacagcctgagcccccccagacacggcagagacgacagcttcgacagcctggacagcttcggcagcagaagcagacagacccccagccccgacgtggtgctgagaggcagcagcgacggcagaggcagcgacagcgagagcgacctgccccacagaaagctgcccgacgtgaagaaggacgacatgagcgccagaagaaccagccacggcgagcccaagagcgccgtgcccttcaaccagtacctgcccaacaagagcaaccagaccgcctacgtgcccgcccccctgagaaagaagaaggccgagagagaggagtacagaaagagctggagcaccgccaccagccccctgggcggcgagagacccttcagatacggccccagaacccccgtgagcgacgacgccgagagcaccagcatgttcgacatgagatgcgaggaggaggccgccgtgcagccccacagcagagccagacaggagcagctgcagctgatcaacaaccagctgagagaggaggacgacaagtggcaggacgacctggccagatggaagagcagaagaagaagcgtgagccaggacctgatcaagaaggaggaggagagaaagaagatggagaagctgctggccggcgaggacggcaccagcgagagaagaaagagcatcaagacctacagagagatcgtgcaggagaaggagagaagagagagagagctgcacgaggcctacaagaacgccagaagccaggaggaggccgagggcatcctgcagcagtacatcgagagattcaccatcagcgaggccgtgctggagagactggagatgcccaagatcctggagagaagccacagcaccgagcccaacctgagcagcttcctgaacgaccccaaccccatgaagtacctgagacagcagagcctgcccccccccaagttcaccgccaccgtggagaccaccatcgccagagccagcgtgctggacaccagcatgagcgccggcagcggcagccccagcaagaccgtgacccccaaggccgtgcccatgctgacccccaagccctacagccagcccaagaacagccaggacgtgctgaagaccttcaaggtggacggcaaggtgagcgtgaacggcgagaccgtgcacagagaggaggagaaggagagagagtgccccaccgtggcccccgcccacagcctgaccaagagccagatgttcgagggcgtggccagagtgcacggcagccccctggagctgaagcaggacaacggcagcatcgagatcaacatcaagaagcccaacagcgtgccccaggagctggccgccaccaccgagaagaccgagcccaacagccaggaggacaagaacgacggcggcaagagcagaaagggcaacatcgagctggccagcagcgagccccagcacttcaccaccaccgtgaccagatgcagccccaccgtggccttcgtggagttccccagcagcccccagctgaagaacgacgtgagcgaggagaaggaccagaagaagcccgagaacgagatgagcggcaaggtggagctggtgctgagccagaaggtggtgaagcccaagagccccgagcccgaggccaccctgaccttccccttcctggacaagatgcccgaggccaaccagctgcacctgcccaacctgaacagccaggtggacagccccagcagcgagaagagccccgtgatgacccccttcaagttctgggcctgggaccccgaggaggagagaagaagacaggagaagtggcagcaggagcaggagagactgctgcaggagagataccagaaggagcaggacaagctgaaggaggagtgggagaaggcccagaaggaggtggaggaggaggagagaagatactacgaggaggagagaaagatcatcgaggacaccgtggtgcccttcaccgtgagcagcagcagcgccgaccagctgagcaccagcagcagcatgaccgagggcagcggcaccatgaacaagatcgacctgggcaactgccaggacgagaagcaggacagaagatggaagaagagcttccagggcgacgacagcgacctgctgctgaagaccagagagagcgacagactggaggagaagggcagcctgaccgagggcgccctggcccacagcggcaaccccgtgagcaagggcgtgcacgaggaccaccagctggacaccgaggccggcgccccccactgcggcaccaacccccagctggcccaggaccccagccagaaccagcagaccagcaaccccacccacagcagcgaggacgtgaagcccaagaccctgcccctggacaagagcatcaaccaccagatcgagagccccagcgagagaagaaagagcatcagcggcaagaagctgtgcagcagctgcggcctgcccctgggcaagggcgccgccatgatcatcgagaccctgaacctgtacttccacatccagtgcttcagatgcggcatctgcaagggccagctgggcgacgccgtgagcggcaccgacgtgagaatcagaaacggcctgctgaactgcaacgactgctacatgagaagcagaagcgccggccagcccaccaccctgtag

SEQ ID NO: 42370 - DNA, 2709 bp, Artificial Sequence
  derived and/or modified sequence
atggattccgaacgccaggtaaaagatactgatgacattgagtcccccaaacgatccataagagatagtgggtacatcgattgttgggactctgagcgttccgatagcctcagcccccccaggcacggcagagatgacagcttcgattccttagactccttcggttcccgatctaggcaaacaccttcaccagacgtcgtactcagaggctcatcagacggacgaggctctgactcagagtccgacttaccacaccggaagcttcccgacgttaagaaggacgatatgtcggctcgccggacgtcacatggtgagccaaagagtgccgtgccatttaatcagtatctccctaacaaatctaatcagaccgcatacgtccctgccccattgaggaagaaaaaagccgagcgcgaagagtaccgcaagtcatggagcaccgccacttcacctttaggtggcgaacgacctttccgatatggccctcgcacacctgtgtctgacgacgcagagtctactagcatgtttgatatgagatgtgaagaggaggccgctgtgcagcctcactcgcgggcacgacaggagcagctgcaattgatcaacaatcagctccgggaggaagacgacaaatggcaagatgatcttgccaggtggaaatcacggcggagaagcgtcagtcaagacctgatcaagaaagaagaagaacgaaaaaaaatggagaaactcctggcaggagaggacggcacaagcgaaaggcggaagagcatcaagacctacagagagatcgtgcaggagaaagaaaggagagaacgtgagcttcacgaagcctacaaaaatgcccggtctcaggaagaagcagaagggatcctccaacaatatattgaaagatttaccatctctgaggcagttctggaaagactggagatgccaaaaatacttgaacggtcacactcaactgagcccaacctcagctccttcctcaacgacccaaacccaatgaaatacttgcggcagcaatctctgcctcctcctaagttcaccgccactgttgagacaacaattgctcgcgctagcgtgctcgacacctcaatgagcgcaggctcaggtagtccctccaaaaccgtaacacccaaggccgtgcccatgctgacgcccaagccttatagccagccaaagaactcccaagatgtcctaaagacattcaaagttgatgggaaagtgagcgttaatggggaaaccgtgcatagagaagaggagaaggaacgtgagtgccccaccgtcgctcctgcccactctctgacaaagtcccaaatgtttgagggtgtggcccgggtgcatgggtccccattagaattgaaacaggacaatggatctatagagatcaacattaagaagcccaacagcgttccgcaggagctggcagccaccaccgagaaaacagagccgaacagtcaggaagacaagaatgacggcggcaagtctaggaagggaaacatcgagctggcctcgagtgagccacagcacttcacgaccactgtcacacgatgtagccccactgttgcttttgtagagttcccttccagtccgcaattaaagaatgacgttagtgaagagaaagaccagaaaaagcccgagaacgaaatgtcaggtaaggtggagctggtgctttcccagaaggtcgtcaaacccaaatctcctgaacctgaagccacgctgacgtttccgtttttggacaagatgcctgaagccaaccagctgcacctgcccaacctcaatagccaagtggatagtccaagctccgagaaatcccccgtaatgaccccattcaagttctgggcttgggatccagaggaagagcgacggcggcaggagaagtggcagcaagagcaagagaggttgctgcaggagcggtatcagaaagaacaggataagcttaaagaagagtgggaaaaggctcaaaaagaggtagaagaggaagagcgccgctactacgaggaagagcgaaaaattattgaggacacagtggttccattcacagtcagctcatcaagcgccgatcagctgtccacatcatcatctatgactgaagggtcagggacgatgaataagatagaccttgggaactgccaggacgagaagcaagacaggcgctggaagaagtcttttcagggagatgacagtgatttgctcttgaaaactcgggaaagtgataggttggaggagaaggggtccctgaccgagggcgccctggcgcattccgggaatccagttagcaagggagtgcacgaggaccaccaactagacacagaggcaggggctcctcactgtggcacaaacccccaactggctcaggatccctcccagaaccagcagaccagcaaccctacgcacagcagcgaggacgtgaaacctaaaaccctgcctctggataagagcatcaaccaccagattgagtccccatctgagcgccgaaaatccataagtggaaagaagctgtgttcatcatgcggtctgcccctggggaagggtgctgcaatgattatagagactctgaacctgtacttccacatccagtgctttcggtgtggaatttgcaaagggcaacttggggatgctgtgtccggcactgacgtccgcatcagaaacggccttctcaattgcaatgactgctacatgcgaagccgatcagctggccaacctaccacactgtag

SEQ ID NO: 42371 - DNA, 2709 bp, Artificial Sequence
  derived and/or modified sequence
atggattctgagcggcaggtgaaggacacagatgacatcgagagccccaagaggagcatccgggacagcggctacatcgactgctgggacagcgagaggagtgacagcctgagccccccaagacatggaagagatgacagctttgacagcctggacagctttggcagccgcagccggcagacccccagcccagatgtggtgctgcggggcagcagtgatggccggggcagtgacagcgagagtgacctgccccacaggaagctgcctgatgtgaagaaggatgacatgtctgcccggaggaccagccatggagagcccaagtctgctgtgcccttcaaccagtacctgcccaacaagagcaaccagacagcctacgtgcctgcccccctgaggaagaagaaggccgagcgggaggagtacaggaagtcctggagcacagccaccagccccctgggcggggagcggcccttccgctatggccccaggacccctgtgtctgatgatgctgagagcacctccatgtttgacatgagatgtgaggaggaggccgctgtgcagccccacagccgggcccggcaggagcagctgcagctgatcaacaaccagctgcgggaggaggatgacaagtggcaggatgacctggcccgctggaagagcagaagaagatctgtgtcccaggacctgatcaagaaggaggaggagaggaagaagatggagaagctgctggccggagaagatggcaccagcgagaggaggaagagcatcaagacctaccgggagatcgtgcaggagaaggagcggcgggagcgggagctgcacgaggcctacaagaatgcccggagccaggaggaggccgagggcatcctgcagcagtacatcgagcgcttcaccatcagcgaggccgtgctggagcggctggagatgcccaagatcctggagaggagccacagcacagagcccaacctgagcagcttcctgaatgaccccaaccccatgaagtacctgcggcagcagagcctgcccccacccaagttcaccgccaccgtggagaccaccatcgcccgggcctctgtgctggacacctccatgtctgctggcagcggcagccccagcaagacagtgacccccaaggctgtgcccatgctgacccccaagccctacagccagcccaagaacagccaggatgtgctgaagaccttcaaggtggatggcaaggtgtctgtgaatggagagaccgtgcaccgggaggaggagaaggagcgggagtgccccaccgtggccccagcccacagcctgaccaagagccagatgtttgagggcgtggcccgggtgcacggcagccccctggagctgaagcaggacaatggcagcattgagatcaacatcaagaagcccaacagcgtgccccaggagctggccgccaccacagagaagacagagcccaacagccaggaggacaagaatgatggcggcaagagcaggaaaggaaacatcgagctggccagcagcgagccccagcacttcaccaccaccgtgacccgctgcagccccaccgtggcctttgtggagttccccagcagcccccagctgaagaatgatgtgtctgaggagaaggaccagaagaagccagaaaatgagatgtctgggaaggtggagctggtgctgagccagaaggtggtgaagcccaagagccctgagcctgaggccaccctgaccttccccttcctggacaagatgcctgaggccaaccagctgcacctgcccaacctgaacagccaggtggacagccccagcagcgagaagagccctgtgatgacccccttcaagttctgggcctgggaccctgaggaggagcggcggcggcaggagaagtggcagcaggagcaggagcggctgctgcaggagcgctaccagaaggagcaggacaagctgaaggaggagtgggagaaggcccagaaggaggtggaggaggaggagcggcgctactatgaggaggagaggaagatcattgaagatactgtggtgcccttcaccgtgagcagcagcagcgctgaccagctgagcaccagcagctccatgacagagggcagcggcaccatgaacaagattgacctgggcaactgccaggatgagaagcaggaccggcgctggaagaagagcttccagggagatgacagcgacctgctgctgaagacccgggagagtgaccggctggaggagaagggcagcctgacagaaggagccctggcccacagcggcaaccctgtgtccaagggcgtgcatgaggaccaccagctggacacagaggccggggccccccactgcggcaccaacccccagctggcccaggaccccagccagaaccagcagaccagcaaccccacccacagcagtgaagatgtgaagcccaagaccctgcccctggacaagagcatcaaccaccagatcgagagccccagcgagaggaggaagagcatcagcggcaagaagctgtgcagcagctgtggcctgcccctgggcaaaggagctgccatgatcatcgagaccctgaacctgtacttccacatccagtgcttccgctgtggcatctgcaagggccagctgggagatgctgtgtctggaacagatgtgcgcatcagaaatggcctgctgaactgcaatgactgctacatgaggagccgctctgctggccagcccaccaccctgtag

SEQ ID NO: 42372 - DNA, 5740 bp, Artificial Sequence
  derived and/or modified sequence
agagcaggaatttcccttcaaggtagcaggagatgaacgcgtgctgctccaggattttacagaactgattctgcagcaaagacaaatgttgcctgtatttgccagatagtataaacaggagcaaaagttgcacagctaaaccaggggctcattcccaggacagacatgcagttatggattccgaaagacaagtcaaggacactgatgacattgaaagtcctaaacgcagtatccgagacagtggctacatcgactgctgggattccgagcgcagcgactccctctctcctcctcgccacggcagagatgattccttcgacagcctggattcctttggctctcgctctcggcagacgccttcaccagatgtagtcctcaggggaagcagcgatgggagaggaagcgactctgaatccgacttgcctcatcggaagctgccagatgtgaagaaggatgacatgtctgcacggcggacttcccatggtgagccgaaatcagcagtgccttttaaccagtacctcccgaacaaaagcaatcagacggcctacgtccccgcgcctctgagaaagaagaaagcagagagagaggaataccgcaagagctggagtaccgccacctccccgctgggtggggagaggcccttcagatacggtccgagaactcctgtgtctgatgacgcagagagcaccagcatgtttgacatgcggtgtgaggaggaggccgcggtgcagccgcacagcagggcccgccaggagcagctgcagctgataaataaccagctgagggaagaggacgacaaatggcaagatgacctggctcgttggaagagtcgtagaagaagtgtttctcaggacttaatcaagaaagaggaagaaaggaaaaaaatggagaagttactggctggagaagatgggacaagtgaacgaaggaaaagcatcaaaacctacagagaaattgttcaagaaaaagagcggagagagagagagctgcatgaagcatataagaacgctcggtcccaggaggaggcagaggggatccttcaacagtacattgagaggttcaccatcagtgaggctgttctcgaacgcttggagatgccaaaaattctggaaagaagccattcaacagagccaaatttatcctccttcctgaatgaccccaatcccatgaaatacctgcggcaacagtcactgcctccacccaaattcactgccactgttgaaaccaccattgctcgtgccagtgttctggataccagcatgtcagcaggcagtgggtctccaagcaaaactgtcactcccaaagcagtgcctatgctgacacccaagccttactcccagcccaaaaattctcaagatgttctgaagacctttaaggtagacgggaaagtcagtgtgaatggagagacggttcatagagaggaggagaaggaaagagagtgtcccacggtggcacctgcccactccttaaccaaatcccagatgtttgaaggtgtggccagagtgcacgggtctccactggagctgaaacaagacaacggtagcatcgagatcaacataaagaagccaaactctgttccccaagagctcgcagcaaccactgagaaaacggaaccgaatagtcaagaggacaagaatgatggtggaaaatcaagaaaagggaatatagaacttgcctcatcagaaccacagcattttacaacaactgtgactcgatgcagcccgaccgtggcctttgtggaatttccctccagcccccagctgaagaatgatgtgtcggaagaaaaagaccagaagaaaccagaaaatgaaatgagtggaaaggtggagttggtgctgtcacaaaaggtggtaaagccaaaatctccagaacccgaagcaacgctgacatttccatttctggacaaaatgcctgaagccaaccaactacatttgccaaatctcaattctcaagtggattctccaagcagtgagaagtcacctgttatgacaccttttaagttctgggcatgggacccagaagaggagcgcaggcgacaggaaaaatggcaacaggaacaggaacgtttgctccaggagagataccagaaggagcaggacaagctgaaagaagagtgggaaaaggcccaaaaggaggtggaagaggaagaacgcagatactatgaggaggagcgtaagataattgaagacactgtggttccatttactgtttcttcaagttccgctgaccagctgtctacctcttcctccatgactgaaggcagtgggacaatgaataagatagacctgggaaactgtcaagatgaaaaacaagacagaagatggaagaaatcattccagggagatgacagtgacttattgctgaagactagggaaagtgatcgactggaggagaagggcagcctaactgaaggggccttggctcattctgggaaccctgtatcaaaaggagtccatgaagaccatcagctggataccgaggctggggccccacactgtggaacaaacccacagcttgctcaggatccatcccagaatcagcagacatcaaatccaacgcacagttcagaagatgtgaagccaaaaaccctcccgctggataaaagcattaaccatcagatcgagtctcccagtgaaaggcggaagtctataagtggaaagaagctgtgctcttcctgtgggcttcctttgggtaaaggagctgcaatgatcatcgagaccctcaatctctattttcacatccagtgtttcaggtgtggaatttgtaaaggccagcttggagatgcagtgagtgggacggatgttaggattcgaaatggtctcctgaactgtaatgattgctacatgcgatccagaagtgccgggcagcctacaacattgtgacacggctttcaagcttccggatcactcaccatttctttactgagagtgtcccctggcaactgcttaacaaaatcccaagctcaggggcttctcagcatttacctaatttctgaaaggctcttctgaaaggtggtatctgttctttcgtagcacagtgtttatgtttttcctgtttattgttttggttttttttttttttttgcatttgcacagtatacacaaaagaatatggggttgtaatgatcctgaatagctcaaaaaaggttttagcatggtcaaacaggcttatggtttaaaatgtgttattctcttctttgggaattagctaaatgatgcaataaacctgttttgttttagaatgtctaggaattaaacactttatgtttacagaattgagctgcagaaagtgcaagacatgccaatttgagacacacggtcttctaagactgaaggataaatttaatgcatttcagaaactaaacatcacagcaagctctatctctgagctataatttgtttttaatgcaaagacactagtttgataatatatactgtaatcctgaaacatttgtgttacttacctttggaggtagaaattataccaataaattattgcaccgttagtattagattctgtgtaccttggaagttatgtcattaatataggctggttcatcaaataaagcaaaaccttgcaatatcagctagatttacactccgggacgttgcccaaaggtaggaagaaagcagagggaaatatttcagtcatcatttccaaagtcattatcaaaatctgtgaggaagtttaatcttccaaagagtcaatgtcagacatcaggcctctgttgcctgcttctctcgaggcactagattaggagtcttcaataagagacttaacatgaggtatatggaagatgaggcaccgagataagttcatcattaggtgtgagcactgctcacccttgctggcaagttctccttaagggcctgaagcacaggtgtccaaagaaaagcgttaagtccatcttaatagaatctatgtggtatatgatgtggtcagcccctggtctgtgatcagcaagaacctacagcacagattatgccctgcccacttcaatgaatacctactctcctccattctccatcactttttttgctatcaagaactccggaccttgcccatggagaagtttagagaggaactcttgtggagagctggtttattttctgccctgtgcgacgagtttcagctggccaagaaaggagtcaagttattaaaaagcatcacaatgtagatctccaggctggttttttgttttttgttgttaagactggggaaagggggactatttattctgccttaaatcaatggcaaataagtcaagatgacattttgtgaatgtagactatggatacactcctaatagattgatgtagtcataaaagggggtcaagtagatgtttttctgttatgtaagcaataatttttccgtgtcttattgagtatggctagcgattatttattacatgctagatgggttctttgcatgtgggttccatataggtgcagaaatttcctcagccactggagggatttcgaccatatttgtcatttggatgagctgttattagattgaaatctacacatcatttcattaaaaattgtgccttagaaaacgcaaagctgttgcacatggcgataaattatggatgcagtacattgaagagagatgaagtcacttccaagtttccaagacttctcatggaggtgtttgctgttttacaggaaaaaataaaaataaaaaaagaaaaaaagaaaaaattaaaaagaaaaattgttttgaaaatgtacagatcaagtccaatattttgattatccacctgcatgttttattaaatattttgataatgtggatgtttacactttgcatgatattagcagagtaccactagtaatgcacaaacatgtacaatatggtcattcataaccgatttttatagaatactttttacatgtgcaactccatccgttatgtaaggattacatgaatattgcacattcccttctggtttcacaaacccatttatacatatttcttagtgaggctcattgtacatgtattgaagctagaatcgagtcaagaaaaataaagccccattctccaactgcaaaatgtgctttcccataatgaacactagtcaccagcacagaataatctccaacattttctaaattctaattgccaactgtttctatttatatttgatttatatttcatttggagtctgttacatggcagcttaggcagactagatcttgttttttccaatgcagcataatgagtatgatctatttcttttcaaataatctttgagatcccaggaaaaaaaaaatgctctgctccattgagctataatgtaaatgtgtttgtttaaaaaacaggtgaggcaagtgagtgatttattgttcctgaggaagtatatctgattttttttctcatactccaaaagctagtccctactctttaataaaaataatgggtaactttttgtttttcactagcgaacttccatgacatttcctttctatgtagtgtgattaatgcaatacatattatagttatctatacacagtgtaagatttaacaaactgaaatgatccacctcatatgtgagtccgtccaaaagatgttactgctctgggtgggccagtgttctatatcggttatactaactttcatttaaagtatttattctaaaatgcctctgagaaacagtaaaaaataaaaacaacaagttgtctaaaatgcaacagcttttatagtaaatgtacatttataaataaaatactcaaatca

SEQ ID NO: 42373 - DNA, 2709 bp, Artificial Sequence
  derived and/or modified sequence
atggacagcgagcggcaggtgaaggacaccgacgacatcgagagccctaaaaggagcatcagggattcaggatacattgattgctgggattcagagcgctcagactcattatccccccctagacatggacgtgacgacagttttgactccctcgattcatttggcagcagatcccgccaaactcctagcccagatgtggtactgcgcggaagtagcgacggccgcgggtccgactcagaatccgatctcccccaccggaagctgcccgacgtaaaaaaagatgacatgtccgcgcgcagaacaagtcacggcgagcccaaatccgccgtgcccttcaaccaatatctacccaataagagcaatcagacagcctacgtgcctgccccgctgcgaaagaaaaaagctgaaagggaggaatataggaagtcttggtcgacggcaacaagccccctgggcggagagagaccatttcgttacggaccgagaaccccagtgagtgacgacgcagaatccaccagcatgttcgacatgcgctgtgaagaggaggcggccgtgcagccacacagtcgcgcacggcaagaacagctgcagttgattaacaatcagttacgggaggaagatgacaaatggcaggacgatttagctcgttggaagtcccgcaggcgcagtgtctcacaggaccttatcaaaaaagaggaggagcgaaaaaagatggagaaactgttggctggggaagatggcacctcagagcggcgcaagagcattaaaacctacagggagatcgtacaggaaaaagagagacgcgagagagagctgcacgaggcttacaaaaatgctcgctcccaggaggaagcagagggtattctccagcagtatatagagcgattcaccatttcagaggctgttcttgagcggttagagatgcccaagatcctggaaagatcacactctacagaacccaacttgagttcttttttaaatgatccaaaccctatgaagtatctgcggcagcagtctcttccaccccctaagttcacagcaaccgttgagacgaccattgcacgggcatctgttctggatacaagcatgagcgccggaagtgggtctccaagtaaaacggtcacgcctaaggcggttcctatgcttactcccaagccctattcgcaacctaagaactctcaggacgtgctcaagaccttcaaagtcgacggcaaagtgagcgtgaacggcgagacggttcatcgggaagaggagaaggagagagaatgccccactgtggctcctgcgcatagcttaacaaagtcccagatgttcgagggcgttgccagggtccacggatctcccctggagttgaaacaggacaatgggtcaattgaaattaatatcaagaagccaaactcagtcccacaggaattagccgcgactaccgagaagacagaacccaattctcaggaagacaagaacgatggcggcaaaagccggaaaggcaatattgagctcgcatccagcgaaccccagcattttaccaccaccgtgactcgttgtagtcccacggtagctttcgtagagtttcctagcagtccccagttgaaaaacgacgtgtcagaagagaaagaccagaagaaaccggaaaatgagatgagtgggaaagtggaacttgtcctctctcagaaagttgtgaagccaaagagcccagaacccgaagctaccctgacattccccttcctggataaaatgccagaggccaatcagctccacctccccaatctgaactcccaggttgacagcccatcgagcgaaaagtctcctgtgatgacaccgtttaagttctgggcttgggatcctgaggaggagagacgccgtcaggagaaatggcaacaagaacaagagaggctgctgcaggagcgctatcagaaagaacaggataaactgaaggaagaatgggaaaaagcacagaaggaggtggaagaggaggaaaggagatattacgaagaggagaggaagatcatcgaggataccgttgtgcccttcactgtgtccagctccagcgccgaccaactgagcaccagttctagcatgactgagggcagtgggaccatgaacaaaatcgatctgggaaattgccaagatgaaaagcaggaccgtcggtggaagaaaagttttcagggcgacgatagtgacctgctgctgaagacacgtgagtctgacaggctggaagagaagggcagcctgacagaaggagccctagcccattcgggaaaccccgttagtaaaggagtacatgaggaccaccagcttgacactgaggccggcgcgcctcactgcgggaccaaccctcagctggctcaagatccgtctcagaatcagcagacttcgaacccaactcactcctctgaggacgtgaagccaaaaaccctgcctcttgataaatcaattaaccaccagatcgagagcccatcagagcgacgtaagtccatatctgggaagaaactttgctcgagctgtggcttgccattggggaagggagctgcgatgatcatcgagacactcaacttgtattttcatattcaatgtttccgctgtggaatttgcaaggggcagttaggggacgctgtgagtggcacggacgtcagaattaggaacgggttactcaactgtaacgactgctatatgaggtctcggtctgccgggcagcctacgaccctgtag

SEQ ID NO: 42374 - DNA, 2709 bp, Artificial Sequence
  derived and/or modified sequence
atggattctgagcgtcaggtaaaggacactgacgacatcgagtcacccaagcgctcaatccgagatagcggatatatagactgctgggacagcgaacgaagcgacagtctcagccccccacggcacggcagagatgactccttcgattccctggactcattcggcagccggtctcgtcagacaccatctcccgatgtggtcttaagggggtccagtgacggcaggggttcggactccgaatctgatttgccgcaccgcaagctgcccgacgtgaagaaagacgacatgagtgcaaggagaacgtcacacggggagcccaagtctgccgtccctttcaatcagtacctccctaacaagtctaaccaaactgcttatgtccccgcaccattgcggaagaaaaaggctgaaagggaagagtatcgcaaaagctggtcaaccgcaacgagtccacttgggggagaaaggccattccgctacggacccagaacacctgtgagtgacgacgctgagagtactagtatgtttgatatgcggtgcgaggaagaagccgcagtccagcctcacagcagggctcgccaagaacagctgcagctaatcaataaccagctgcgtgaggaggatgataaatggcaggacgacttagcaagatggaaatccagacgtagatcagtgtctcaggatctcattaagaaagaggaggaaagaaaaaaaatggagaagcttctggccggagaagatggaacctctgagcgacggaaatctattaagacttaccgagagatagttcaggagaaagagcgacgcgagagggagcttcatgaggcttacaagaacgcgcgttcacaggaggaagcggaagggatcctgcagcagtacatcgaacggttcactatcagtgaggcggtgcttgaaaggctggagatgccgaaaatccttgaacgctctcattccaccgagcctaacctgagtagcttcctgaacgaccctaatccgatgaagtatctgagacaacaatctctgcctccgccaaaattcaccgcgaccgtcgaaaccaccatagctcgtgcgtccgttctggatacatccatgtcagctggatctggctccccgagcaagaccgtgacccctaaagccgtccctatgctaacgccaaaaccatattctcagccgaaaaattcacaggacgtgctgaagacatttaaggtcgacggaaaggtatctgtgaacggagagactgtgcatagggaggaggaaaaagaaagagagtgtcctactgtggcgcctgcccattccctgactaagtctcagatgtttgaaggtgtcgccagagtccacggatcccctcttgaactgaaacaggataatgggtctatcgagatcaatatcaagaagcctaattccgtgccccaggagcttgccgcaacgacagaaaaaactgaaccaaattctcaagaagataagaatgacgggggtaaatcgcggaaaggcaacatcgaactcgcctcctcagaaccacagcatttcacgacgacagtaacgcgatgcagccccacagtggcctttgtagaattcccgtcatctccacaactgaagaatgacgtgagcgaggagaaggaccagaagaagcctgagaatgagatgtcgggtaaggtcgagctagtcctgtcgcaaaaggtcgtgaagccgaagtcccccgaacccgaggccacgctcacttttccctttcttgacaagatgccagaagccaatcagctgcatcttccgaacctcaacagtcaggtggatagcccctcctccgaaaagagcccagttatgactccattcaaattctgggcctgggacccagaggaagaacgccgtcggcaggaaaaatggcagcaggagcaggagcgtctactccaggaaaggtatcagaaagagcaggacaaactcaaagaggaatgggagaaggcccaaaaagaagtcgaagaagaggaaagaagatactacgaagaggagcgtaagattatcgaggacacagtcgtgccctttacagtatcgtcctctagtgccgaccagttgagcaccagttcatccatgaccgagggaagtgggaccatgaataagatcgacctcggcaactgtcaggatgagaaacaggacaggcggtggaagaaaagctttcagggagacgactctgatctccttttgaagacgagggaatctgacagactagaagagaaaggatcactgaccgaaggggctctcgcccactcaggtaaccctgtgtcaaaaggagtgcatgaagatcaccaactggatactgaagctggcgctccccactgcggtaccaatccgcagctggcacaggatccatctcagaaccagcagacctcaaatccaacccatagttcagaggatgtaaagcctaagactctcccgctagataagtccatcaaccaccagatcgagagcccttcggagagaagaaagtctattagtggcaaaaaactctgtagcagttgtggcctgcctctcggcaagggagctgctatgatcattgaaaccctgaacctgtatttccacatccagtgctttcgctgcggaatctgcaagggtcaactgggtgacgctgtctcgggtactgacgtgagaattcgaaatggcttgttgaactgcaacgactgttacatgcgctctcgctctgcaggtcaaccgacaaccctctag

SEQ ID NO: 42375 - protein, 890 aa, Artificial Sequence
  derived and/or modified sequence
MDSERQVKDTDDIESPKRSIRDSGYIDCWDSERSDSLSPPRHGRDDSFDSLDSFGSRSRQTPSPDVVLRGSSDGRGSDSESDLPHRKLPDVKKDDMSARRTSHGEPKSAVPFNQYLPNKSNQTAYVPAPLRKKKAEREEYRKSWSTATSPLGGERPFRSTSMFDMRCEEEAAVQPHSRARQEQLQLINNQLREEDDKWQDDLARWKSRRRSVSQDLIKKEEERKKMEKLLAGEDGTSERRKSIKTYREIVQEKERRERELHEAYKNARSQEEAEGILQQYIERFTISEAVLERLEMPKILERSHSTEPNLSSFLNDPNPMKYLRQQSLPPPKFTATVETTIARASVLDTSMSAGSGSPSKTVTPKAVPMLTPKPYSQPKNSQDVLKTFKVDGKVSVNGETVHREEEKERECPTVAPAHSLTKSQMFEGVARVHGSPLELKQDNGSIEINIKKPNSVPQELAATTEKTEPNSQEDKNDGGKSRKGNIELASSEPQHFTTTVTRCSPTVAFVEFPSSPQLKNDVSEEKDQKKPENEMSGKVELVLSQKVVKPKSPEPEATLTFPFLDKMPEANQLHLPNLNSQVDSPSSEKSPVMTPFKFWAWDPEEERRRQEKWQQEQERLLQERYQKEQDKLKEEWEKAQKEVEEEERRYYEEERKIIEDTVVPFTVSSSSADQLSTSSSMTEGSGTMNKIDLGNCQDEKQDRRWKKSFQGDDSDLLLKTRESDRLEEKGSLTEGALAHSGNPVSKGVHEDHQLDTEAGAPHCGTNPQLAQDPSQNQQTSNPTHSSEDVKPKTLPLDKSINHQIESPSERRKSISGKKLCSSCGLPLGKGAAMIIETLNLYFHIQCFRCGICKGQLGDAVSGTDVRIRNGLLNCNDCYMRSRSAGQPTTL

SEQ ID NO: 42376 - protein, 409 aa, Artificial Sequence
  derived and/or modified sequence
MNLDRCNSIAEPQHFTTTVTRCSPTVAFVEFPSSPQLKNDVSEEKDQKKPENEMSGKVELVLSQKVVKPKSPEPEATLTFPFLDKMPEANQLHLPNLNSQVDSPSSEKSPVMTPFKFWAWDPEEERRRQEKWQQEQERLLQERYQKEQDKLKEEWEKAQKEVEEEERRYYEEERKIIEDTVVPFTVSSSSADQLSTSSSMTEGSGTMNKIDLGNCQDEKQDRRWKKSFQGDDSDLLLKTRESDRLEEKGSLTEGALAHSGNPVSKGVHEDHQLDTEAGAPHCGTNPQLAQDPSQNQQTSNPTHSSEDVKPKTLPLDKSINHQIESPSERRKSISGKKLCSSCGLPLGKGAAMIIETLNLYFHIQCFRCGICKGQLGDAVSGTDVRIRNGLLNCNDCYMRSRSAGQPTTL

SEQ ID NO: 42377 - DNA, 2673 bp, Artificial Sequence
  derived and/or modified sequence
atggacagcgagagacaggtgaaggacaccgacgacatcgagagccccaagagaagcatcagagacagcggctacatcgactgctgggacagcgagagaagcgacagcctgagcccccccagacacggcagagacgacagcttcgacagcctggacagcttcggcagcagaagcagacagacccccagccccgacgtggtgctgagaggcagcagcgacggcagaggcagcgacagcgagagcgacctgccccacagaaagctgcccgacgtgaagaaggacgacatgagcgccagaagaaccagccacggcgagcccaagagcgccgtgcccttcaaccagtacctgcccaacaagagcaaccagaccgcctacgtgcccgcccccctgagaaagaagaaggccgagagagaggagtacagaaagagctggagcaccgccaccagccccctgggcggcgagagacccttcagaagcaccagcatgttcgacatgagatgcgaggaggaggccgccgtgcagccccacagcagagccagacaggagcagctgcagctgatcaacaaccagctgagagaggaggacgacaagtggcaggacgacctggccagatggaagagcagaagaagaagcgtgagccaggacctgatcaagaaggaggaggagagaaagaagatggagaagctgctggccggcgaggacggcaccagcgagagaagaaagagcatcaagacctacagagagatcgtgcaggagaaggagagaagagagagagagctgcacgaggcctacaagaacgccagaagccaggaggaggccgagggcatcctgcagcagtacatcgagagattcaccatcagcgaggccgtgctggagagactggagatgcccaagatcctggagagaagccacagcaccgagcccaacctgagcagcttcctgaacgaccccaaccccatgaagtacctgagacagcagagcctgcccccccccaagttcaccgccaccgtggagaccaccatcgccagagccagcgtgctggacaccagcatgagcgccggcagcggcagccccagcaagaccgtgacccccaaggccgtgcccatgctgacccccaagccctacagccagcccaagaacagccaggacgtgctgaagaccttcaaggtggacggcaaggtgagcgtgaacggcgagaccgtgcacagagaggaggagaaggagagagagtgccccaccgtggcccccgcccacagcctgaccaagagccagatgttcgagggcgtggccagagtgcacggcagccccctggagctgaagcaggacaacggcagcatcgagatcaacatcaagaagcccaacagcgtgccccaggagctggccgccaccaccgagaagaccgagcccaacagccaggaggacaagaacgacggcggcaagagcagaaagggcaacatcgagctggccagcagcgagccccagcacttcaccaccaccgtgaccagatgcagccccaccgtggccttcgtggagttccccagcagcccccagctgaagaacgacgtgagcgaggagaaggaccagaagaagcccgagaacgagatgagcggcaaggtggagctggtgctgagccagaaggtggtgaagcccaagagccccgagcccgaggccaccctgaccttccccttcctggacaagatgcccgaggccaaccagctgcacctgcccaacctgaacagccaggtggacagccccagcagcgagaagagccccgtgatgacccccttcaagttctgggcctgggaccccgaggaggagagaagaagacaggagaagtggcagcaggagcaggagagactgctgcaggagagataccagaaggagcaggacaagctgaaggaggagtgggagaaggcccagaaggaggtggaggaggaggagagaagatactacgaggaggagagaaagatcatcgaggacaccgtggtgcccttcaccgtgagcagcagcagcgccgaccagctgagcaccagcagcagcatgaccgagggcagcggcaccatgaacaagatcgacctgggcaactgccaggacgagaagcaggacagaagatggaagaagagcttccagggcgacgacagcgacctgctgctgaagaccagagagagcgacagactggaggagaagggcagcctgaccgagggcgccctggcccacagcggcaaccccgtgagcaagggcgtgcacgaggaccaccagctggacaccgaggccggcgccccccactgcggcaccaacccccagctggcccaggaccccagccagaaccagcagaccagcaaccccacccacagcagcgaggacgtgaagcccaagaccctgcccctggacaagagcatcaaccaccagatcgagagccccagcgagagaagaaagagcatcagcggcaagaagctgtgcagcagctgcggcctgcccctgggcaagggcgccgccatgatcatcgagaccctgaacctgtacttccacatccagtgcttcagatgcggcatctgcaagggccagctgggcgacgccgtgagcggcaccgacgtgagaatcagaaacggcctgctgaactgcaacgactgctacatgagaagcagaagcgccggccagcccaccaccctgtag

SEQ ID NO: 42378 - DNA, 2673 bp, Artificial Sequence
  derived and/or modified sequence
atggactcggaacggcaggtcaaagatactgatgacatcgaatcccccaaacgctcaattcgggattcagggtacatagactgctgggatagcgaacgctctgattcactgtccccacctaggcatggacgagatgactccttcgattcccttgattctttcggatcacgcagcaggcagactcctagtcccgatgtcgtgctgaggggatcttcagatgggagaggctccgattctgagtctgacctcccgcaccggaaactgcccgatgttaaaaaggacgacatgagcgctcgacggacatcacacggggagccgaaatcagctgtgcccttcaaccagtatctgcctaataagtcaaatcagacggcctatgtgccagcaccccttcggaagaagaaggcggaacgcgaagagtatagaaagtcctggtccaccgctaccagccccttggggggtgagaggcccttcagaagcacctcaatgtttgatatgagatgcgaagaggaggcagccgtccagccacactccagggcaaggcaggagcagctgcagctgattaataatcaactacgggaagaagacgacaaatggcaggatgatttagcgcggtggaagtcgcgccgtagaagcgttagtcaggatctgattaaaaaggaggaagagagaaaaaaaatggagaagctcctggcaggcgaggatgggacttcagagcggagaaagagcatcaagacatacagggaaattgtacaagaaaaggagcggagagagcgggaactgcacgaagcatataaaaacgccagaagccaggaggaagctgaaggaattctccaacagtatatcgaacggtttacaatcagcgaggccgttttggaacggctggagatgcctaagatcctggaaaggagccatagcacagaacctaacctttcctcctttcttaatgatcctaaccccatgaagtaccttcgccaacaaagtcttcctccccccaagttcaccgcaaccgtggaaaccaccatcgcaagagcatcagtgctcgacacttcgatgagcgccgggtcaggatcgccttctaagactgttacaccaaaagccgtaccaatgctaactcctaagccgtattcccaaccgaagaacagccaagatgttttgaaaactttcaaagtggatggaaaggttagcgtgaatggagaaactgttcatcgtgaagaagagaaggaacgggagtgccccaccgtggcgcccgctcacagcctgacgaagtcgcagatgtttgaaggcgtggcccgggtacacggatcccctttagagctgaaacaggataatggtagcatcgagattaacatcaagaaaccaaatagtgttccccaggagctagccgccaccacagagaaaacagagccgaattcccaagaggataaaaacgatgggggaaaatctcgcaaagggaacattgagcttgccagctcggagccccagcacttcaccactaccgttacccggtgtagccccacagtagctttcgtggagttcccctcatccccacagctcaagaatgacgtaagtgaagagaaggatcagaagaaaccagagaatgaaatgtccgggaaagtggagctggtcttatcgcagaaggtcgtgaaacccaaatcccccgaaccggaggcgacgttgacattccctttcttggataagatgcctgaggctaaccagctgcatctgccaaacctgaatagccaagtagactcacccagctctgaaaaatccccagtcatgaccccattcaagttttgggcttgggacccggaagaggagcgcagaaggcaggagaagtggcaacaggagcaagagagacttctccaggaacgatatcagaaggaacaagataagctaaaggaagagtgggaaaaagcccagaaagaggtggaggaggaggaaaggagatattatgaggaggagaggaagattatcgaggataccgtggtgccctttactgtatcctcatcctctgcagaccagttgagcaccagttcttctatgactgaaggctcagggaccatgaacaagattgacctcggcaattgtcaggacgaaaaacaagatcgacgctggaaaaaatcattccagggggatgacagtgatctgcttctgaaaacgcgggagagcgaccgtttagaggaaaaggggtcattgaccgagggcgcactggctcactctggcaatccagtttccaagggcgtgcacgaggaccaccagctggatacagaggctggcgctccccattgtgggaccaacccacagctggctcaagaccccagtcagaatcagcagacatctaatccaactcactctagcgaggacgtgaaaccgaagaccctgcctctcgacaagtctatcaaccatcagattgaatccccaagcgagcgccgcaaaagcatctctgggaagaaattatgctcttcttgtggactgccattggggaaaggcgcagctatgattattgagacactgaatctctacttccacatccaatgttttcgttgcgggatctgcaagggacaattgggtgacgccgtttctggtactgatgtaaggatcaggaacggactgctgaattgcaatgactgttacatgcgctctcggagcgccggccagccaaccactctatag

SEQ ID NO: 42379 - DNA, 2673 bp, Artificial Sequence
  derived and/or modified sequence
atggattctgagcggcaggtgaaggacacagatgacatcgagagccccaagaggagcatccgggacagcggctacatcgactgctgggacagcgagaggagtgacagcctgagccccccaagacatggaagagatgacagctttgacagcctggacagctttggcagccgcagccggcagacccccagcccagatgtggtgctgcggggcagcagtgatggccggggcagtgacagcgagagtgacctgccccacaggaagctgcctgatgtgaagaaggatgacatgtctgcccggaggaccagccatggagagcccaagtctgctgtgcccttcaaccagtacctgcccaacaagagcaaccagacagcctacgtgcctgcccccctgaggaagaagaaggccgagcgggaggagtacaggaagtcctggagcacagccaccagccccctgggcggggagcggcccttccgcagcacctccatgtttgacatgagatgtgaggaggaggccgctgtgcagccccacagccgggcccggcaggagcagctgcagctgatcaacaaccagctgcgggaggaggatgacaagtggcaggatgacctggcccgctggaagagcagaagaagatctgtgtcccaggacctgatcaagaaggaggaggagaggaagaagatggagaagctgctggccggagaagatggcaccagcgagaggaggaagagcatcaagacctaccgggagatcgtgcaggagaaggagcggcgggagcgggagctgcacgaggcctacaagaatgcccggagccaggaggaggccgagggcatcctgcagcagtacatcgagcgcttcaccatcagcgaggccgtgctggagcggctggagatgcccaagatcctggagaggagccacagcacagagcccaacctgagcagcttcctgaatgaccccaaccccatgaagtacctgcggcagcagagcctgcccccacccaagttcaccgccaccgtggagaccaccatcgcccgggcctctgtgctggacacctccatgtctgctggcagcggcagccccagcaagacagtgacccccaaggctgtgcccatgctgacccccaagccctacagccagcccaagaacagccaggatgtgctgaagaccttcaaggtggatggcaaggtgtctgtgaatggagagaccgtgcaccgggaggaggagaaggagcgggagtgccccaccgtggccccagcccacagcctgaccaagagccagatgtttgagggcgtggcccgggtgcacggcagccccctggagctgaagcaggacaatggcagcattgagatcaacatcaagaagcccaacagcgtgccccaggagctggccgccaccacagagaagacagagcccaacagccaggaggacaagaatgatggcggcaagagcaggaaaggaaacatcgagctggccagcagcgagccccagcacttcaccaccaccgtgacccgctgcagccccaccgtggcctttgtggagttccccagcagcccccagctgaagaatgatgtgtctgaggagaaggaccagaagaagccagaaaatgagatgtctgggaaggtggagctggtgctgagccagaaggtggtgaagcccaagagccctgagcctgaggccaccctgaccttccccttcctggacaagatgcctgaggccaaccagctgcacctgcccaacctgaacagccaggtggacagccccagcagcgagaagagccctgtgatgacccccttcaagttctgggcctgggaccctgaggaggagcggcggcggcaggagaagtggcagcaggagcaggagcggctgctgcaggagcgctaccagaaggagcaggacaagctgaaggaggagtgggagaaggcccagaaggaggtggaggaggaggagcggcgctactatgaggaggagaggaagatcattgaagatactgtggtgcccttcaccgtgagcagcagcagcgctgaccagctgagcaccagcagctccatgacagagggcagcggcaccatgaacaagattgacctgggcaactgccaggatgagaagcaggaccggcgctggaagaagagcttccagggagatgacagcgacctgctgctgaagacccgggagagtgaccggctggaggagaagggcagcctgacagaaggagccctggcccacagcggcaaccctgtgtccaagggcgtgcatgaggaccaccagctggacacagaggccggggccccccactgcggcaccaacccccagctggcccaggaccccagccagaaccagcagaccagcaaccccacccacagcagtgaagatgtgaagcccaagaccctgcccctggacaagagcatcaaccaccagatcgagagccccagcgagaggaggaagagcatcagcggcaagaagctgtgcagcagctgtggcctgcccctgggcaaaggagctgccatgatcatcgagaccctgaacctgtacttccacatccagtgcttccgctgtggcatctgcaagggccagctgggagatgctgtgtctggaacagatgtgcgcatcagaaatggcctgctgaactgcaatgactgctacatgaggagccgctctgctggccagcccaccaccctgtag

SEQ ID NO: 42380 - DNA, 5705 bp, Artificial Sequence
  derived and/or modified sequence
agagcaggaatttcccttcaaggtagcaggagatgaacgcgtgctgctccaggattttacagaactgattctgcagcaaagacaaatgttgcctgtatttgccagatagtataaacaggagcaaaagttgcacagctaaaccaggggctcattcccaggacagacatgcagttatggattccgaaagacaagtcaaggacactgatgacattgaaagtcctaaacgcagtatccgagacagtggctacatcgactgctgggattccgagcgcagcgactccctctctcctcctcgccacggcagagatgattccttcgacagcctggattcctttggctctcgctctcggcagacgccttcaccagatgtagtcctcaggggaagcagcgatgggagaggaagcgactctgaatccgacttgcctcatcggaagctgccagatgtgaagaaggatgacatgtctgcacggcggacttcccatggtgagccgaaatcagcagtgccttttaaccagtacctcccgaacaaaagcaatcagacggcctacgtccccgcgcctctgagaaagaagaaagcagagagagaggaataccgcaagagctggagtaccgccacctccccgctgggtggggagaggcccttcaggagcaccagcatgtttgacatgcggtgtgaggaggaggccgcggtgcagccgcacagcagggcccgccaggagcagctgcagctgataaataaccagctgagggaagaggacgacaaatggcaagatgacctggctcgttggaagagtcgtagaagaagtgtttctcaggacttaatcaagaaagaggaagaaaggaaaaaaatggagaagttactggctggagaagatgggacaagtgaacgaaggaaaagcatcaaaacctacagagaaattgttcaagaaaaagagcggagagagagagagctgcatgaagcatataagaacgctcggtcccaggaggaggcagaggggatccttcaacagtacattgagaggttcaccatcagtgaggctgttctcgaacgcttggagatgccaaaaattctggaaagaagccattcaacagagccaaatttatcctccttcctgaatgaccccaatcccatgaaatacctgcggcaacagtcactgcctccacccaaattcactgccactgttgaaaccaccattgctcgtgccagtgttctggataccagcatgtcagcaggcagtgggtctccaagcaaaactgtcactcccaaagcagtgcctatgctgacacccaagccttactcccagcccaaaaattctcaagatgttctgaagacctttaaggtagacgggaaagtcagtgtgaatggagagacggttcatagagaggaggagaaggaaagagagtgtcccacggtggcacctgcccactccttaaccaaatcccagatgtttgaaggtgtggccagagtgcacgggtctccactggagctgaaacaagacaacggtagcatcgagatcaacataaagaagccaaactctgttccccaagagctcgcagcaaccactgagaaaacggaaccgaatagtcaagaggacaagaatgatggtggaaaatcaagaaaagggaatatagaacttgcctcatcagaaccacagcattttacaacaactgtgactcgatgcagcccgaccgtggcctttgtggaatttccctccagcccccagctgaagaatgatgtgtcggaagaaaaagaccagaagaaaccagaaaatgaaatgagtggaaaggtggagttggtgctgtcacaaaaggtggtaaagccaaaatctccagaacccgaagcaacgctgacatttccatttctggacaaaatgcctgaagccaaccaactacatttgccaaatctcaattctcaagtggattctccaagcagtgagaagtcacctgttatgacaccttttaagttctgggcatgggacccagaagaggagcgcaggcgacaggaaaaatggcaacaggaacaggaacgtttgctccaggagagataccagaaggagcaggacaagctgaaagaagagtgggaaaaggcccaaaaggaggtggaagaggaagaacgcagatactatgaggaggagcgtaagataattgaagacactgtggttccatttactgtttcttcaagttccgctgaccagctgtctacctcttcctccatgactgaaggcagtgggacaatgaataagatagacctgggaaactgtcaagatgaaaaacaagacagaagatggaagaaatcattccagggagatgacagtgacttattgctgaagactagggaaagtgatcgactggaggagaagggcagcctaactgaaggggccttggctcattctgggaaccctgtatcaaaaggagtccatgaagaccatcagctggataccgaggctggggccccacactgtggaacaaacccacagcttgctcaggatccatcccagaatcagcagacatcaaatccaacgcacagttcagaagatgtgaagccaaaaaccctcccgctggataaaagcattaaccatcagatcgagtctcccagtgaaaggcggaagtctataagtggaaagaagctgtgctcttcctgtgggcttcctttgggtaaaggagctgcaatgatcatcgagaccctcaatctctattttcacatccagtgtttcaggtgtggaatttgtaaaggccagcttggagatgcagtgagtgggacggatgttaggattcgaaatggtctcctgaactgtaatgattgctacatgcgatccagaagtgccgggcagcctacaacattgtgacacggctttcaagcttccggatcactcaccatttctttactgagagtgtcccctggcaactgcttaacaaaatcccaagctcaggggcttctcagcatttacctaatttctgaaaggctcttctgaaaggtggtatctgttctttcgtagcacagtgtttatgtttttcctgtttattgttttggttttttttttttttttgcatttgcacagtatacacaaaagaatatggggttgtaatgatcctgaatagctcaaaaaaggttttagcatggtcaaacaggcttatggtttaaaatgtgttattctcttctttgggaattagctaaatgatgcaataaacctgttttgttttagaatgtctaggaattaaacactttatgtttacagaattgagctgcagaaagtgcaagacatgccaatttgagacacacggtcttctaagactgaaggataaatttaatgcatttcagaaactaaacatcacagcaagctctatctctgagctataatttgtttttaatgcaaagacactagtttgataatatatactgtaatcctgaaacatttgtgttacttacctttggaggtagaaattataccaataaattattgcaccgttagtattagattctgtgtaccttggaagttatgtcattaatataggctggttcatcaaataaagcaaaaccttgcaatatcagctagatttacactccgggacgttgcccaaaggtaggaagaaagcagagggaaatatttcagtcatcatttccaaagtcattatcaaaatctgtgaggaagtttaatcttccaaagagtcaatgtcagacatcaggcctctgttgcctgcttctctcgaggcactagattaggagtcttcaataagagacttaacatgaggtatatggaagatgaggcaccgagataagttcatcattaggtgtgagcactgctcacccttgctggcaagttctccttaagggcctgaagcacaggtgtccaaagaaaagcgttaagtccatcttaatagaatctatgtggtatatgatgtggtcagcccctggtctgtgatcagcaagaacctacagcacagattatgccctgcccacttcaatgaatacctactctcctccattctccatcactttttttgctatcaagaactccggaccttgcccatggagaagtttagagaggaactcttgtggagagctggtttattttctgccctgtgcgacgagtttcagctggccaagaaaggagtcaagttattaaaaagcatcacaatgtagatctccaggctggttttttgttttttgttgttaagactggggaaagggggactatttattctgccttaaatcaatggcaaataagtcaagatgacattttgtgaatgtagactatggatacactcctaatagattgatgtagtcataaaagggggtcaagtagatgtttttctgttatgtaagcaataatttttccgtgtcttattgagtatggctagcgattatttattacatgctagatgggttctttgcatgtgggttccatataggtgcagaaatttcctcagccactggagggatttcgaccatatttgtcatttggatgagctgttattagattgaaatctacacatcatttcattaaaaattgtgccttagaaaacgcaaagctgttgcacatggcgataaattatggatgcagtacattgaagagagatgaagtcacttccaagtttccaagacttctcatggaggtgtttgctgttttacaggaaaaaataaaaataaaaaaagaaaaaaagaaaaaattaaaaagaaaaattgttttgaaaatgtacagatcaagtccaatattttgattatccacctgcatgttttattaaatattttgataatgtggatgtttacactttgcatgatattagcagagtaccactagtaatgcacaaacatgtacaatatggtcattcataaccgatttttatagaatactttttacatgtgcaactccatccgttatgtaaggattacatgaatattgcacattcccttctggtttcacaaacccatttatacatatttcttagtgaggctcattgtacatgtattgaagctagaatcgagtcaagaaaaataaagccccattctccaactgcaaaatgtgctttcccataatgaacactagtcaccagcacagaataatctccaacattttctaaattctaattgccaactgtttctatttatatttgatttatatttcatttggagtctgttacatggcagcttaggcagactagatcttgttttttccaatgcagcataatgagtatgatctatttcttttcaaataatctttgagatcccaggaaaaaaaaaatgctctgctccattgagctataatgtaaatgtgtttgtttaaaaaacaggtgaggcaagtgagtgatttattgttcctgaggaagtatatctgattttttttctcatactccaaaagctagtccctactctttaataaaaataatgggtaactttttgtttttcactagcgaacttccatgacatttcctttctatgtagtgtgattaatgcaatacatattatagttatctatacacagtgtaagatttaacaaactgaaatgatccacctcatatgtgagtccgtccaaaagatgttactgctctgggtgggccagtgttctatatcggttatactaactttcatttaaagtatttattctaaaatgcctctgagaaacagtaaaaaataaaaacaacaagttgtctaaaatgcaacagcttttatagtaaatgtacatttataaataaaatactcaaatcaa

SEQ ID NO: 42381 - DNA, 2673 bp, Artificial Sequence
  derived and/or modified sequence
atggacagcgagcggcaggtgaaggacaccgacgacatcgagagcccaaaacgctccatacgagattccggctacatcgactgctgggattccgagcgcagcgattccctgtcccctccgcgccatggtcgtgacgactccttcgattctttagacagtttcggctctaggtcgagacagactccgtcgcccgatgtggtccttcgaggttcaagtgacgggaggggctcagattcagagagcgatctgcctcataggaagctaccagacgtgaaaaaagacgacatgagcgctcggcgcacctctcacggggaaccgaagtcggccgtgccctttaaccagtatctacctaacaagtccaatcagaccgcctacgtgcccgcacccctgagaaagaagaaggccgagagggaggagtatcggaaatcctggtccaccgccacctccccactcgggggagaacgtccattcagaagcactagtatgtttgatatgcgatgcgaagaagaagccgccgtgcaacctcattcccgcgctagacaggaacagctgcagcttatcaacaaccagcttcgggaagaagacgataaatggcaggacgatcttgctcgatggaagtcaaggcggcggagcgtgagtcaggatttgatcaaaaaggaagaggaaagaaagaagatggaaaagctcctcgcaggggaggacggaacttcggaacgcagaaagagtattaaaacctaccgggaaattgtccaggagaaagagcgacgcgagagggaactgcacgaagcatacaagaacgcccgaagccaggaggaagccgaaggcattctccagcagtatatcgagagattcaccatctccgaggctgtgctggagcgtttagagatgcccaagattttggaaaggtctcattcaacagaaccaaacctgtcatcgtttctgaatgatccaaatccgatgaaatacctgagacaacagagcctgccgccccctaagttcacagcgacagtggaaacaaccatcgcgagagctagtgtcctggatacgtctatgagcgctggctccggcagtccgagcaagaccgtaacccctaaggcagtgcccatgctcacacctaagccttattctcagccaaaaaatagccaggatgtcctgaagaccttcaaggtggacggcaaggtttcagtgaacggtgagacggtgcacagagaggaggagaaggagcgcgaatgcccaaccgtcgcccccgctcactccctgacgaagagccagatgtttgagggagtagccagagtgcatggcagtcccctggaacttaagcaggataatggcagcatagagattaacatcaagaaaccaaattcagtgccacaggagctggctgcaacgacagagaaaacggagcctaattctcaggaggacaagaacgacggtgggaaatcacgaaaaggtaatattgagctggcttcttctgagccgcagcactttacaaccacagtcacacgatgctcgccaactgtagccttcgtggagttcccctcaagtcctcagctcaagaatgatgtttctgaagaaaaagaccaaaagaaacccgagaatgaaatgagcggaaaggtggagctagtgctgagtcagaaggttgttaaaccaaaatcacccgagccagaggcgacacttacatttccctttctcgacaaaatgcccgaggccaaccagctccacctccccaacctgaattcgcaggtagattccccctcctctgagaaaagcccggtgatgacccccttcaagttctgggcgtgggatcccgaagaagaacgtcgtcgccaagagaagtggcagcaggaacaggagcgtcttttacaggagcggtatcaaaaggaacaggacaaactgaaggaggagtgggagaaagcccagaaagaggtggaggaagaggagcgtagatattatgaggaggaacgaaagattattgaggacacagttgtgcctttcactgtctccagcagctctgcagaccaactcagtactagttcctccatgacagagggctctggcacaatgaacaagatcgaccttgggaattgtcaagacgagaaacaagacaggagatggaagaaaagtttccagggcgatgacagtgacctgctcctgaaaacacgcgaatctgatagactcgaagagaaagggtcgttgacagaaggagccctcgcccactccgggaaccccgtcagtaaaggggtccatgaggaccatcagctggacacagaggccggggcccctcattgcggcactaaccctcaactcgcccaagatccttctcagaaccagcagacttcaaatccgacccattctagtgaggacgtcaaacccaaaacactcccccttgacaaaagtatcaatcatcagattgaaagtccatccgagcggagaaagtctatttcagggaaaaagctgtgtagcagctgcggcctgccactaggaaaaggtgcagccatgataattgagactctgaatctatacttccacattcaatgcttccggtgcggcatttgcaaaggccagctgggagatgccgtgtccgggaccgacgtgcgcatccgcaacggacttctgaactgtaacgactgctatatgcgctctcgctccgccggccagcctactacactgtag

SEQ ID NO: 42382 - DNA, 2673 bp, Artificial Sequence
  derived and/or modified sequence
atggacagtgagcgccaggtgaaggataccgacgacatcgaatctcctaagagaagtattagagactccggctatatagactgttgggattctgaacgctctgattccctgtccccccctcgccacgggagagacgattcctttgactccctcgatagttttggatctcggtcacgccaaacccccagtcccgatgtggtgctccgcggttcatctgatggccgaggatctgactccgaatctgatttaccccaccgtaagctccccgatgtgaagaaggatgatatgtctgccagacggaccagccacggagagccaaaatcggctgtgccgtttaatcagtatttgccaaataagagcaaccaaactgcctacgtgccagctcctctacggaaaaagaaggccgaacgtgaagagtaccgcaaatcttggtctaccgcaacaagccccctcggaggcgaaaggcctttcagaagtacatcaatgtttgacatgcgttgtgaagaagaggcagcagtgcaaccgcactcccgggcaagacaggaacagctccagttaattaacaaccagctgcgagaagaggacgacaagtggcaggacgacctggctagatggaagtccagacgcaggtcagtgtctcaggacctcatcaagaaggaggaggaacggaaaaaaatggagaaactgcttgccggtgaagatggtacctctgagaggagaaagtccattaagacctatcgcgaaatcgtgcaagagaaagaaagaagggagcgggagctccacgaggcgtataagaatgctcggtcccaagaagaagccgaaggaatcctccagcagtacatagagcgtttcaccatcagtgaagctgttctagagcggctggaaatgcccaaaattctggagagatcacactccacagaacccaaccttagttcatttctgaacgaccctaaccccatgaagtatctgagacagcaatccctccctcctcctaagtttaccgccaccgtggagacaactattgccagagcatcagtactggacacctctatgagcgctgggagtgggagccccagcaagactgtgaccccgaaggccgtccctatgttgactcccaagccctacagtcaaccgaaaaactcccaggacgtcttgaaaaccttcaaagtggacggaaaggtctccgttaatggcgagacagtacatagagaggaagagaaggagagagagtgccccacggtcgccccagcccattctttaactaagagccagatgttcgagggagtagcccgagtgcatgggagccccctcgagctcaagcaggataatgggagcatcgaaataaacattaagaagcccaatagcgtgccgcaggagctggcggcaaccacagagaaaacagagcccaatagtcaggaagataaaaatgacggcggaaagagtaggaaagggaacattgaactggcctcctcagaaccacagcattttacaaccaccgtaacccggtgctcgcctaccgttgcctttgtggagttcccttcgagcccccagctgaaaaacgatgtgagcgaggaaaaggaccagaaaaaaccagaaaacgagatgagcggtaaggttgagctcgtgctcagccaaaaggtcgtgaagcctaagtctccagagcccgaagcaaccctcacgttccctttcctcgacaaaatgcccgaggcaaatcaacttcacttgccaaacctgaattcccaggtggatagtccttcctccgagaaatcacctgtcatgacaccctttaaattctgggcttgggacccagaggaagagagaaggcggcaggaaaaatggcagcaggagcaggaacggctcctacaggaacgatatcagaaagagcaggataaactgaaggaagaatgggagaaagctcagaaagaggtcgaagaagaagagcgccgatactacgaagaggaacgtaagattatcgaagacacagtcgtacctttcaccgtctcctctagcagcgccgaccaactatctacttcaagcagtatgacggagggttctgggaccatgaacaaaatagatctcggcaattgtcaggatgaaaagcaggatcgacgatggaagaaatcttttcagggggacgattctgacctcctcctaaaaactcgggagtccgatcgcctggaagagaaggggagtctcacggagggcgctttggctcactccggaaacccagtcagtaagggggtgcatgaagaccatcagctggacacagaagcgggagctccgcactgcgggacgaatccccaactggcacaggacccctcccagaaccaacaaacctccaacccaactcacagtagcgaggatgttaaacctaagactttaccgctggataaaagcatcaaccaccagatcgagtcaccctccgaaaggcggaagtctatatcaggcaagaagctatgctcttcatgtggccttcctctgggcaagggggctgccatgatcatagagacacttaatctgtactttcatatccagtgcttccggtgcggcatctgcaagggccaacttggagatgccgttagcggaactgacgttcgcattcgcaacggactcctgaattgcaacgattgctacatgcgttctcgctctgccggtcagcctacaaccctgtag

SEQ ID NO: 42383 - protein, 396 aa, Artificial Sequence
  derived and/or modified sequence
MGANTSRKPPVFDENEDVNFDHFEILRAIGKGSFGKVCIVQKNDTKKMYAMKYMNKQKCVERNEVRNVFKELQIMQGLEHPFLVNLWYSFQDEEDMFMVVDLLLGGDLRYHLQQNVHFKEETVKLFICELVMALDYLQNQRIIHRDMKPDNILLDEHGHVHITDFNIAAMLPRETQITTMAGTKPYMAPEMFSSRKGAGYSFAVDWWSLGVTAYELLRGRRPYHIRSSTSSKEIVHTFETTVVTYPSAWSQEMVSLLKKLLEPNPDQRFSQLSDVQNFPYMNDINWDAVFQKRLIPGFIPNKGRLNCDPTFELEEMILESKPLHKKKKRLAKKEKDMRKCDSSQTCLLQEHLDSVQKEFIIFNREKVNRDFNKRQPNLALEQTKDPQGEDGQNNNL

SEQ ID NO: 42384 - DNA, 1191 bp, Artificial Sequence
  derived and/or modified sequence
atgggcgccaacaccagcagaaagccccccgtgttcgacgagaacgaggacgtgaacttcgaccacttcgagatcctgagagccatcggcaagggcagcttcggcaaggtgtgcatcgtgcagaagaacgacaccaagaagatgtacgccatgaagtacatgaacaagcagaagtgcgtggagagaaacgaggtgagaaacgtgttcaaggagctgcagatcatgcagggcctggagcaccccttcctggtgaacctgtggtacagcttccaggacgaggaggacatgttcatggtggtggacctgctgctgggcggcgacctgagataccacctgcagcagaacgtgcacttcaaggaggagaccgtgaagctgttcatctgcgagctggtgatggccctggactacctgcagaaccagagaatcatccacagagacatgaagcccgacaacatcctgctggacgagcacggccacgtgcacatcaccgacttcaacatcgccgccatgctgcccagagagacccagatcaccaccatggccggcaccaagccctacatggcccccgagatgttcagcagcagaaagggcgccggctacagcttcgccgtggactggtggagcctgggcgtgaccgcctacgagctgctgagaggcagaagaccctaccacatcagaagcagcaccagcagcaaggagatcgtgcacaccttcgagaccaccgtggtgacctaccccagcgcctggagccaggagatggtgagcctgctgaagaagctgctggagcccaaccccgaccagagattcagccagctgagcgacgtgcagaacttcccctacatgaacgacatcaactgggacgccgtgttccagaagagactgatccccggcttcatccccaacaagggcagactgaactgcgaccccaccttcgagctggaggagatgatcctggagagcaagcccctgcacaagaagaagaagagactggccaagaaggagaaggacatgagaaagtgcgacagcagccagacctgcctgctgcaggagcacctggacagcgtgcagaaggagttcatcatcttcaacagagagaaggtgaacagagacttcaacaagagacagcccaacctggccctggagcagaccaaggacccccagggcgaggacggccagaacaacaacctgtag

SEQ ID NO: 42385 - DNA, 1191 bp, Artificial Sequence
  derived and/or modified sequence
atgggtgctaatacaagcaggaagcccccagtgttcgatgaaaacgaagatgtgaattttgatcatttcgaaatcctacgggccattggaaagggaagctttggtaaggtgtgtatcgtgcagaaaaatgacaccaagaagatgtatgcaatgaagtacatgaataagcagaagtgtgttgagcgcaatgaagtgaggaatgttttcaaggagctgcaaattatgcaggggctcgagcaccccttcctggttaatctatggtacagttttcaggacgaggaggatatgtttatggttgtcgatcttcttctgggtggcgatcttaggtaccaccttcaacaaaatgtgcacttcaaggaagaaaccgtgaaactcttcatctgtgagcttgtcatggccctcgactatctacaaaaccaacgaattattcaccgggacatgaaaccagacaacatcctattggacgagcacggccatgtccatataaccgacttcaacatagccgcaatgctgccccgcgagacgcagattaccacgatggctggaacgaagccctatatggctcctgagatgttttcctctcggaaaggcgcagggtattctttcgccgtggattggtggagcttgggcgtgactgcctacgaacttttgcgagggagacggccctaccacatccggagctccacttcaagcaaggagatcgtccacacattcgaaaccacggtggtaacttacccatcagcctggagccaggagatggtgagtctgctgaagaagctgctcgagcccaatccagatcagcggtttagccagctctctgacgttcagaatttcccgtatatgaacgacattaattgggacgccgtgttccagaagcggctcattccaggtttcatacctaataaaggacgtcttaactgcgaccctacgttcgaattggaagagatgatcctggaatctaaacccctgcataagaaaaagaagaggctcgctaagaaagagaaggatatgcggaaatgcgattccagccagacatgtcttctgcaagaacacctcgactctgtacagaaggaattcattatatttaaccgagaaaaagtgaatcgagactttaacaagaggcagcctaatctggccttagaacagactaaagatccacagggagaagatggccagaacaacaacctgtag

SEQ ID NO: 42386 - DNA, 1191 bp, Artificial Sequence
  derived and/or modified sequence
atgggcgccaacaccagcaggaagccccctgtgtttgatgaaaatgaagatgtgaactttgaccactttgagatcctgcgggccatcggcaagggcagctttgggaaggtgtgcatcgtgcagaagaatgacaccaagaagatgtatgccatgaagtacatgaacaagcagaagtgtgtggagagaaatgaggtgagaaatgtgttcaaggagctgcagatcatgcagggcctggagcaccccttcctggtgaacctgtggtacagcttccaggatgaggaggacatgttcatggtggtggacctgctgctgggcggggacctgcgctaccacctgcagcagaatgtgcacttcaaggaggagaccgtgaagctgttcatctgtgagctggtgatggccctggactacctgcagaaccagaggatcatccaccgggacatgaagccagacaacatcctgctggatgaacatggccacgtgcacatcacagacttcaacattgctgccatgctgccccgggagacccagatcaccaccatggccggcaccaagccctacatggcccctgagatgttcagcagcaggaagggggccggctacagctttgctgtggactggtggagcctgggcgtgacagcctatgagctgctgcggggccggcggccctaccacatccgcagcagcaccagcagcaaggagatcgtgcacacctttgagaccaccgtggtgacctaccccagcgcctggagccaggagatggtgtccctgctgaagaagctgctggagcccaacccagaccagcgcttcagccagctgagtgatgtgcagaacttcccctacatgaatgacatcaactgggatgctgtgttccagaagaggctcatccctggcttcatccccaacaagggccgcctgaactgtgaccccacctttgagctggaggagatgatcctggagagcaagcccctgcacaagaagaagaagaggctggccaagaaggagaaggacatgaggaaatgtgacagcagccagacctgcctgctgcaggagcacctggacagcgtgcagaaggagttcatcatcttcaaccgggagaaggtgaacagagacttcaacaagaggcagcccaacctggccctggagcagaccaaggacccccagggagaagatggccagaacaacaacctgtag

SEQ ID NO: 42387 - DNA, 1191 bp, Artificial Sequence
  derived and/or modified sequence
atgggcgccaacaccagccggaagccccccgtgttcgacgagaacgaggatgtgaacttcgaccacttcgaaatcctgcgcgcaatcggcaaaggatcctttggtaaagtgtgtatcgtccaaaaaaacgacacaaagaagatgtacgctatgaaatatatgaacaaacagaagtgtgttgaacgcaatgaggtccgaaacgtcttcaaggagctgcagattatgcagggcctggagcacccctttcttgttaacctgtggtactcattccaggatgaggaggacatgttcatggttgtggacctgttactcgggggtgatctccggtaccacctgcagcagaacgttcatttcaaagaggaaaccgtcaaattatttatttgtgagctcgtcatggccctcgattacctccaaaatcaacggatcatccatcgcgatatgaagccggacaacatccttctcgacgagcatggccacgtgcacatcaccgacttcaatatcgccgctatgttacctcgcgaaacacagatcactaccatggccggtacaaagccatatatggccccagaaatgttttccagcagaaaaggcgccgggtacagctttgctgtggattggtggtcattgggagtgaccgcgtatgaacttctaaggggtaggcgaccgtaccatatccgcagctcaacttcctctaaggaaatcgtccatacattcgagacaaccgtagtgacgtacccgtccgcatggagtcaggagatggtgagtctgcttaagaagctgctggagcccaaccctgatcagaggttctcacagctgagcgatgtgcagaattttccttatatgaatgatattaattgggacgcagtttttcaaaagaggctgatacccgggttcatccccaataaaggcaggctgaattgcgaccccactttcgaattagaggagatgatcctcgaatcaaagccactccataagaaaaagaaaagacttgcgaaaaaggagaaggacatgagaaagtgcgactcaagtcagacatgtctgcttcaggagcatcttgattctgttcagaaagagtttatcatcttcaaccgagaaaaagtcaaccgcgacttcaataaacgacagcccaatctcgcgctggagcagacgaaggaccctcagggggaggacggacagaacaataacctttag

SEQ ID NO: 42388 - DNA, 1191 bp, Artificial Sequence
  derived and/or modified sequence
atgggagctaatacttcacggaagccacctgtctttgacgaaaatgaagatgtaaactttgaccactttgagatcctcagagccattggtaagggctcctttggaaaagtgtgcattgtacaaaagaacgatactaagaagatgtatgctatgaaatacatgaacaagcagaagtgcgtggaaaggaatgaagtgaggaacgtgttcaaggagctccaaattatgcaaggcttagagcaccccttcttggtgaatctttggtacagctttcaagacgaggaggacatgttcatggtagtagatctgctgttaggcggtgatctacgctaccatctgcagcaaaatgttcactttaaggaagaaaccgtgaagctgtttatctgtgaactggttatggctctcgattacctgcaaaatcagagaattatacaccgggatatgaagccagataacattttattagacgagcatggtcatgtgcatatcacagactttaacatcgccgctatgctccccagggagacacagattaccaccatggccggaacaaagccatacatggcaccggagatgttctcaagtaggaaaggagctgggtattcctttgcagtagattggtggtccctgggcgtgaccgcctatgagctcctgagaggcaggcggccataccacatccgaagcagcacctcatccaaagagatcgtgcacacattcgagaccactgtggtgacataccccagcgcttggtcacaagagatggtctcactgctgaaaaaactcttggagcctaacccagaccagcgattctcacagttatctgatgtacagaactttccttacatgaacgacatcaattgggacgcagtgtttcagaaacgactcattcctggattcatccctaataaggggcgactgaactgcgatcccacattcgagcttgaagagatgatactcgaatctaaacccctgcacaaaaagaaaaaaagactggccaagaaagagaaagacatgcggaagtgcgattcctctcaaacttgcctgttgcaggagcatctggacagtgtccaaaaggagttcataatcttcaaccgagagaaggtgaatagagatttcaataaaagacagcctaacttggctctggaacaaactaaggatccacagggcgaggatggacagaacaataacctgtag

SEQ ID NO: 42389 - DNA, 5393 bp, Artificial Sequence
  derived and/or modified sequence
gtgcgctgggcggcgctcggaccccttggcagccgcaggtgcctccccagcccagcccagctcagtccagcgcagcccagcccagcccagcccggcgctcgcagcctccgccgcttccgggcagataggtgccttttcttgctccttgctcttggagttcttctcttagtccctgttccctggatgaaagcatcgctccgagcctcatgggaggaatgaaggaagaatcgagactagatatccaactaaggcttcgggacatgttttgagcgaagatgggtgtttctgcccggatagtataaatcgaggatccaggtctgggcagattcaaccatgggagcgaacacttcaagaaaaccaccagtgtttgatgaaaatgaagatgtcaactttgaccactttgaaattttgcgagccattgggaaaggcagttttgggaaggtctgcattgtacagaagaatgataccaagaagatgtacgcaatgaagtacatgaataaacaaaagtgcgtggagcgcaatgaagtgagaaatgtcttcaaggaactccagatcatgcagggtctggagcaccctttcctggttaatttgtggtattccttccaagatgaggaagacatgttcatggtggtggacctcctgctgggtggagacctgcgttatcacctgcaacagaacgtccacttcaaggaagaaacagtgaagctcttcatctgtgagctggtcatggccctggactacctgcagaaccagcgcatcattcacagggatatgaagcctgacaatattttacttgacgaacatgggcacgtgcacatcacagatttcaacattgctgcgatgctgcccagggagacacagattaccaccatggctggcaccaagccttacatggcacctgagatgttcagctccagaaaaggagcaggctattcctttgctgttgactggtggtccctgggagtgacggcatatgaactgctgagaggccggagaccgtatcatattcgctccagtacttccagcaaggaaattgtacacacgtttgagacgactgttgtaacttacccttctgcctggtcacaggaaatggtgtcacttcttaaaaagctactcgaacctaatccagaccaacgattttctcagttatctgatgtccagaacttcccgtatatgaatgatataaactgggatgcagtttttcagaagaggctcattccaggtttcattcctaataaaggcaggctgaattgtgatcctacctttgaacttgaggaaatgattttggagtccaaacctctacataagaaaaaaaagcgtctggcaaagaaggagaaggatatgaggaaatgcgattcttctcagacatgtcttcttcaagagcaccttgactctgtccagaaggagttcataattttcaacagagaaaaagtaaacagggactttaacaaaagacaaccaaatctagccttggaacaaaccaaagacccacaaggtgaggatggtcagaataacaacttgtaaaggcctcatgtcttcttcttgggacaatctcatgccagaaacttctaattacatatgtcaagaaaagctgacagtagttcttgccactccacacaccatgacttagaaaatgtgaatgaatatatttcaaaaaaggcagcacaacacagtgaagggtcctgggcctgagctcctgggatgtcatttcacatcaatcaactgtgtgatctagagcaagtcacttagccactttctgtgctttactttatttatctaaaatgagagggttatactagacgagccataccctgcctttttagtgctatagttgttattctaaaccgcctttatttttattttaaaattaatatatgaatatagatttatttttccactccttctaattatgcagtgacaaatggacaaatggacacaggactcagtgagacttttcagacctcgaaagtttcataaagtggtcagaatgccccaggctacttggataaagataaggaattctatcagggaggcatgaatggaatcagattaaaagtaacagagatggatgagggccttccagtgatatgcgtgaatcagcattagatccgcttatctcagctggcaggagcctgctgtgcacaccacttcccagctccctcttcaacaatgtgaaagtggtaacttgaaattggtaataatgggagcatttacaccacggaaactggtaaatgctcgttttttccctcctaacaagtgaattgctaaatattagcccaccactccttccaagaagcatgttccttgagggctaattgtcctctgaagattagcagagacctgtatctggagaggatcagaaaagaatgtcatcacactgaaagtatgtccaccttgcagttcagaaaagttgcatcttatatggggtttattgtctaagttagaaatgaatttagaagatagtaaaatttaccgttgaaaaaccccttaaattacccataaagtatatgggaagtatcttttctcagtaaagcccaatacagtgtcacctttcactaatgaaacaagccattgcttttgttttgttttgacttagttatttttatttttggtctcattttggctaataccagatgagctaaaatgttgaacaaattatacttgtttttatagactagaattactcttttttttcttttcaggcagagtctcactctgtcacccaggctggagtgcagtggcatgatctctgctcactacatctgcctcccgggttcaagtgattcttgtgtctcagcctcctaagtagctgggatcgcatgtgtgtgccaccatgtgtagctaattttttgtatttttagtagagataggattttgctaagctggccaggttggtttcaaactcctggtctcaagtgatccgcccaccttggcctcccaaagtgctgggattacaggcgtgagccaccaaacctggccttagaattactcttagaacagtggaatgcccacacatccaagacaggcaagttcatggagactaagggaacagtggtatcatgtctcccttctcccttgtgcttactacaagaatggcaggcagaattccctacttatttaaaatatcactgatgtctcactctttttctttatattttatttattgatttgccacaaagtttaattcacctaagtgagacgtgcatatgatgtaactccactgtacagatacacagatctttacagaagaactatttttggcaacccctatgcccctgggtagggtccagaagtgaacaggcttggtgggggattgttttcacctcttggctactcagagtacctaaacctgtccttacttatggagagcatgtgtcacaccaagatggcagtaagctggcaactgcgaagacctgactgatgcccatttgggaagccaggcaagtgaaaatggaccgaagaaacagagatggctgtcttttatgcagggcttttccataaagaggttacactggggcaaccaagtatgtgtagaaagccagagctaaacttcagcttggcattcacagttttctcttcactgagctaataggcccagagtttcgggcagagctgtgaaatagtgcttctctaatagcaaccatattattgttacataattaaaagccagctcttttgttgtttgtttgattccttttccctacagttcccacatcatttgtctgtgctattctgtttttctccaaacactataaacttgaagcaattgccctgactcgatttcagagaaggggatgtgttggaaagagcaagaataagaaagtgaccagattctgctgcagtctggtaaccccacgagtgtcagggactacttgcatgtttacttctatccttcatttgttttgattcaagcctttatgtgctgtggactcacctccctaagtaaccaggttcctcctctcgctgcaaccttgtttgcatccttcccaagaagaggctttgggaaatttttctgtaattacacttaccaaagagccatggaaccattaggatctccactgtgatgagagttaagccatagtgccatttcacacgtatacatttatgatgggatgggaacccgatacaatctctgtaggctgaatccctagttttatttccagtgagctgcttctgtgactgaagcacctctgtgggcttttgggaaccatggatgcacagatgagagagcacaggctcagagagtaagatggatttctagtgctagccaggtgaatgacacacagtgtatttcaagtttgaaaagcaaaaccatggtatctgacagtgctgattgtaatcacctcccaccactgtgcattttaaacatgagaacaaaaaacttttccaaaatttaaacttttcctaaatctttgtggtcattgctagttgttgacatcagatcctttggttttattctataacttgggctaaacgttaatatcccactaggtggaacatgtctcttccggagttgtgacaaccgaggctcagagctgtgatttttagaaaacaagatgactattaaatcctttggcctggtattcttgaatgtttttctcccagtgcttcccttgcctgtatggagcatctgcaaagtctgagcaggttttgaagtccaagagcatcccagctataaggctcttgcactgtgacagagctgcccacctccagtacaccctcagtgacctcgagtagatgcgtagggcagtcaaacccggcaacttatgccacaaccctaattccaggaagtcgtctgctaatggctaacccactgccatggtggcactggttttgcctgaggtcattgctagggcaggaatgaacagcaaccagcacagagcattgctaaattaattacagtaatctaattaattagtagctaggcttcttctgataggaaagtttcaaccagaaaccactagatgttctattatcatagcttttgtagattggatggaagaataagtaggaagaaagagtattaatgtagctagtagggaccagtgttgctgcttgtggctgaggcagtaatgctaaggctttagctcttcaaaagcagaatgaaaaggcacaaaaagcacttcaagcttgtttctgtacccagttgtccctgtattgtctacataaaatcctgtttcctgctatctgtctgtgattcctgtttattacaaattcagtgtgtctgactgatattaaacactgatattaaaatttcaaacttcacttatctgtgctgttgtgaacaggcagctgatctggcagccctcgaatgggaaacaagtgcttctgttgagctgtagcatatataatataaatgtgcctatgtgtattaaaatgtcttctgtaaacaa

SEQ ID NO: 42390 - protein, 1113 aa, Artificial Sequence
  derived and/or modified sequence
MGDGKAVRISVAEMKSYYLYSEWCSWLLSVAEDEIMHQDIVPLCAADIQDQLKKRFAYLSGGRGQDGSPVITFPDYPAFSEIPDKEFQNVMTYLTSIPSLQDAGIGFILVIDRRRDKWTSVKASVLRIAASFPANLQLVLVLRPTGFFQRTLSDIAFKFNRDDFKMKVPVIMLSSVPDLHGYIDKSQLTEDLGGTLDYCHSRWLCQRTAIESFALMVKQTAQMLQSFGTELAETELPNDVQSTSSVLCAHTEKKDKAKEDLRLALKEGHSVLESLRELQAEGSEPSVNQDQLDNQATVQRLLAQLNETEAAFDEFWAKHQQKLEQCLQLRHFEQGFREVKAILDAASQKIATFTDIGNSLAHVEHLLRDLASFEEKSGVAVERARALSLDGEQLIGNKHYAVDSIRPKCQELRHLCDQFSAEIARRRGLLSKSLELHRRLETSMKWCDEGIYLLASQPVDKCQSQDGAEAALQEIEKFLETGAENKIQELNAIYKEYESILNQDLMEHVRKVFQKQASMEEVFHRRQASLKKLAARQTRPVQPVAPRPEALAKSPCPSPGIRRGSENSSSEGGALRRGPYRRAKSEMSESRQGRGSAGEEEESLAILRRHVMSELLDTERAYVEELLCVLEGYAAEMDNPLMAHLLSTGLHNKKDVLFGNMEEIYHFHNRIFLRELENYTDCPELVGRCFLERMEDFQIYEKYCQNKPRSESLWRQCSDCPFFQECQRKLDHKLSLDSYLLKPVQRITKYQLLLKEMLKYSRNCEGAEDLQEALSSILGILKAVNDSMHLIAITGYDGNLGDLGKLLMQGSFSVWTDHKRGHTKVKELARFKPMQRHLFLHEKAVLFCKKREENGEGYEKAPSYSYKQSLNMAAVGITENVKGDAKKFEIWYNAREEVYIVQAPTPEIKAAWVNEIRKVLTSQLQACREASQHRALEQSQSLPLPAPTSTSPSRGNSRNIKKLEERKTDPLSLEGYVSSAPLTKPPEKGKGWSKTSHSLEAPEDDGGWSSAEEQINSSDAEEDGGLGPKKLVPGKYTVVADHEKGGPDALRVRSGDVVELVQEGDEGLWYVRDPTTGKEGWVPASSLSVRLGPSGSAQCLSSSGKAHVPRAHP

SEQ ID NO: 42391 - protein, 903 aa, Artificial Sequence
  derived and/or modified sequence
LKMPVIMLSSVPDLHGYIDKSQLTEDLGGTLDYCHSRWLCQRTAIESFALMVKQTAQMLQSFGTELAETELPNDVQSTSSVLCAHTEKKDKAKEDLRLALKEGHSVLESLRELQAEGSEPSVNQDQLDNQATVQRLLAQLNETEAAFDEFWAKHQQKLEQCLQLRHFEQGFREVKAILDAASQKIATFTDIGNSLAHVEHLLRDLASFEEKSGVAVERARALSLDGEQLIGNKHYAVDSIRPKCQELRHLCDQFSAEIARRRGLLSKSLELHRRLETSMKWCDEGIYLLASQPVDKCQSQDGAEAALQEIEKFLETGAENKIQELNAIYKEYESILNQDLMEHVRKVFQKQASMEEVFHRRQASLKKLAARQTRPVQPVAPRPEALAKSPCPSPGIRRGSENSSSEGGALRRGPYRRAKSEMSESRQGRGSAGEEEESLAILRRHVMSELLDTERAYVEELLCVLEGYAAEMDNPLMAHLLSTGLHNKKDVLFGNMEEIYHFHNRIFLRELENYTDCPELVGRCFLERMEDFQIYEKYCQNKPRSESLWRQCSDCPFFQECQRKLDHKLSLDSYLLKPVQRITKYQLLLKEMLKYSRNCEGAEDLQEALSSILGILKAVNDSMHLIAITGYDGNLGDLGKLLMQGSFSVWTDHKRGHTKVKELARFKPMQRHLFLHEKAVLFCKKREENGEGYEKAPSYSYKQSLNMAAVGITENVKGDAKKFEIWYNAREEVYIVQAPTPEIKAAWVNEIRKVLTSQLQACREASQHRALEQSQSLPLPAPTSTSPSRGNSRNIKKLEERKTDPLSLEGYVSSAPLTKPPEKGKGWSKTSHSLEAPEDDGGWSSAEEQINSSDAEEDGGLGPKKLVPGKYTVVADHEKGGPDALRVRSGDVVELVQEGDEGL

SEQ ID NO: 42392 - protein, 1125 aa, Artificial Sequence
  derived and/or modified sequence
MRFWLRTEEMALEEMVQRLNAVSKHTDEIMHQDIVPLCAADIQDQLKKRFAYLSGGRGQDGSPVITFPDYPAFSEIPDKEFQNVMTYLTSIPSLQDAGIGFILVIDRRRDKWTSVKASVLRIAASFPANLQLVLVLRPTGFFQRTLSDIAFKFNRDDFKMKVPVIMLSSVPDLHGYIDKSQLTEDLGGTLDYCHSRWLCQRTAIESFALMVKQTAQMLQSFGTELAETELPNDVQSTSSVLCAHTEKKDKAKEDLRLALKEGHSVLESLRELQAEGSEPSVNQDQLDNQATVQRLLAQLNETEAAFDEFWAKHQQKLEQCLQLRHFEQGFREVKAILDAASQKIATFTDIGNSLAHVEHLLRDLASFEEKSGVAVERARALSLDGEQLIGNKHYAVDSIRPKCQELRHLCDQFSAEIARRRGLLSKSLELHRRLETSMKWCDEGIYLLASQPVDKCQSQDGAEAALQEIEKFLETGAENKIQELNAIYKEYESILNQDLMEHVRKVFQKQASMEEVFHRRQASLKKLAARQTRPVQPVAPRPEALAKSPCPSPGIRRGSENSSSEGGALRRGPYRRAKSEMSESRQGRGSAGEEEESLAILRRHVMSELLDTERAYVEELLCVLEGYAAEMDNPLMAHLLSTGLHNKKDVLFGNMEEIYHFHNRIFLRELENYTDCPELVGRCFLERMEDFQIYEKYCQNKPRSESLWRQCSDCPFFQECQRKLDHKLSLDSYLLKPVQRITKYQLLLKEMLKYSRNCEGAEDLQEALSSILGILKAVNDSMHLIAITGYDGNLGDLGKLLMQGSFSVWTDHKRGHTKVKELARFKPMQRHLFLHEKAVLFCKKREENGEGYEKAPSYSYKQSLNMAAVGITENVKGDAKKFEIWYNAREEVYIVQAPTPEIKAAWVNEIRKVLTSQLQACREASQHRALEQSQSLPLPAPTSTSPSRGNSRNIKKLEERKTDPLSLEGYVSSAPLTKPPEKGKGWSKTSHSLEAPEDDGGWSSAEEQINSSDAEEDGGLGPKKLVPGKYTVVADHEKGGPDALRVRSGDVVELVQEGDEGLWYVRDPTTGKEGWVPASSLSVRLGPSGSAQCLSSSESSPGSAVLSNSSSCSEGGQAPFSDLQG

SEQ ID NO: 42393 - DNA, 741 bp, Artificial Sequence
  derived and/or modified sequence
atgaggttttggctgcggacagaggagatggccttggaggaaatggtacagcgactcaatgctgtttcaaaacacaccgatgagatcatgcaccaagatattgtgcctctgtgtgctgcagacatccaggaccagctcaagaagcggtttgcatatctctcaggcggtaggggacaggacgggagccctgtgatcacctttccagattatcctgctttcagcgagatccctgacaaagaattccagaatgtcatgacctacctcacctctatacctagtctacaagatgctggcatcggttttatcctggtgattgatagaagacgggacaaatggacctccgtgaaggcaagtgtgcttcggattgccgcctcgttccctgccaacctccagctcgtattagtgttgcgtcccacaggcttcttccagaggacactgtccgacattgcatttaagtttaatcgtgacgatttcaaaatgaaggtgcctgtcattatgttgagttccgtgccagatctccacggctacatcgacaagtcccagctgacagaagacctgggtggaaccttagactattgtcactcacggtggctgtgccaacgaactgccattgagtctttcgccctgatggtgaagcaaacagcacaaatgttgcagtccttcggtacagagttggccgagactgagctcccaaatgacgtgcaatcaacatcctccgtgctgtgtgcgcacactgaatag

SEQ ID NO: 42394 - DNA, 3378 bp, Artificial Sequence
  derived and/or modified sequence
atgagattttggctccgcaccgaggagatggccctggaggagatggttcagcgcctgaatgctgtcagcaaacacactgatgaaatcatgcaccaggacattgtaccactgtgtgctgctgatattcaggaccaattaaaaaagagatttgcctacctgtctggcggccgcggccaagatgggagtcccgtcatcaccttcccggattacccagctttctctgaaatccctgacaaggaattccagaacgtaatgacctatctcacctcaatccccagcctgcaggatgcggggatcgggtttatccttgtgattgacaggcgcagagataagtggacttccgtgaaagcaagtgtgctaagaattgctgcttccttcccagcaaacctgcagctcgttctcgtgctcaggcccacggggttctttcagcggaccctgtcagatatagcatttaagttcaaccgagacgacttcaaaatgaaggtgcctgtgataatgctcagcagcgtgccagatcttcatggatacatcgataaatcacagcttaccgaagaccttggcggaaccctggactattgtcactcgagatggctttgtcagcgcactgctatcgagtcttttgccttgatggtaaaacaaacagctcaaatgctgcagtccttcggaactgaactcgccgaaacagaactcccaaatgacgtacaatccacaagcagcgttctgtgtgcgcacacagagaaaaaggataaagccaaagaggacctgcggctggccctcaaggaggggcattcagtcctggaaagcttacgtgaacttcaagctgagggaagcgaaccttctgtcaatcaggaccagcttgataatcaggccactgtacagcggctgttggcacagctcaatgaaaccgaagccgcgttcgatgagttctgggcgaaacatcaacagaaactagaacagtgtctgcagctacgacatttcgagcaggggtttcgcgaggtgaaagcaattttggacgccgcgtcccagaagatcgccacgttcaccgacattggcaattcattggcccacgtggagcatctgcttagggacttggctagcttcgaggaaaaaagtggcgtcgccgtagaacgtgcccgcgcactcagtcttgacggggaacagctcataggaaataagcactacgctgttgacagtatccggcctaagtgtcaggagctccggcatttgtgtgatcagttttctgccgaaatcgctaggcgccgaggcctgctctccaagagtttggaactgcacagacgactagagacttccatgaaatggtgtgacgaaggaatttacttgctcgcatcacagcccgtggacaaatgccagagccaagacggcgcagaggccgctcttcaagagattgagaaattcctggagactggtgctgaaaataagatccaggaacttaacgcaatttacaaggaatacgaatctatcctgaaccaggaccttatggaacatgtccggaaggtctttcaaaagcaggcgagcatggaggaagtcttccacaggaggcaagcctccctcaaaaaactcgctgccaggcaaaccaggccagtccagcccgtggcccctcgacccgaggctctggcaaaaagtccctgtccttcgcccggaattcgcagggggtcagagaattctagcagcgagggaggagccctgagacgtggtccttatcgaagggccaagagcgagatgtcagaatctagacaaggtcgaggctccgcgggagaagaggaagagtccctggccatccttcgccgccatgtgatgtcagagctcctcgatacagaaagagcgtacgtagaggaattgctgtgtgtgttggaaggatatgctgctgagatggacaatcccctcatggcccatttactctctactggattgcacaacaagaaggatgtgttattcgggaatatggaagaaatctatcatttccacaataggatctttttgcgggagcttgagaattatactgactgtcccgagctcgtgggcaggtgcttcctcgagagaatggaggacttccaaatttatgagaagtattgccaaaacaaaccaaggagtgagagtctgtggcgtcaatgtagcgactgccccttttttcaggaatgccagagaaagcttgaccataagctgtcacttgattcgtacctgctgaaacccgtgcagcgcataaccaaataccagcttctgcttaaggaaatgctaaagtactcccgcaattgcgaaggggccgaggacctgcaggaagccttatccagcattttggggatactgaaagcggttaacgactctatgcatctcattgcaattacgggttatgacggtaaccttggcgaccttgggaaacttctgatgcaagggagcttttctgtctggacagatcataagaggggacataccaaggtgaaggaactcgcgcgcttcaaacccatgcagaggcatctcttcctgcacgaaaaggccgttctcttttgcaaaaagcgcgaagaaaatggagagggctacgaaaaggcaccctcttattcctacaaacaaagccttaatatggctgccgttggcatcacagagaacgtgaagggggatgccaagaagtttgaaatatggtataatgccagagaggaagtctacattgtccaggcacctacccccgaaattaaagctgcctgggtaaacgagatccgaaaggtcctaacctctcagctgcaggcttgcagggaggcctctcagcatagggccctcgagcaaagccagtcactgccgctgcccgccccaacctcaacgagtcctagtcgcggaaatagtcgcaatataaagaagctcgaagaaaggaaaaccgaccccctgagtctggagggctacgtgtcttcagcccctttgactaagccaccagaaaaaggaaaaggttggagcaagacctcccattcactggaagcacccgaggatgacggaggatggtctagtgccgaggagcagatcaactcaagcgatgccgaggaagacggaggactgggaccaaaaaaattggtgccaggtaagtatacagtcgtggccgaccatgaaaagggggggccagacgctctgcgggtccgctccggcgacgtcgtggagcttgtccaggaaggagacgaaggcctttggtatgttcgtgatcctacaacgggcaaggaggggtgggtgccagcaagcagcctgtctgtcaggctcggtccgagcggtagtgctcagtgtctgtcttctagcgagtcatcccccggttctgctgtgctaagcaactcgagctcttgcagcgagggtggacaggccccattctccgatctccagggctag

SEQ ID NO: 42395 - DNA, 741 bp, Artificial Sequence
  derived and/or modified sequence
atgaggttctggctgaggacagaggagatggccctggaggagatggtgcagaggctgaatgctgtgtccaagcacacagatgagatcatgcaccaggacatcgtgcccctgtgtgccgctgacatccaggaccagctgaagaagagatttgcctacctgagcggcggccggggccaggacggcagccctgtgatcaccttcccagactacccagccttcagcgagatcccagacaaggagttccagaatgtgatgacctacctgaccagcatccccagcctgcaggatgctggcatcggcttcatcctggtgattgacagaagaagagacaagtggacctctgtgaaggcctctgtgctgagaattgctgccagcttccctgccaacctgcagctggtgctggtgctgcggcccaccggcttcttccagaggaccctgagtgacatcgccttcaagttcaacagagatgacttcaagatgaaggtgcctgtgatcatgctgagctctgtgcctgacctgcacggctacatcgacaagagccagctgacagaggacctgggcggcaccctggactactgccacagccgctggctgtgccagaggacagccatcgagagctttgccctgatggtgaagcagacagcccagatgctgcagagctttggaacagagctggccgagacagagctgcccaatgatgtgcagagcaccagctctgtgctgtgtgcccacacagaatag

SEQ ID NO: 42396 - DNA, 3378 bp, Artificial Sequence
  derived and/or modified sequence
atgaggttctggctgaggacagaggagatggccctggaggagatggtgcagaggctgaatgctgtgtccaagcacacagatgagatcatgcaccaggacatcgtgcccctgtgtgccgctgacatccaggaccagctgaagaagagatttgcctacctgagcggcggccggggccaggacggcagccctgtgatcaccttcccagactacccagccttcagcgagatcccagacaaggagttccagaatgtgatgacctacctgaccagcatccccagcctgcaggatgctggcatcggcttcatcctggtgattgacagaagaagagacaagtggacctctgtgaaggcctctgtgctgagaattgctgccagcttccctgccaacctgcagctggtgctggtgctgcggcccaccggcttcttccagaggaccctgagtgacatcgccttcaagttcaacagagatgacttcaagatgaaggtgcctgtgatcatgctgagctctgtgcctgacctgcacggctacatcgacaagagccagctgacagaggacctgggcggcaccctggactactgccacagccgctggctgtgccagaggacagccatcgagagctttgccctgatggtgaagcagacagcccagatgctgcagagctttggaacagagctggccgagacagagctgcccaatgatgtgcagagcaccagctctgtgctgtgtgcccacacagagaagaaggacaaggccaaggaggacctgcggctggccctgaaggagggccacagcgtgctggagagcctgcgggagctgcaggccgagggcagcgagcccagcgtgaaccaggaccagctggacaaccaggccaccgtgcagaggctgctggcccagctgaatgaaacagaggccgcctttgatgagttctgggccaagcaccagcagaagctggagcagtgcctgcagctgcggcactttgagcagggcttccgggaggtgaaggccatcctggatgctgccagccagaagatcgccaccttcacagacatcggcaacagcctggcccacgtggagcacctgctgcgggacctggccagctttgaggagaagtctggagtggccgtggagcgggcccgggccctgagcctggatggagagcagctgattggcaacaagcactatgctgtggacagcatccggcccaagtgccaggagctgcggcacctgtgtgaccagttctctgctgagatcgcccggcggcggggcctgctgagcaagagcctggagctgcaccggcggctggagacctccatgaagtggtgtgatgagggcatctacctgctggccagccagcctgtggacaagtgccagagccaggatggagctgaggccgccctgcaggagattgagaagttcctggagactggagctgagaacaagatccaggagctgaatgccatctacaaggagtatgagagcatcctgaaccaggacctgatggagcacgtgaggaaggtgttccagaagcaggcctccatggaggaggtgttccaccggcggcaggccagcctgaagaagctggccgcccggcagaccaggcctgtgcagcctgtggcccccaggcctgaggccctggccaagagcccctgccccagccctggcatccggcggggcagcgagaacagcagcagcgagggcggggccctgcggcggggcccctacagaagagccaagtctgagatgtctgagagccggcagggccggggcagcgctggggaggaggaggagagcctggccatcctgcggcggcacgtgatgtctgagctgctggacacagagcgggcctacgtggaggagctgctgtgtgtgctggagggctacgccgctgagatggacaaccccctgatggcccacctgctgagcacaggcctgcacaacaagaaggatgtgctgtttggaaacatggaggagatctaccacttccacaaccgcatcttcctgcgggagctggagaactacacagactgcccagagctggtgggccgctgcttcctggagaggatggaggacttccagatctatgagaagtactgccagaacaagcccaggtctgagagcctgtggaggcagtgcagcgactgccccttcttccaggagtgccagaggaagctggaccacaagctgagcctggacagctacctgctgaagcctgtgcagaggatcaccaagtaccagctgctgctgaaggagatgctgaagtacagcaggaactgtgagggcgctgaggacctgcaggaggccctgagcagcatcctgggcatcctgaaggctgtgaatgacagcatgcacctgattgccatcaccggctatgatggcaacctgggggacctgggcaagctgctgatgcagggcagcttctctgtgtggacagaccacaagaggggccacaccaaggtgaaggagctggcccgcttcaagcccatgcagaggcacctgttcctgcacgagaaggctgtgctcttctgcaagaagcgggaggagaatggagagggctatgagaaggcccccagctacagctacaagcagagcctgaacatggctgctgtgggcatcacagaaaatgtgaagggagatgccaagaagtttgagatctggtacaatgcccgggaggaggtgtacatcgtgcaggcccccaccccagagatcaaggccgcctgggtgaatgagatcaggaaggtgctgaccagccagctgcaggcctgccgggaggccagccagcaccgggccctggagcagagccagagcctgcccctgcctgcccccaccagcaccagccccagccggggcaacagcaggaacatcaagaagctggaggagaggaagacagaccccctgagcctggagggctacgtgtcctctgcccccctgaccaagcccccagagaagggcaagggctggagcaagaccagccacagcctggaggccccagaagatgatggcggctggagcagcgctgaggagcagatcaacagcagtgatgctgaggaggatggcggcctgggccccaagaagctggtgcctgggaagtacacagtggtggccgaccacgagaagggcggcccagatgccctgcgggtgcgctctggagatgtggtggagctggtgcaggagggagatgagggcctgtggtacgtgcgggaccccaccaccgggaaggagggctgggtgcctgccagcagcctgtctgtgcggctgggccccagcggcagcgcccagtgcctgagcagcagcgagagcagccctggcagcgctgtgctgagcaacagcagcagctgcagcgagggcggccaggcccccttcagtgacctgcagggctag

SEQ ID NO: 42397 - DNA, 898 bp, Artificial Sequence
  derived and/or modified sequence
caatcctgggcagggaggcggcggctggaggctgaaagcgctgccgtggccccctccccgcctccgccgcgccccctccgcactcgcacggccccacccgcaggcgccccccgtgcggaggaagcggatctgccaggatcatttttgttgtgtcggaggatgaggttttggctgaggactgaagagatggccttggaagaaatggtgcagagattaaatgcggtttccaagcacacggatgaaatcatgcaccaggacatcgtcccgctctgtgctgccgacatccaggaccagctaaagaagcgctttgcttacctgtccggtgggcgggggcaggacggaagcccggttatcaccttccctgactacccggccttcagcgagattccggacaaggagttccagaatgtcatgacctacctcaccagcatccccagcctgcaggacgctggcatcggattcatcctggtgatagaccggcgacgggacaaatggacctccgtgaaggcgtccgtcctgcgcatcgcagcatctttcccggcaaacctgcagctcgtcctcgtgcttcgcccgacgggttttttccaaaggactctctccgacatcgctttcaaattcaatagagatgactttaagatgaaggtgccggtcataatgctgagctccgtaccagacttacacggttacatcgataagtcgcagctgaccgaggacctgggtgggaccctggactactgccactcccggtggctgtgccagcgcacggccatcgaaagtttcgccctcatggtgaagcagacggctcagatgctgcagtccttcgggaccgagctggctgaaacagagctgcccaatgacgtccagtcgacaagctcagtgctgtgtgcgcacacagaga

SEQ ID NO: 42398 - DNA, 5067 bp, Artificial Sequence
  derived and/or modified sequence
atgaggttttggctgaggactgaagagatggccttggaagaaatggtgcagagattaaatgcggtttccaagcacacggatgaaatcatgcaccaggacatcgtcccgctctgtgctgccgacatccaggaccagctaaagaagcgctttgcttacctgtccggtgggcgggggcaggacggaagcccggttatcaccttccctgactacccggccttcagcgagattccggacaaggagttccagaatgtcatgacctacctcaccagcatccccagcctgcaggacgctggcatcggattcatcctggtgatagaccggcgacgggacaaatggacctccgtgaaggcgtccgtcctgcgcatcgcagcatctttcccggcaaacctgcagctcgtcctcgtgcttcgcccgacgggttttttccaaaggactctctccgacatcgctttcaaattcaatagagatgactttaagatgaaggtgccggtcataatgctgagctccgtaccagacttacacggttacatcgataagtcgcagctgaccgaggacctgggtgggaccctggactactgccactcccggtggctgtgccagcgcacggccatcgaaagtttcgccctcatggtgaagcagacggctcagatgctgcagtccttcgggaccgagctggctgaaacagagctgcccaatgacgtccagtcgacaagctcagtgctgtgtgcgcacacagagaagaaggacaaggcgaaggaggatttgaggctggcactgaaagaggggcacagtgtcctggagagcctcagggagctgcaggctgagggctcagagcccagtgtgaaccaggaccagcttgacaaccaggccaccgtgcagaggctcctggcccagctgaacgaaaccgaggctgccttcgatgagttctgggcaaagcatcagcagaaactggagcagtgtctgcagctccggcactttgagcagggcttccgggaggtcaaagccatcttggacgcagcgtcccagaagatagcaaccttcacagacatcggcaacagcctggcgcatgtggagcacctgctgagggacctggccagcttcgaggagaaatcaggcgtggccgtggagagggcccgggccctgtctctggacggcgagcagctcattgggaacaagcactacgcggtagactccatccgcccaaagtgccaggagctccggcacctctgtgaccagttctctgcggagatcgcaaggaggagggggctgctcagcaagtccctggagctgcaccgccgcctggagacgtccatgaagtggtgtgatgaagggatttacctgctggcctcacaacctgtggacaagtgccagtcccaggacggcgcggaggctgccctccaggaaatcgagaagtttttggagaccggtgcggaaaataagatccaggagctcaacgcgatttacaaggaatacgaatccatcctcaaccaagatctcatggagcacgtgcgaaaggtcttccagaagcaggcaagcatggaggaggtgttccaccgcaggcaggccagcctgaagaagctggcggccaggcagacgcggcccgtgcagccggtggcccccagacccgaggcactggcaaagtcgccctgcccctccccaggcattcggcgaggctctgagaactccagctccgagggcggtgcgctccggagagggccctaccggagggccaagagtgagatgagtgagagccggcagggccgcggctcagcgggggaggaggaggaaagcctggccatcctgcgcaggcacgtgatgagcgagctcctggacacagaacgggcctacgtggaggagctgctgtgcgtcctggagggctacgccgcggagatggataacccactgatggctcacctcctgtcaacaggccttcacaacaagaaggatgttttgtttggaaacatggaggaaatctatcacttccacaacaggatattcctcagggagctggaaaactacactgactgcccagaactggttggaagatgctttctggagaggatggaagatttccagatctatgagaagtactgtcagaacaagccccgctctgagagcctgtggagacagtgctccgactgcccgtttttccaggaatgccagagaaagctggaccacaagctgagcctggactcctacctgctgaagccagtgcagaggatcaccaagtaccagctgctgctcaaggaaatgctgaaatacagcaggaactgcgagggggctgaggacctgcaggaggcgctgagctccatcctgggcatcctgaaggccgtgaacgactccatgcacctcatcgctatcaccggctatgacgggaatctcggcgacctgggcaagctgctgatgcagggctcgttcagcgtctggaccgaccacaagaggggccacaccaaggtgaaggagctggccaggttcaagcccatgcagcggcacctgttcctgcacgagaaggcagtgctcttctgcaagaagagggaggagaatggggaggggtatgagaaagctccctcctacagctacaagcagtccttaaacatggctgccgttggcattacggagaacgtgaagggagatgctaagaagttcgagatctggtacaacgcgcgcgaggaggtctacatcgtccaggcgccaactcctgagattaaagccgcgtgggtgaatgaaattcggaaagtgctgaccagccagctgcaggcttgtagagaagccagccagcaccgggcgctggagcagtcacagagcctgcccctgccggccccgaccagcaccagtccctcaagaggaaactcaaggaacatcaagaagctggaagaaaggaaaacagaccccctaagcctggagggatacgtcagctcagcgccactgacaaagccccccgaaaagggcaaaggttggagcaaaacgtcccactcactggaggcacctgaggacgacgggggctggtcaagtgcagaggagcagattaactcgtccgacgcagaggaggacggcgggttgggccccaagaagctggttccaggtaaatacacggtcgtggcggaccacgagaagggaggccccgatgcgctgcgcgtgaggagcggggacgtggtggagctggtgcaggagggcgacgagggcctctggtacgtcagggacccgaccactggcaaggagggctgggtgccggccagcagcctgtccgtccggctcggcccgtccggctcggcccagtgcctgagcagctcagagtcgagcccggggtcggccgtgctgagcaactcgtccagctgcagcgagggcggccaggcccccttctccgacctgcaggggtagcgcggcctcggcgccggagacccgcgcgctgtctggggctgcggtggcgtggggagggcgcggcccccggacgccccgaggaaggggcacctcaccgcccccacccagagcgcctggccgtgcgggctgcagaggacccctccggggcagaggcaggttccacggaagaccccggcccgctggggcttccccggagactccagagcccacagaggaggggccgcagggaacagccccgggcggcaggcgccgggcagcggcatctcgtcctggctccaccgtgctgcttctgcctctggacggtgctttcaggggacgcgcggaccgtggtggagctgcttccggagaagtggaggatcctctggccaacggcctgaggagagcggggcacggggtctctttagcttttacaagttttaggattttttcaagcagggatcaatcccgtggccattttttgtggtactttggcctcaattcttcaccaggaatcactgtgtttacatgaaatgacaatttgatactgtatttgatagaaaactatttttttgttaccggggtttacatagaagcacgttgtttataccactaagtgactttgggggggctctcccatggaaacggatggcactccctgaagctccctggtcacaggtggatgaaaacgtgtccgtgggtgacatcaggtggtgtctccaccaccaaaagcagttagaagccaaggagattcctttatctacctagggttcattttcaaaagaaaatttaaactataatttaaacaattaacgttcttttctacaaaaaaaatgcagggacttgatttttttaaagagcttcactgaattaggatatttttattgcttttaaagaaaatacaaagatgcagtttctgcagggtgtggcgtggaccagtgctgccgaccatagctcagagagccctgcccctgcctcactgcactgcagcctcctcggaggccgcacctccactccactccccacgcgccccctgcctcccacccaggtccacctgccacctggtgaccaccttgagtacagaagtgaaagtggggagagtattttattcaagtcacagcagaactggaaaaaaactcttctgttttaccaacttcttgtgtttcagaaacatattctgttcaaaacttttgaagccctttcggtgtctagtctgcagatgtttttgtatgtgtgcacctctgaccatgtgtgtacatatgtgtcttgctggaaaggacatattcgctgtccccgtgctgctgggagggccgcctcacagcctcacggttcccagccccagcacagtggaggcaggcgtggctgcattcccctcacgctaccctcccagcggcttgtagccgtcactggccagacctccagggtgcggaatcaaataggaagcatgcagagactcggcagcttttcctctgatgtgtaagttatttggaacgcgtgctgtgtcccgcgatgtccctgatgtactgtgcaggcgcggtgcctccgtctcgtcgcacagctgcgcgcccttgtgtgaccctccccataaaggcactttacagcttcatgtttcatccactgtcacttttttttaactgctgatgtaaatggaattttaaaagcagagttctttattgtatggatgacgtttgaataaatatcagcaactcctgc

SEQ ID NO: 42399 - DNA, 741 bp, Artificial Sequence
  derived and/or modified sequence
atgcggttctggctgcggaccgaggagatggccctggaggagatggtgcagcgtctgaatgccgtgtcaaaacatacggacgaaattatgcaccaggatatagtacctctctgtgcggctgacatccaagatcagctgaagaaacggttcgcctatctgtccggggggaggggccaggatggtagccctgtcatcactttccctgactaccctgcattttcagagattccggacaaggagttccagaatgtgatgacctatctgacgtcaataccatctctgcaggatgctggcatcggcttcattttggtaattgacaggcgccgtgacaagtggacgtcagttaaggcatctgtgctgagaatcgctgcaagctttcccgcaaacctccagctggtgcttgttttgcgacccaccgggttttttcaacgcaccctgtcggatatcgctttcaagtttaatcgggatgattttaaaatgaaggtgcccgtgatcatgctgtcatccgtgcccgacctacacggatatattgacaagagccaactgacagaggatctgggtggtaccctggactattgtcacagtagatggctatgccaaaggacagccatcgagtcgtttgccctcatggtcaaacaaacagcccaaatgctgcagtcctttggaactgaattggctgaaactgagctccccaatgatgtgcaaagtacctcttccgttctgtgtgcccacacggagtag

SEQ ID NO: 42400 - DNA, 3378 bp, Artificial Sequence
  derived and/or modified sequence
atgcggttctggctgcggaccgaggagatggccctggaggagatggtgcagcgcctcaatgccgtgagtaagcatactgacgagataatgcaccaggatattgtgcccttgtgcgcagcagacattcaggatcagttgaagaagcgctttgcgtatctgtccggcgggcgcggacaagacgggtcccctgtcataacatttcctgactaccctgcttttagtgagatacccgacaaggagttccagaatgtcatgacgtatctgacctctatcccttccctgcaagacgccggcattggctttatccttgtaattgatcgcagacgggataaatggacgtccgttaaggcctcagttctgcggatcgccgcaagctttcctgctaatctgcaactggttctggttcttcgtcctacagggttctttcagcgcactttgtcagatatcgcctttaaattcaatcgggacgatttcaagatgaaagtgccagtcattatgctaagttcggtccccgacttgcacggctacattgataaatctcaactcacggaggacctcggcggtactttggattattgtcacagtagatggctgtgccaaaggaccgctattgagtcttttgcactcatggtcaagcagaccgcacaaatgctgcagagcttcggaaccgaactcgcggaaactgaactacccaacgacgtacagtcaacttcgtccgtcctctgtgcacatactgagaagaaggataaagcaaaagaggacttgaggttagccctcaaagaaggccacagcgtgttagagagcctgagagagctgcaggctgaggggagcgaacctagcgtgaatcaagaccagctggacaatcaagctactgtgcaacgattgctggcccagctcaatgaaacagaagcagccttcgacgaattttgggcaaagcatcagcagaagctagagcaatgcctccaattacgccactttgagcagggattccgtgaggtgaaggccatactagacgcggcctcacaaaagatagccacctttaccgacatagggaattccttggctcatgtcgagcatctgcttcgggatcttgcttctttcgaagaaaagtctggcgtggccgtggagcgcgcccgggccctgtctctggatggcgaacagctgataggcaataaacactatgccgttgactccatccggcccaagtgccaggaactgaggcatctctgtgaccaatttagtgcagagattgccaggagaaggggcctcctgtctaagtcactcgaattacacaggagactcgaaacaagtatgaaatggtgcgacgagggcatctacctgctagcctcccagccagtcgacaagtgccagtcacaggatggcgcagaggccgcattgcaggagattgaaaagttcctggagacaggcgctgaaaataaaatccaggagctcaacgcgatctacaaagaatacgaatccatcctgaaccaagacttgatggagcacgtccggaaagtgtttcagaagcaagcctcaatggaagaagtctttcatcgcagacaggcaagcctcaagaagctcgccgcaagacaaacacgcccagtacagccagttgctccacgccccgaagccttggccaagtccccgtgcccatcccctggaatccgtcggggaagcgagaactcatcaagcgaagggggcgctctgagaaggggcccataccgccgcgcgaaatccgagatgtccgaatcccgccaaggacggggaagtgcaggcgaggaggaggaatctctggcaatactgcgcaggcacgtgatgagcgagttgctggacacggagcgcgcctacgtggaggagcttctatgcgtgctggaaggatacgccgcagagatggataatcccctgatggcacacctcctatctacaggcctgcacaataagaaagacgtgttgttcggtaacatggaggagatctaccacttccacaacagaatttttctgagggaactggaaaattatactgattgcccggaattggtcgggcggtgcttcctagagagaatggaagatttccaaatctacgagaagtattgccagaacaagccacgctctgaaagcctttggaggcagtgttcagactgccctttcttccaggagtgtcaacggaaactggaccacaagctgagtttggactcttacctgctcaaacctgtacaacgcatcaccaaataccagctgcttctgaaagagatgctgaagtactcccggaattgtgaaggcgcggaggatctgcaggaagctctaagcagcatacttgggatcctcaaagcggtcaatgattctatgcatctgatagccattaccggttatgacggtaacctaggtgacctcggcaagctgctaatgcagggttcattttctgtatggactgaccacaagaggggtcatacaaaggtgaaggaactggcccggtttaagcccatgcagaggcaccttttcctgcacgagaaggcagtccttttctgtaagaagcgggaggaaaacggcgagggttatgaaaaggcaccatcgtattcctataagcagtccctcaatatggcagccgttggaatcaccgagaatgttaagggagatgcaaagaaatttgaaatttggtataatgcaagggaggaagtgtatattgtgcaggcacccacccccgaaattaaggccgcgtgggttaatgaaatccgtaaagtgcttacatcacaacttcaggcatgtcgggaggccagtcaacatcgggctttggagcagtcccagtctttgcctcttcctgctcccacgagcaccagcccatcaagaggaaattcaagaaatattaagaagttagaggaaagaaagaccgaccccctgagtctcgaagggtatgtgtcaagtgccccgctcaccaagcccccagagaaggggaaaggatggtctaagacctcacactcactcgaggcccctgaagacgacggcggttggtcctccgccgaagagcagatcaattcttcagatgcagaggaagacgggggactgggccccaaaaagttggtacctggaaagtacacagtggtagccgatcacgagaaaggggggcctgacgctctgagagtccggagtggagatgtcgtggaattagtgcaagagggagatgaggggctctggtacgtgagagatccaacaacaggcaaggaggggtgggttccagctagcagtttgtctgtcagactgggcccgtccggcagcgcccagtgcctgagtagttccgagtcgtccccagggtcagccgtgctctcgaattcctcctcttgcagtgagggaggccaagcacccttcagtgacctgcaagggtag

SEQ ID NO: 42401 - DNA, 741 bp, Artificial Sequence
  derived and/or modified sequence
atgcgtttctggctgcggactgaggagatggcactcgaggaaatggtgcagcgcctgaacgccgtgtccaaacacactgacgagatcatgcatcaggatatcgtccccttgtgtgcggctgacatccaggaccaactgaagaaaagatttgcctacctttcagggggacgtggccaggacgggtccccagttatcaccttccccgactatccagctttttccgagatccctgataaggagttccagaatgtgatgacatacctgacctcaattcccagtctgcaggatgcaggcattggcttcatcctggtgatagatcggcgaagagataaatggacttccgtaaaggcctccgtgctgaggattgcggcaagcttccccgcaaaccttcaattggtgctggttttacgcccaacaggcttctttcaacgcaccttatcagatattgctttcaagttcaaccgcgacgatttcaagatgaaagttcctgtgattatgttaagttcggttccggatctgcatggctacatcgataaatctcagctcacagaagatcttggagggacacttgattattgccactcaagatggctttgccagagaacagctattgagtcctttgctctaatggtgaagcagactgcgcaaatgctccaaagtttcgggaccgaattggctgagaccgagctcccgaatgatgtgcagtctacctcctcagtcttgtgtgctcatactgagtag

SEQ ID NO: 42402 - DNA, 3378 bp, Artificial Sequence
  derived and/or modified sequence
atgcgcttttggcttcgcaccgaagaaatggccctcgaggaaatggtgcagagactgaacgcagtgagcaagcacacagatgagattatgcatcaggacatcgtgcctttgtgcgctgctgacatccaggaccagctaaaaaaacggtttgcatacttgagcggaggtagaggccaggacggctcacctgtgattacatttcctgactaccccgcatttagcgaaattcccgacaaggagttccagaacgtgatgacgtatctgacatcaatcccaagcctacaggacgcgggaataggattcatcttggtcatcgaccgccgtcgcgacaagtggacaagtgtgaaagcctctgttctgcgcatagcggcaagctttccagccaatttgcagctggtattagtgctgcgcccaaccgggttttttcagcgtaccctctcagatattgcctttaagtttaacagggacgatttcaagatgaaggtgccagtcatcatgttatcttccgtgccagatcttcacggctacatagataaatcccagctgaccgaggacttgggaggaaccctagattattgtcattcccgatggctctgccagaggacagccattgaatcctttgcattgatggttaaacagacagctcagatgctgcaaagcttcggaacagagctggccgagacagaactcccaaatgacgtccagagcaccagctctgtgctttgtgcccacacagaaaagaaagataaagctaaagaggaccttagacttgcgttgaaagaggggcattctgtgttggagagcctgagggagctgcaagcagaaggatccgaaccatccgtgaaccaggatcaactggataaccaagcgactgtgcaacgcttactagctcaattgaatgaaacagaggccgcattcgatgagttttgggccaagcatcagcaaaaattggagcagtgcttgcagttgcgtcactttgagcagggcttcagagaggtgaaagctatcctcgatgccgcttcccaaaaaattgccacattcaccgacattggaaatagcctggctcacgtggagcacttgctgagggatctggccagctttgaggagaagagcggagtggcagttgagcgcgctagggccctgtccttagacggagaacagctgattggcaacaagcattacgccgtggacagtattcgcccaaagtgtcaggaattacggcacttatgtgaccagttctccgccgagatcgcacgcaggcggggattgctgagcaagtctttggagctccatcgcagactggagacatccatgaagtggtgcgatgaaggtatttaccttctggcaagccagcctgttgataaatgccaatctcaggatggggctgaggccgcactgcaggagatcgagaaattcctggaaaccggggcagagaataagatccaggagctcaacgcaatctataaagaatacgaaagcatattgaaccaggaccttatggagcacgtgagaaaggtgttccaaaagcaggctagcatggaggaggtatttcataggaggcaggcaagcttaaaaaagttggccgcaagacagacacggcctgttcagccggtcgcacctaggcccgaggccctcgcaaagtccccatgtccatccccagggataaggcgtgggagtgaaaatagtagcagtgagggcggtgcgctccgaagaggcccttacaggagagccaagagtgagatgagtgaaagtcggcagggaagaggcagcgccggagaagaggaggaatcattggctattctgcgtcggcacgttatgtcagagctgctggataccgagcgagcatacgtcgaagagctcctatgcgtactggagggttacgctgcagaaatggacaatccactaatggcacatcttttgagtacgggtctgcataataaaaaggatgttctttttggcaatatggaggagatttaccattttcataacagaatttttcttcgggagcttgagaactacacagattgtcccgagctagtgggtcgctgtttcctggagcggatggaggacttccaaatttatgaaaaatactgccagaacaaaccacgttccgagtccctttggagacagtgcagtgattgcccatttttccaggaatgtcaaaggaagcttgaccacaagctgtctctggactcttacctcctgaaaccagtgcagaggatcaccaagtaccagttgctgctcaaggagatgctgaaatacagcagaaactgtgaaggcgctgaagacctgcaggaggcactgtcatccattttgggaattcttaaggccgtcaatgattctatgcacctgatcgccatcaccggctacgatggcaaccttggggacctaggcaaactgttgatgcaagggagcttttccgtgtggaccgatcacaagcgaggccacaccaaagtaaaggaattggccagatttaaacctatgcaacgtcatctcttcctgcatgagaaggctgttctgttctgcaaaaaaagagaggagaacggggaggggtacgaaaaggccccatcctacagttacaagcaatcccttaatatggctgccgtgggtataacagaaaatgtgaaaggtgacgcgaagaagtttgaaatttggtacaacgctcgggaagaggtttatattgtgcaagctcctactccggagatcaaagccgcttgggtgaacgagattcgaaaggtcctgacctcacagctgcaggcttgcagagaggcttcacagcatagagcacttgaacagtctcagtccctccctctccccgctcccacgtctacttccccatcacgagggaattccaggaatatcaagaaattggaggaacgtaagactgaccctctctccctggaaggctacgtgtccagcgctcctctgactaaaccgccagagaaggggaaagggtggtccaaaacttcgcatagtcttgaagcccctgaggatgatgggggatggtcctccgcagaagagcaaatcaacagttctgatgccgaggaggacggtgggctaggtcctaagaagctcgtgccaggtaagtatactgtggttgccgatcatgaaaaggggggacctgatgccctgagggtccgttcgggggacgtagtggagcttgttcaggaaggcgacgaagggctgtggtacgtgagggacccaacaacagggaaagaaggctgggtgcccgcaagcagcctgtcagttcgactgggcccatccggcagtgctcagtgtcttagttcgtcagagtctagccccggaagcgccgtactgagcaactctagctcatgttccgaagggggacaggcacccttctccgatctgcagggctag

SEQ ID NO: 42403 - DNA, 741 bp, Artificial Sequence
  derived and/or modified sequence
atgagattctggctgagaaccgaggagatggccctggaggagatggtgcagagactgaacgccgtgagcaagcacaccgacgagatcatgcaccaggacatcgtgcccctgtgcgccgccgacatccaggaccagctgaagaagagattcgcctacctgagcggcggcagaggccaggacggcagccccgtgatcaccttccccgactaccccgccttcagcgagatccccgacaaggagttccagaacgtgatgacctacctgaccagcatccccagcctgcaggacgccggcatcggcttcatcctggtgatcgacagaagaagagacaagtggaccagcgtgaaggccagcgtgctgagaatcgccgccagcttccccgccaacctgcagctggtgctggtgctgagacccaccggcttcttccagagaaccctgagcgacatcgccttcaagttcaacagagacgacttcaagatgaaggtgcccgtgatcatgctgagcagcgtgcccgacctgcacggctacatcgacaagagccagctgaccgaggacctgggcggcaccctggactactgccacagcagatggctgtgccagagaaccgccatcgagagcttcgccctgatggtgaagcagaccgcccagatgctgcagagcttcggcaccgagctggccgagaccgagctgcccaacgacgtgcagagcaccagcagcgtgctgtgcgcccacaccgagtag

SEQ ID NO: 42404 - DNA, 3378 bp, Artificial Sequence
  derived and/or modified sequence
atgagattctggctgagaaccgaggagatggccctggaggagatggtgcagagactgaacgccgtgagcaagcacaccgacgagatcatgcaccaggacatcgtgcccctgtgcgccgccgacatccaggaccagctgaagaagagattcgcctacctgagcggcggcagaggccaggacggcagccccgtgatcaccttccccgactaccccgccttcagcgagatccccgacaaggagttccagaacgtgatgacctacctgaccagcatccccagcctgcaggacgccggcatcggcttcatcctggtgatcgacagaagaagagacaagtggaccagcgtgaaggccagcgtgctgagaatcgccgccagcttccccgccaacctgcagctggtgctggtgctgagacccaccggcttcttccagagaaccctgagcgacatcgccttcaagttcaacagagacgacttcaagatgaaggtgcccgtgatcatgctgagcagcgtgcccgacctgcacggctacatcgacaagagccagctgaccgaggacctgggcggcaccctggactactgccacagcagatggctgtgccagagaaccgccatcgagagcttcgccctgatggtgaagcagaccgcccagatgctgcagagcttcggcaccgagctggccgagaccgagctgcccaacgacgtgcagagcaccagcagcgtgctgtgcgcccacaccgagaagaaggacaaggccaaggaggacctgagactggccctgaaggagggccacagcgtgctggagagcctgagagagctgcaggccgagggcagcgagcccagcgtgaaccaggaccagctggacaaccaggccaccgtgcagagactgctggcccagctgaacgagaccgaggccgccttcgacgagttctgggccaagcaccagcagaagctggagcagtgcctgcagctgagacacttcgagcagggcttcagagaggtgaaggccatcctggacgccgccagccagaagatcgccaccttcaccgacatcggcaacagcctggcccacgtggagcacctgctgagagacctggccagcttcgaggagaagagcggcgtggccgtggagagagccagagccctgagcctggacggcgagcagctgatcggcaacaagcactacgccgtggacagcatcagacccaagtgccaggagctgagacacctgtgcgaccagttcagcgccgagatcgccagaagaagaggcctgctgagcaagagcctggagctgcacagaagactggagaccagcatgaagtggtgcgacgagggcatctacctgctggccagccagcccgtggacaagtgccagagccaggacggcgccgaggccgccctgcaggagatcgagaagttcctggagaccggcgccgagaacaagatccaggagctgaacgccatctacaaggagtacgagagcatcctgaaccaggacctgatggagcacgtgagaaaggtgttccagaagcaggccagcatggaggaggtgttccacagaagacaggccagcctgaagaagctggccgccagacagaccagacccgtgcagcccgtggcccccagacccgaggccctggccaagagcccctgccccagccccggcatcagaagaggcagcgagaacagcagcagcgagggcggcgccctgagaagaggcccctacagaagagccaagagcgagatgagcgagagcagacagggcagaggcagcgccggcgaggaggaggagagcctggccatcctgagaagacacgtgatgagcgagctgctggacaccgagagagcctacgtggaggagctgctgtgcgtgctggagggctacgccgccgagatggacaaccccctgatggcccacctgctgagcaccggcctgcacaacaagaaggacgtgctgttcggcaacatggaggagatctaccacttccacaacagaatcttcctgagagagctggagaactacaccgactgccccgagctggtgggcagatgcttcctggagagaatggaggacttccagatctacgagaagtactgccagaacaagcccagaagcgagagcctgtggagacagtgcagcgactgccccttcttccaggagtgccagagaaagctggaccacaagctgagcctggacagctacctgctgaagcccgtgcagagaatcaccaagtaccagctgctgctgaaggagatgctgaagtacagcagaaactgcgagggcgccgaggacctgcaggaggccctgagcagcatcctgggcatcctgaaggccgtgaacgacagcatgcacctgatcgccatcaccggctacgacggcaacctgggcgacctgggcaagctgctgatgcagggcagcttcagcgtgtggaccgaccacaagagaggccacaccaaggtgaaggagctggccagattcaagcccatgcagagacacctgttcctgcacgagaaggccgtgctgttctgcaagaagagagaggagaacggcgagggctacgagaaggcccccagctacagctacaagcagagcctgaacatggccgccgtgggcatcaccgagaacgtgaagggcgacgccaagaagttcgagatctggtacaacgccagagaggaggtgtacatcgtgcaggcccccacccccgagatcaaggccgcctgggtgaacgagatcagaaaggtgctgaccagccagctgcaggcctgcagagaggccagccagcacagagccctggagcagagccagagcctgcccctgcccgcccccaccagcaccagccccagcagaggcaacagcagaaacatcaagaagctggaggagagaaagaccgaccccctgagcctggagggctacgtgagcagcgcccccctgaccaagccccccgagaagggcaagggctggagcaagaccagccacagcctggaggcccccgaggacgacggcggctggagcagcgccgaggagcagatcaacagcagcgacgccgaggaggacggcggcctgggccccaagaagctggtgcccggcaagtacaccgtggtggccgaccacgagaagggcggccccgacgccctgagagtgagaagcggcgacgtggtggagctggtgcaggagggcgacgagggcctgtggtacgtgagagaccccaccaccggcaaggagggctgggtgcccgccagcagcctgagcgtgagactgggccccagcggcagcgcccagtgcctgagcagcagcgagagcagccccggcagcgccgtgctgagcaacagcagcagctgcagcgagggcggccaggcccccttcagcgacctgcagggctag

SEQ ID NO: 42405 - protein, 585 aa, Artificial Sequence
  derived and/or modified sequence
MGQGDESERIVINVGGTRHQTYRSTLRTLPGTRLAWLAEPDAHSHFDYDPRADEFFFDRHPGVFAHILNYYRTGKLHCPADVCGPLYEEELAFWGIDETDVEPCCWMTYRQHRDAEEALDSFGGAPLDNSADDADADGPGDSGDGEDELEMTKRLALSDSPDGRPGGFWRRWQPRIWALFEDPYSSRYARYVAFASLFFILVSITTFCLETHERFNPIVNKTEIENVRNGTQVRYYREAETEAFLTYIEGVCVVWFTFEFLMRVIFCPNKVEFIKNSLNIIDFVAILPFYLEVGLSGLSSKAAKDVLGFLRVVRFVRILRIFKLTRHFVGLRVLGHTLRASTNEFLLLIIFLALGVLIFATMIYYAERIGAQPNDPSASEHTHFKNIPIGFWWAVVTMTTLGYGDMYPQTWSGMLVGALCALAGVLTIAMPVPVIVNNFGMYYSLAMAKQKLPKKKKKHIPRPPQLGSPNYCKSVVNSPHHSTQSDTCPLAQEEILEINRADSKLNGEVAKAALANEDCPHIDQALTPDEGLPFTRSGTRERYGPCFLLSTGEYACPPGGGMRKDLCKESPVIAKYMPTEAVRVT

SEQ ID NO: 42406 - DNA, 1758 bp, Artificial Sequence
  derived and/or modified sequence
atggggcagggagatgagagcgagcgcatcgtcatcaatgtggggggaacccgacatcagacctatcgatctacacttaggaccctgcccggtactcgactggcatggctggcggagcccgacgcccactcccactttgactatgatccccgagcagatgaattcttttttgacaggcatccaggagtgtttgcacacattcttaattactacagaaccggcaagctccactgccctgcagacgtgtgcggacctttgtacgaagaagaattggctttctggggcattgatgagaccgacgttgaaccctgctgctggatgacatacaggcaacacagggatgcggaagaagcactggactctttcggcggtgcgcccttggacaacagtgcagatgacgcggatgcagacggccccggagatagcggcgacggggaggacgaacttgagatgaccaagcgcctggccctcagtgactcccccgacggcaggccgggtggattctggagaaggtggcagcctagaatctgggccctgtttgaggacccgtatagctcacgttatgcacggtacgtggcctttgctagcttattttttatcctggtgtctatcactaccttctgccttgagacacatgagcgctttaatcccatagttaataagaccgagatcgagaatgtgaggaacggcacacaggtgcggtactatcgcgaagctgagacagaggcgttcttgacctatatagagggagtgtgcgtggtctggtttacctttgagttcctgatgagggttattttttgtcctaacaaggtggagttcatcaaaaatagtctcaacatcatagattttgttgccatcctgcctttttacttagaggtcggtcttagcggactcagctctaaagccgctaaagatgtgttgggtttcctacgagtggtcaggttcgtgcggattctgcgaattttcaagttgacacgacattttgtcgggctacgcgtgcttgggcatactctgcgggcatctaccaacgagtttctgctccttatcatattcttggcgctgggagtccttatctttgccacaatgatctattacgccgagcggatcggggctcagcctaacgatccgtccgcaagtgaacacactcactttaaaaatatccctataggattctggtgggccgtcgtgaccatgaccacattggggtacggggatatgtatccacagacttggtcaggtatgctggtgggggccctgtgtgccttagctggggtgcttaccattgcaatgccagtaccagttatagtcaacaactttggaatgtattactccctcgcaatggctaaacagaagctacccaagaagaaaaaaaaacatataccaaggcctcctcagctgggctcgccaaattattgcaaatcagtcgtgaacagtccacatcacagtacccagtccgatacctgccccctcgcccaggaagagattctagaaattaaccgtgcagactcaaagctgaacggggaggttgccaaggcggcactggctaatgaggattgtccccacatagatcaggcactcacgcccgacgaagggttacccttcactcgctccgggactagagagcgatatggaccatgtttcctactgtcaactggagaatacgcctgtccccccgggggcggtatgaggaaagatctctgcaaagagtccccagtgatcgcgaagtacatgccgaccgaggccgtgcgggtgacctag

SEQ ID NO: 42407 - DNA, 1758 bp, Artificial Sequence
  derived and/or modified sequence
atgggccagggagatgaaagtgagcgcatcgtcatcaacgtgggcggcaccaggcaccagacctaccgcagcaccctgcggaccctgcccggcacccggctggcctggctggccgagccagatgcccacagccactttgattatgaccccagggcagatgagttcttctttgacagacaccctggggtgtttgcccacatcctgaactactacagaacaggcaagctgcactgcccagcagatgtgtgtggccccctgtatgaggaggagctggccttctggggcattgatgaaacagatgtggagccctgctgctggatgacctaccggcagcacagagatgctgaggaggccctggacagctttggaggagcccccctggacaacagcgcagatgatgctgatgctgatggccctggggacagcggagatggagaagatgagctggagatgaccaagaggctggccctgagtgacagcccagatggccggcctgggggcttctggaggcgctggcagccccgcatctgggccctgtttgaggacccctacagcagccgctatgcccgctacgtggcctttgccagcctcttcttcatcctggtgtccatcaccaccttctgcctggagacccatgagcgcttcaaccccatcgtgaacaagacagaaattgaaaatgtgagaaatggcacccaggtgcgctactaccgggaggccgagacagaggccttcctgacctacatcgagggcgtgtgtgtggtgtggttcacctttgagttcctgatgagggtcatcttctgccccaacaaggtggagttcatcaagaacagcctgaacatcatcgactttgtggccatcctgcccttctacctggaggtgggcctgagcggcctgagcagcaaggccgccaaggatgtgctgggcttcctgcgggtggtgcgctttgtgcgcatcctgcgcatcttcaagctgaccaggcactttgtgggcctgcgggtgctgggccacaccctgcgggccagcaccaatgagttcctgctgctgatcatcttcctggccctgggcgtgctgatctttgccaccatgatctactatgcagagagaattggagcccagcccaatgaccccagcgccagcgagcacacccacttcaagaacatccccatcggcttctggtgggccgtggtgaccatgaccaccctgggctatggagacatgtacccccagacctggagcggcatgctggtgggcgccctgtgtgccctggccggcgtgctgaccatcgccatgcctgtgcctgtgattgtgaacaactttggcatgtactacagcctggccatggccaagcagaagctgcccaagaagaagaagaagcacatccccaggcctccccagctgggcagccccaactactgcaagtctgtggtgaacagcccccaccacagcacccagagcgacacctgccccctggcccaggaggagatcctggagatcaacagagctgacagcaagctgaatggagaggtggccaaggccgccctggccaatgaagactgcccccacatcgaccaggccctgaccccagatgagggcctgcccttcaccaggagcggcacccgggagagatatggcccctgcttcctgctgagcactggagaatatgcctgccccccaggcggcggcatgaggaaggacctgtgcaaggagagccctgtgattgccaagtacatgcccacagaagctgtgcgggtgacctag

SEQ ID NO: 42408 - DNA, 1758 bp, Artificial Sequence
  derived and/or modified sequence
atgggccagggcgacgagagcgagcggatcgtgatcaacgtgggcggtacaagacaccagacctatcgctccaccctgcggaccctgccaggcactaggctcgcttggttggctgagcctgacgcccactcccactttgactatgatccaagagccgatgaattcttttttgatcggcaccccggcgtctttgcacatatccttaattactatcgaaccggtaagctgcactgtccagccgatgtgtgtggtccactgtacgaagaagagcttgcgttttggggtatcgatgagacagacgtggaaccttgttgctggatgacatataggcagcacagagacgcagaggaagccctcgattcctttggcggggcaccgctggacaattccgcagatgatgccgacgccgatggccccggtgactctggagacggagaggacgaacttgaaatgactaagcgcctcgccctatccgactccccggatgggaggcccggcggattttggcggaggtggcaaccaaggatctgggccctcttcgaagatccatactcttccagatacgccaggtatgtggcctttgcaagtttgtttttcatcctggtttcaattaccacgttctgcctcgagacacatgagcgtttcaatcctatcgtcaacaaaacagagatcgagaatgtgaggaacggaacccaagtaaggtactatcgcgaggcagaaacagaagcctttctcacgtacatcgaaggcgtctgtgtggtatggtttaccttcgagttcctcatgcgggttattttctgcccaaacaaggttgagttcatcaaaaatagcctgaacatcatagattttgttgctattctgcccttctaccttgaggtgggactgagtggactgtcctctaaggctgccaaggacgttctcggtttcctgcgggtcgtccgattcgtacggatccttcgtatcttcaagttgaccaggcattttgtaggattgcgcgtcttgggtcacaccctgcgcgccagcacaaacgaatttctgctgctcattatttttctcgcactcggggttctgatttttgccacaatgatctactatgccgaacggatcggggcccagccaaatgaccctagtgccagtgagcatacccacttcaagaacattcccattggcttttggtgggccgtggtgactatgaccacactggggtacggagatatgtacccacagacatggtctggaatgctggtcggagcattatgtgcattagccggggtgctgactatcgcaatgcctgtgcccgtgatcgtgaataacttcgggatgtattactctctggccatggcaaagcagaaacttccaaaaaagaaaaagaagcacattccaaggcctcctcagcttgggtcccctaattactgcaagtctgtagttaattcccctcaccacagtacccagtctgatacatgtcctttggcccaggaagagatcctggagatcaatagagctgacagtaagttgaatggtgaagtggctaaagcggctctcgctaacgaggattgcccccatattgatcaagcacttacacctgatgagggcctgcccttcaccagatctggaacgagggagcgatacgggccctgcttcctgctgtctacaggtgagtatgcttgtccaccaggcggggggatgagaaaggatctgtgtaaagagtctcccgtgatcgccaagtacatgcccactgaggctgtgagggtgacttag

SEQ ID NO: 42409 - DNA, 3887 bp, Artificial Sequence
  derived and/or modified sequence
agcaagcggagcagcagcccgggcggcagcagcgtcgcggcggcggcggcagcggccgctccgcgcctcgcctcaccggcctcgctggcctcacctcgccgcgcccggacccgccacccccgcctccccgcccgacctccgcagcccccgtctcggccggcagcgcccaccgcctgcccgaagcgaggagcggagtgcggggcgcagaggcaccggagccagtgcccgccggccccgcaaatcaaacccagccaggagaacccccgcctggccccgtgcagctccgcgaccgccgggagctgtcccttcagcaccgccgcgggagcccaagtccgagcgcagcccagcggaaccccagctcgagcccgggctcacggagagcagcgctcggcgttagccgcacgagcaacaccccgggtgcccctgcccagggggcccgccatctcctccaggaggcggggagaaggaacgaggagggcgggcgggcaggcgggcccgccgccggggggagcaggcagccaagcaaggagagagggagggggccggagcccgccctgcgtcccgagctgcagcccggccacgcagggaggaaggcaggcggcatccatctcccccgcgccgagagcgcgccgcggcgaccacctcacagaggagcgcgaatttcccggccctgtctcctcccctccccctcctgggggctggcctctagtccggccccgggagcggctgacctttcccccaaaagctttgtgccgatttctccattttcccgcggagatggggacgggagcccggccccccaacccattttccccacctcccggggctcgctgctgagcccgcccccctccctctttccccctcactccctccctccctccctttctccctccctttctccctcccttctttcctcctctgcctcctccgctgccggaccagctccctcccacatctggctcctagagacccctgggatcccgcgcacattcccctggaccggcacccgacaaagcgcccggagaggcttggctcgctcgttggggtggccagagccgcaggcctctgttccccccgacggctggggggaggggggaagagggcgcgcgcccccctccccggcgccaactccccctggcggccgctcccatgggtgtcgctgggccgcgccatgcctaagggggcgccgcgatgggccaaggggacgagagcgagcgcatcgtgatcaacgtgggcggcacgcgccaccagacgtaccgctcgaccctgcgcacgctgcccggcacgcggctcgcctggctggcggagcccgacgcccacagccacttcgactatgacccgcgtgctgacgagttcttcttcgaccgccaccccggcgtcttcgcgcacatcctgaactactaccgcacgggcaagctgcactgcccagccgacgtgtgcgggccgctctacgaggaggagctggccttctggggcatcgacgagaccgacgtggagccctgctgctggatgacgtaccgccagcaccgcgacgccgaggaggctctggacagcttcggcggcgctcctctggacaacagcgccgacgacgcggacgccgacggccctggcgactcgggcgacggcgaggacgagctggagatgaccaagcgcctggcgctcagtgactccccggatggccggcctggcggcttttggcgccgctggcagccgcgcatctgggcgctcttcgaggacccgtactcgtcccgctacgcgcggtatgtggccttcgcttccctcttcttcatcctggtctccatcaccaccttctgcctggagacccacgagcgcttcaaccccatcgtgaacaagacggagatcgagaacgttcgcaatggcacgcaagtgcgctactaccgggaggccgagacggaggccttccttacctacatcgagggcgtctgtgtggtctggttcaccttcgagttcctcatgcgtgtcatcttctgccccaacaaggtagagttcatcaagaactcgctcaacatcattgactttgtggccatcctgcccttctacctggaggtggggctgagcggcctgtcctccaaggcagccaaggacgtgctgggcttcctgcgcgtcgtccgcttcgtgcgcatcttgcgcatctttaagctgacccgccactttgtgggcctgcgggtcctgggccacacgctccgagccagcaccaacgagttcctgctgctcatcatcttcctggccttgggcgtgctgatcttcgccaccatgatctactacgccgagaggataggggcacagcccaatgaccccagcgccagtgagcacacgcactttaagaacatccccatcggcttctggtgggccgtggtcaccatgacgaccctgggctatggagacatgtacccgcagacgtggtccggcatgctggtgggggctctgtgtgcgctggcgggcgtgctcaccatcgccatgcccgtgcccgtcatcgtgaacaatttcgggatgtattactccttagccatggctaagcagaaactaccaaagaaaaaaaagaagcatattccgcggccaccgcagctgggatctcccaattattgtaaatctgtcgtaaactctccacaccacagtactcagagtgacacatgtccgctggcccaggaagaaattttagaaattaacagagcagattccaaactgaatggggaggtggcgaaggccgcgctggcgaacgaagactgcccccacatagaccaggccctcactcccgatgagggcctgccctttacgcgctcgggcacccgcgagagatacggaccctgcttcctcttatcaaccggggagtacgcgtgcccacctggtggaggaatgagaaaggatctttgcaaagaaagccctgtcattgctaagtatatgccgacagaggctgtgagagtgacttgaccaggcggcttggccgaggacactggtggctattaagcatctgggtggacctgcagcccctcctcaccctcggacagagtaaattcacgccatgcaggtttgccggacgagtccgagtggcccaggcattgtactaggacggacgtagctttttctacggccaaatggtaactgaccgtagaggatttcttttccttcttttcattttttaaaattttattttatttggggagggggggtggaggggctccttagcatgacttgcatgaagttaaacagaaaacccagcaaaccaaacccaccaaccccctgcaactgtatgattaccctgaacaacaataatgaaaagaaaaacatcaaagccctctattttctttcaaagctcttgactttcacacacgttgttggagccaaactgtaacggcgttcagtagaaacctgtacatttctgggggtgaggggcgaggggaggagggacagagatggggaatggattgcttcctttttgtacacaagatcaagaggaaagcttccaaaaagggcagtcggtcagtcatcggtcatattgacctcaccttcatagttcatctctcacgtggaaactgagaactttgctccaaatagaattgtggaaactcgcacggctgccttcttccccgtttggcatgcttgtgacccagcggatgtctccccaagacccctgacagcagctagtctaggttgattctctcatcttatcggtgtgtagatccagtgtgaccaactttcataacaaattgttcatagtaaataatcaccaccgtatggattttccaagtgttccattaaaaccaggatgtagagcaccaaaagatcaggaccacgggaggagcagcctcctccacctttactaaggcacaacctggcattgtatgcaatttagtacttcagagtaaaaa

SEQ ID NO: 42410 - DNA, 1758 bp, Artificial Sequence
  derived and/or modified sequence
atgggacagggtgatgagagtgagaggatcgtcatcaatgtgggcggtacaaggcaccagacttacaggtccaccctcaggaccctgcccggtaccaggctcgcctggttggcggagcccgacgctcactctcacttcgactacgacccgcgtgccgacgaattcttcttcgatcgccaccctggcgtgttcgcacacatcctaaactactaccgcaccggcaagttacattgccccgctgacgtgtgtggacccttatatgaggaggaactggcattttggggcatcgatgaaaccgatgtcgagccttgctgttggatgacctaccgtcagcaccgggacgctgaggaggccctcgactcatttggcggagctccactagataatagcgcagatgacgccgatgctgatgggcctggcgatagcggagatggggaggacgaactggaaatgacaaagcgcctggcattgagcgacagcccggacggtcgcccaggtggattttggagacgctggcagccgaggatctgggcattattcgaagatccttacagttcccgctacgcgcgatacgtagcgtttgccagtctgttctttatactggttagtatcactacattctgtttggagacccatgagagatttaacccaattgtgaacaaaaccgaaatcgagaatgtcagaaatggtacgcaggtccgctactatagagaggccgaaaccgaggcctttctgacatatattgagggtgtatgcgtcgtgtggttcacctttgaattcttgatgcgggtaattttctgtccgaacaaagtggaatttattaaaaattccctcaacattattgacttcgtggccattttgcccttctacttggaagtgggcttatccggtctttcctcaaaagccgcaaaggacgtactcggctttttacgcgttgtccggtttgtgcgcatactgcggatcttcaagctaacccgccacttcgtgggcttaagggttctcggtcataccctacgggcttccaccaacgaatttctgttgctgattatatttctcgcacttggagtgctgatcttcgccacaatgatttactacgccgaacgcattggcgcacaacccaacgatcccagcgcaagtgagcatacacatttcaagaacatcccaattggcttctggtgggcggtagtcactatgaccacgctcggctatggtgatatgtacccgcagacgtggtccgggatgcttgtaggggctttatgcgccctggctggcgtcctcacgattgccatgcccgtgccagtcatcgtcaacaattttggcatgtactacagcttggccatggccaagcagaaactaccgaaaaagaagaagaagcacatccctcgacctcctcagctggggtctcctaattattgcaagagtgttgtaaatagtccccatcactcaactcagagtgatacctgcccgttagcccaagaggaaattttggagataaaccgcgctgattcaaagctgaatggcgaggtcgcaaaggctgccttggccaacgaggattgtcctcatatcgatcaggccctgactcccgacgaaggtttaccttttacaagatctggcacgagagaacggtacgggccatgtttcttactctccactggcgagtacgcatgtcctcccggtgggggtatgagaaaagacctttgcaaggaatctccagttatcgctaagtacatgcccacagaggccgtccgcgttacgtag

SEQ ID NO: 42411 - DNA, 1758 bp, Artificial Sequence
  derived and/or modified sequence
atgggccagggcgacgagagcgagagaatcgtgatcaacgtgggcggcaccagacaccagacctacagaagcaccctgagaaccctgcccggcaccagactggcctggctggccgagcccgacgcccacagccacttcgactacgaccccagagccgacgagttcttcttcgacagacaccccggcgtgttcgcccacatcctgaactactacagaaccggcaagctgcactgccccgccgacgtgtgcggccccctgtacgaggaggagctggccttctggggcatcgacgagaccgacgtggagccctgctgctggatgacctacagacagcacagagacgccgaggaggccctggacagcttcggcggcgcccccctggacaacagcgccgacgacgccgacgccgacggccccggcgacagcggcgacggcgaggacgagctggagatgaccaagagactggccctgagcgacagccccgacggcagacccggcggcttctggagaagatggcagcccagaatctgggccctgttcgaggacccctacagcagcagatacgccagatacgtggccttcgccagcctgttcttcatcctggtgagcatcaccaccttctgcctggagacccacgagagattcaaccccatcgtgaacaagaccgagatcgagaacgtgagaaacggcacccaggtgagatactacagagaggccgagaccgaggccttcctgacctacatcgagggcgtgtgcgtggtgtggttcaccttcgagttcctgatgagagtgatcttctgccccaacaaggtggagttcatcaagaacagcctgaacatcatcgacttcgtggccatcctgcccttctacctggaggtgggcctgagcggcctgagcagcaaggccgccaaggacgtgctgggcttcctgagagtggtgagattcgtgagaatcctgagaatcttcaagctgaccagacacttcgtgggcctgagagtgctgggccacaccctgagagccagcaccaacgagttcctgctgctgatcatcttcctggccctgggcgtgctgatcttcgccaccatgatctactacgccgagagaatcggcgcccagcccaacgaccccagcgccagcgagcacacccacttcaagaacatccccatcggcttctggtgggccgtggtgaccatgaccaccctgggctacggcgacatgtacccccagacctggagcggcatgctggtgggcgccctgtgcgccctggccggcgtgctgaccatcgccatgcccgtgcccgtgatcgtgaacaacttcggcatgtactacagcctggccatggccaagcagaagctgcccaagaagaagaagaagcacatccccagacccccccagctgggcagccccaactactgcaagagcgtggtgaacagcccccaccacagcacccagagcgacacctgccccctggcccaggaggagatcctggagatcaacagagccgacagcaagctgaacggcgaggtggccaaggccgccctggccaacgaggactgcccccacatcgaccaggccctgacccccgacgagggcctgcccttcaccagaagcggcaccagagagagatacggcccctgcttcctgctgagcaccggcgagtacgcctgcccccccggcggcggcatgagaaaggacctgtgcaaggagagccccgtgatcgccaagtacatgcccaccgaggccgtgagagtgacctag

SEQ ID NO: 42412 - protein, 968 aa, Artificial Sequence
  derived and/or modified sequence
MYNMRRLSLSPTFSMGFHLLVTVSLLFSHVDHVIAETEMEGEGNETGECTGSYYCKKGVILPIWEPQDPSFGDKIARATVYFVAMVYMFLGVSIIADRFMSSIEVITSQEKEITIKKPNGETTKTTVRIWNETVSNLTLMALGSSAPEILLSVIEVCGHNFTAGDLGPSTIVGSAAFNMFIIIALCVYVVPDGETRKIKHLRVFFVTAAWSIFAYTWLYIILSVISPGVVEVWEGLLTFFFFPICVVFAWVADRRLLFYKYVYKRYRAGKQRGMIIEHEGDRPSSKTEIEMDGKVVNSHVENFLDGALVLEVDERDQDDEEARREMARILKELKQKHPDKEIEQLIELANYQVLSQQQKSRAFYRIQATRLMTGAGNILKRHAADQARKAVSMHEVNTEVTENDPVSKIFFEQGTYQCLENCGTVALTIIRRGGDLTNTVFVDFRTEDGTANAGSDYEFTEGTVVFKPGDTQKEIRVGIIDDDIFEEDENFLVHLSNVKVSSEASEDGILEANHVSTLACLGSPSTATVTIFDDDHAGIFTFEEPVTHVSESIGIMEVKVLRTSGARGNVIVPYKTIEGTARGGGEDFEDTCGELEFQNDEIVKTISVKVIDDEEYEKNKTFFLEIGEPRLVEMSEKKALLLNELGGFTITGQPVFRKVHAREHPILSTVITIADEYDDKQPLTSKEEEERRIAEMGRPILGEHTKLEVIIEESYEFKSTVDKLIKKTNLALVVGTNSWREQFIEAITVSAGEDDDDDECGEEKLPSCFDYVMHFLTVFWKVLFAFVPPTEYWNGWACFIVSILMIGLLTAFIGDLASHFGCTIGLKDSVTAVVFVALGTSVPDTFASKVAATQDQYADASIGNVTGSNAVNVFLGIGVAWSIAAIYHAANGEQFKVSPGTLAFSVTLFTIFAFINVGVLLYRRRPEIGGELGGPRTAKLLTSCLFVLLWLLYIFFSSLEAYCHIKGF

SEQ ID NO: 42413 - DNA, 2907 bp, Artificial Sequence
  derived and/or modified sequence
atgtacaacatgagaagactgagcctgagccccaccttcagcatgggcttccacctgctggtgaccgtgagcctgctgttcagccacgtggaccacgtgatcgccgagaccgagatggagggcgagggcaacgagaccggcgagtgcaccggcagctactactgcaagaagggcgtgatcctgcccatctgggagccccaggaccccagcttcggcgacaagatcgccagagccaccgtgtacttcgtggccatggtgtacatgttcctgggcgtgagcatcatcgccgacagattcatgagcagcatcgaggtgatcaccagccaggagaaggagatcaccatcaagaagcccaacggcgagaccaccaagaccaccgtgagaatctggaacgagaccgtgagcaacctgaccctgatggccctgggcagcagcgcccccgagatcctgctgagcgtgatcgaggtgtgcggccacaacttcaccgccggcgacctgggccccagcaccatcgtgggcagcgccgccttcaacatgttcatcatcatcgccctgtgcgtgtacgtggtgcccgacggcgagaccagaaagatcaagcacctgagagtgttcttcgtgaccgccgcctggagcatcttcgcctacacctggctgtacatcatcctgagcgtgatcagccccggcgtggtggaggtgtgggagggcctgctgaccttcttcttcttccccatctgcgtggtgttcgcctgggtggccgacagaagactgctgttctacaagtacgtgtacaagagatacagagccggcaagcagagaggcatgatcatcgagcacgagggcgacagacccagcagcaagaccgagatcgagatggacggcaaggtggtgaacagccacgtggagaacttcctggacggcgccctggtgctggaggtggacgagagagaccaggacgacgaggaggccagaagagagatggccagaatcctgaaggagctgaagcagaagcaccccgacaaggagatcgagcagctgatcgagctggccaactaccaggtgctgagccagcagcagaagagcagagccttctacagaatccaggccaccagactgatgaccggcgccggcaacatcctgaagagacacgccgccgaccaggccagaaaggccgtgagcatgcacgaggtgaacaccgaggtgaccgagaacgaccccgtgagcaagatcttcttcgagcagggcacctaccagtgcctggagaactgcggcaccgtggccctgaccatcatcagaagaggcggcgacctgaccaacaccgtgttcgtggacttcagaaccgaggacggcaccgccaacgccggcagcgactacgagttcaccgagggcaccgtggtgttcaagcccggcgacacccagaaggagatcagagtgggcatcatcgacgacgacatcttcgaggaggacgagaacttcctggtgcacctgagcaacgtgaaggtgagcagcgaggccagcgaggacggcatcctggaggccaaccacgtgagcaccctggcctgcctgggcagccccagcaccgccaccgtgaccatcttcgacgacgaccacgccggcatcttcaccttcgaggagcccgtgacccacgtgagcgagagcatcggcatcatggaggtgaaggtgctgagaaccagcggcgccagaggcaacgtgatcgtgccctacaagaccatcgagggcaccgccagaggcggcggcgaggacttcgaggacacctgcggcgagctggagttccagaacgacgagatcgtgaagaccatcagcgtgaaggtgatcgacgacgaggagtacgagaagaacaagaccttcttcctggagatcggcgagcccagactggtggagatgagcgagaagaaggccctgctgctgaacgagctgggcggcttcaccatcaccggccagcccgtgttcagaaaggtgcacgccagagagcaccccatcctgagcaccgtgatcaccatcgccgacgagtacgacgacaagcagcccctgaccagcaaggaggaggaggagagaagaatcgccgagatgggcagacccatcctgggcgagcacaccaagctggaggtgatcatcgaggagagctacgagttcaagagcaccgtggacaagctgatcaagaagaccaacctggccctggtggtgggcaccaacagctggagagagcagttcatcgaggccatcaccgtgagcgccggcgaggacgacgacgacgacgagtgcggcgaggagaagctgcccagctgcttcgactacgtgatgcacttcctgaccgtgttctggaaggtgctgttcgccttcgtgccccccaccgagtactggaacggctgggcctgcttcatcgtgagcatcctgatgatcggcctgctgaccgccttcatcggcgacctggccagccacttcggctgcaccatcggcctgaaggacagcgtgaccgccgtggtgttcgtggccctgggcaccagcgtgcccgacaccttcgccagcaaggtggccgccacccaggaccagtacgccgacgccagcatcggcaacgtgaccggcagcaacgccgtgaacgtgttcctgggcatcggcgtggcctggagcatcgccgccatctaccacgccgccaacggcgagcagttcaaggtgagccccggcaccctggccttcagcgtgaccctgttcaccatcttcgccttcatcaacgtgggcgtgctgctgtacagaagaagacccgagatcggcggcgagctgggcggccccagaaccgccaagctgctgaccagctgcctgttcgtgctgctgtggctgctgtacatcttcttcagcagcctggaggcctactgccacatcaagggcttctag

SEQ ID NO: 42414 - DNA, 2907 bp, Artificial Sequence
  derived and/or modified sequence
atgtacaacatgagacggctttcactttcgccaaccttctccatgggcttccaccttttggtgacagtctcactgttattttcccacgtggaccatgttatcgctgagacagagatggaaggcgagggtaacgaaaccggcgagtgcaccggctcttattactgcaagaaaggggtgatcctccccatctgggaacctcaagacccctccttcggcgataaaattgctcgggctacagtgtatttcgtggccatggtctacatgtttttgggggtgagcatcattgctgatagattcatgtccagcattgaggtaatcactagccaagagaaggagattacaatcaaaaaacctaatggagagacaactaaaactactgtgcggatctggaatgagactgttagcaatctgaccctcatggccctgggtagctcagcccctgagatccttctgtctgtcattgaggtgtgcgggcacaatttcactgcgggcgatcttggcccttcgaccatagttggctctgccgcttttaacatgtttattataatcgccctttgcgtttacgtcgtccctgacggcgagacacggaaaataaaacacctacgcgtgttctttgtcactgccgcctggagtatttttgcttacacttggctgtacataatcttgagcgtgatctcgcctggcgtggttgaggtatgggaggggctcctgacgtttttcttctttccaatttgcgtcgtgttcgcatgggttgcggatcgcagattgctattttataaatatgtctataaacgctaccgggctggaaagcagcgaggcatgatcattgagcacgagggcgacaggccatccagcaagacagagattgaaatggatggcaaggtcgttaacagtcacgtcgaaaactttctcgatggcgctctggttctggaagtcgacgaaagggatcaggacgacgaggaggcacggagagagatggctaggattcttaaggaattgaagcagaagcatccagacaaggaaattgaacagctcatagaactggcaaactatcaggttttgagccaacagcagaaatctcgcgccttttaccggatccaagccacccgccttatgaccggtgccggtaacattctgaagcgacacgccgctgatcaggcacggaaggctgtgagcatgcatgaagtaaacaccgaagtcactgaaaatgatcctgtcagcaaaatcttttttgaacaagggacttatcagtgtctggaaaactgtggtaccgtagcactgactattattcgcagaggtggtgacttgacgaatacagtctttgtggactttcgcacagaggacggcacggctaatgccgggagtgactacgagtttacggaggggacagtggtgtttaagccgggtgacacccaaaaggaaatcagggtggggattattgatgacgacatatttgaggaggatgagaacttcttggtgcatctcagcaatgttaaggtgagttccgaagcctcagaagacggtattctggaggctaaccacgtgtccactctggcttgtttggggagcccatccactgccacggtgacgatcttcgatgacgaccacgccgggattttcacattcgaagaaccagtaactcacgtatccgagtccataggaataatggaagtgaaagtgttacggacaagtggtgccagagggaacgtcattgtgccttacaagaccatcgagggcacggccagaggaggcggtgaggactttgaggacacatgcggagagttggaatttcagaacgatgaaatagttaagaccatttccgtcaaggttatcgacgacgaggaatacgagaaaaataagactttcttcttagaaattggggagcccaggctggttgagatgtccgagaagaaggcacttctgctaaatgaattgggagggttcacaatcactggccagcctgtctttagaaaggtgcacgctcgggagcacccgatcctgagtaccgtgatcacaatcgctgacgaatacgatgacaagcagcctctcaccagcaaggaggaagaagaaaggcgtatagccgagatgggcaggcccatcttaggtgagcatactaagttagaggtcattatcgaagagagttatgaatttaagtccactgtggacaaactcatcaagaaaaccaatctagccttggtggtgggcaccaacagctggagagagcagtttattgaggccatcacagtatcagccggggaggacgacgacgatgacgagtgcggagaagaaaaactaccatcatgcttcgactatgttatgcatttcttgaccgttttttggaaggtactctttgcattcgtaccaccaactgagtactggaatggatgggcctgcttcattgtcagtattctgatgatcggcctcttgacagcgttcatcggagacctggctagccattttggatgtaccatcggcttgaaggacagcgtaacagctgttgtgttcgtcgccctggggacgtccgtaccggacacctttgcatctaaagtggctgccacccaggaccagtacgccgacgcttccatcggtaatgtcaccggttcaaatgcagtgaacgtgttccttggtatcggtgtcgcgtggagcatagcggccatttatcatgctgctaatggggaacaattcaaggtgagcccgggaacacttgcctttagcgtgaccctgttcacaatctttgccttcataaatgtcggggtgctgctctaccggaggaggccagaaattggcggggagctgggcgggccacggaccgcgaaacttctaacctcttgtctcttcgtgctgctctggcttctgtacatcttcttcagtagtttagaagcttactgccacattaagggattctag

SEQ ID NO: 42415 - DNA, 2907 bp, Artificial Sequence
  derived and/or modified sequence
atgtacaacatgaggaggctcagcctttccccaaccttttcaatgggtttccatctactggtaacagtgagcctgctgttctctcatgtcgatcatgtcatcgctgagactgagatggagggtgaaggtaatgaaacaggagagtgtacaggaagctactactgcaagaagggtgttatcctgcctatatgggagccgcaggaccctagttttggtgacaaaattgctcgcgctaccgtgtactttgtagccatggtttatatgtttctgggagtctctattatcgcggacagattcatgtctagtatcgaggtcataactagccaggagaaggagatcacaatcaagaagccgaacggggaaacaactaagaccacggttcggatttggaatgagacagttagcaacttgactctgatggcgctggggtcaagcgcccctgaaatcttgttgagcgttatcgaggtatgcgggcataactttacggccggagatctggggccgagcaccatagttggatcagcggccttcaacatgtttataatcatcgcgctttgtgtgtacgtggttcctgatggggaaacaagaaagatcaaacatctgcgcgtgttcttcgtgaccgccgcttggtcaattttcgcctacacctggctgtatatcatactcagcgtgattagccctggagtggttgaagtgtgggagggcctattaacattcttctttttccccatatgtgtcgtgtttgcatgggtagccgaccgccgcctcctgttttataagtacgtctataagcgctaccgggccggcaagcaacgaggcatgatcatcgagcatgagggagatcgcccctcctcaaagacagagattgaaatggatggtaaggtggttaatagccacgtcgaaaacttcctggatggagctctggttctggaagttgacgagcgggaccaggatgacgaggaagcccgtagggagatggctcggatcttgaaagagttaaaacaaaaacaccctgacaaggaaatcgagcagttgatagagctcgccaattaccaagtcctgagccagcaacagaagtcccgggccttctaccgcatccaggcaacgcggctgatgacaggggcaggcaatatccttaaaaggcacgcggcagaccaggcccggaaggccgtgagcatgcatgaggtcaacacggaagtcaccgagaacgatcctgttagcaagatcttcttcgagcagggcacttatcagtgtcttgaaaattgcggcactgtggctttgacaattattcgcaggggtggagacctgaccaacacagtttttgtcgattttcggacagaggatggcacagccaatgccgggagtgattatgaatttactgaggggaccgttgtctttaaacccggcgatacccagaaagaaattagagtggggatcattgatgacgatatcttcgaggaggacgagaactttctggtacatctctccaatgttaaggtgtcatccgaagctagcgaggatggaattcttgaggctaaccatgtgagcactctagcctgcctgggaagcccatctacagccactgtgaccatttttgatgatgaccacgcagggatctttacattcgaggaaccagtcacacatgtatcggaatcaattgggattatggaggtgaaggtcttacggacttcaggcgcgcggggaaacgtcattgtaccttataagactatagagggtactgctcgagggggaggcgaggacttcgaggacacatgcggcgagctggaatttcagaacgatgagatcgtcaaaacaatatccgtcaaagtaattgacgatgaggagtatgagaagaacaaaacctttttcctggagattggagagccaaggcttgtggaaatgagcgagaagaaagcgctgctgctgaacgagctcggaggctttacgatcactggccagcccgtgttccgcaaggtccatgcccgggaacaccccatccttagcacggtcataacaattgctgacgaatatgatgataagcaaccactaacgtctaaggaggaggaggagaggcggatcgccgaaatggggagacctatcttaggcgagcatactaagttggaagtgattatcgaagagtcctatgagttcaaatctaccgtggacaagctgattaagaagacaaacctggctcttgtcgtgggaaccaattcttggcgggagcaattcattgaggctattacagtgtctgctggcgaagatgatgatgacgacgagtgcggagaggagaaacttccttcttgcttcgactatgtcatgcactttctcacagtgttctggaaagtgttgtttgcatttgtcccacccactgaatattggaacggctgggcatgttttattgtctccattctgatgatcggtttgctgactgcgttcatcggggaccttgccagccactttggctgcaccatcggattaaaggatagcgtaactgctgtggtttttgtcgcgctcggcaccagcgttcctgatacctttgcatcaaaagttgctgctacccaggaccaatatgccgatgcatctatcggtaacgttaccgggagtaacgcagtgaacgtgttcctgggcattggggtggcttggagcattgccgccatataccatgccgcaaacggcgaacagttcaaggtgagccccggtacattagcctttagcgtcaccctgttcactatattcgccttcattaacgtcggagtcctgctgtacaggcgccggccagaaataggtggggagctgggcggccccagaactgcgaaactgctaacctcctgcttattcgtgttgttatggctactgtatattttcttctcgtccctggaggcttactgccatattaagggattctag

SEQ ID NO: 42416 - DNA, 2907 bp, Artificial Sequence
  derived and/or modified sequence
atgtacaacatgaggcggctgagcctgagccccaccttctccatgggcttccacctgctggtgacagtgtccctgctcttcagccacgtggaccacgtgattgctgagacagagatggagggggagggcaatgagaccggggagtgcaccggcagctactactgcaagaagggcgtcatcctgcccatctgggagccccaggaccccagctttggagacaagatcgcccgggccaccgtgtactttgtggccatggtgtacatgttcctgggcgtgtccatcatcgctgaccgcttcatgagcagcattgaagtcatcaccagccaggagaaggagatcaccatcaagaagcccaatggagagaccaccaagaccaccgtgcgcatctggaatgaaacagtgagcaacctgaccctgatggccctgggcagcagcgcccctgagatcctgctgagcgtcatcgaggtgtgtggccacaacttcaccgctggggacctgggccccagcaccatcgtgggcagcgctgccttcaacatgttcatcatcatcgccctgtgtgtgtatgtggtgcctgatggagagaccaggaagatcaagcacctgcgggtcttctttgtgacagctgcctggagcatctttgcctacacctggctgtacatcatcctgagcgtcatcagccctggggtggtggaggtgtgggagggcctgctgaccttcttcttcttccccatctgtgtggtgtttgcctgggtggccgaccggcggctgctcttctacaagtatgtgtacaagcgctaccgggccggcaagcagaggggcatgatcatcgagcacgagggggaccggcccagcagcaagacagaaattgagatggatggcaaggtggtgaacagccacgtggagaacttcctggatggagccctggtgctggaggtggatgagcgggaccaggatgatgaggaggcccggcgggagatggcccgcatcctgaaggagctgaagcagaagcacccagacaaggagattgagcagctgattgagctggccaactaccaggtgctgagccagcagcagaagagccgggccttctaccgcatccaggccacccggctgatgactggagctggcaacatcctgaagagacatgctgctgaccaggccaggaaggctgtgtccatgcatgaggtgaacacagaggtgacagaaaatgaccctgtgtccaagatcttctttgagcagggcacctaccagtgcctggagaactgtggcaccgtggccctgaccatcatcagaagaggaggagacctgaccaacacagtgtttgtggacttcagaacagaagatggaacagccaatgccggcagtgactatgagttcacagagggcaccgtggtgttcaagccaggggacacccagaaggagatccgggtgggcatcattgatgatgacatctttgaagaagatgagaacttcctggtgcacctgagcaatgtgaaggtgagcagcgaggcctctgaagatggcatcctggaggccaaccacgtgtccaccctggcctgcctgggcagccccagcacagccaccgtgaccatctttgatgatgaccatgctggcatcttcacctttgaggagcctgtgacccacgtgtctgagagcatcggcatcatggaggtgaaggtgctgcggaccagcggggcccggggaaatgtgattgtgccctacaagaccatcgagggcacagcccggggcggcggggaggactttgaggacacctgtggggagctggagttccagaatgatgagatcgtgaagaccatctctgtgaaggtgattgatgatgaggagtatgagaagaacaagaccttcttcctggagatcggggagccccggctggtggagatgtctgagaagaaggccctgctgctgaatgagctgggcggcttcaccatcaccggccagcccgtcttcaggaaggtgcacgcccgggagcaccccatcctgagcaccgtcatcaccatcgcagatgaatatgatgacaagcagcccctgaccagcaaggaggaggaggagaggagaattgctgagatgggccggcccatcctgggggagcacaccaagctggaggtgatcatcgaggagagctatgagttcaagagcacagtggacaagctgatcaagaagaccaacctggccctggtggtgggcaccaacagctggagggagcagttcatcgaggccatcaccgtgtctgctggagaagatgatgatgatgatgaatgtggggaggagaagctgcccagctgctttgattatgtgatgcacttcctgactgtgttctggaaggtgctgtttgcctttgtgcccccaacagagtactggaatggctgggcctgcttcatcgtgtccatcctgatgattggcctgctgacagccttcatcggggacctggccagccacttcggctgcaccatcggcctgaaggacagcgtgacagctgtggtgtttgtggccctgggcacctctgtgcctgacacctttgccagcaaggtggccgccacccaggaccagtatgcagatgccagcattggaaatgtgacaggcagcaatgctgtgaatgtgttcctgggcattggagtggcctggagcattgctgccatctaccacgccgccaatggagagcagttcaaggtgtccccaggcaccctggccttctctgtgaccctcttcaccatctttgccttcatcaacgtgggcgtgctgctgtacagaagaagacctgagatcggcggggagctgggcggccccaggacagccaagctgctgaccagctgcctgtttgtgctgctgtggctgctgtacatcttcttcagcagcctggaggcctactgccacatcaagggcttctag

SEQ ID NO: 42417 - DNA, 2907 bp, Artificial Sequence
  derived and/or modified sequence
atgtacaacatgcggcggctgagcctgagccccaccttcagcatgggttttcatctcctcgtaacagtatcccttctgttctcccatgtggatcatgtcattgccgaaaccgaaatggagggggagggcaatgaaacaggtgaatgcacgggatcatattattgcaagaagggagtgattctacccatttgggagccacaggaccccagtttcggcgacaagatagcccgtgcaaccgtgtactttgtggccatggtgtatatgtttctgggcgtgtcgatcatcgccgataggttcatgagtagcatagaagtgatcacgtcccaagagaaagagatcacaatcaaaaaacccaatggtgagactactaaaaccacagtcagaatatggaacgaaactgtttcgaatctcaccttgatggcactgggaagctccgcaccagagatcttgctgtccgtgatagaagtgtgcggccataactttacagcaggcgacctgggaccctccacaattgtgggcagtgctgcgtttaacatgtttattatcatagctctgtgcgtgtacgtggttccagatggcgagactaggaaaatcaaacatctgagggtttttttcgtgaccgcagcatggtcaatctttgcctacacatggctctatatcattctgagcgtgatctctcccggggtggtggaggtgtgggagggcttgttaacattctttttctttccaatctgcgttgtttttgcatgggtcgctgataggcgactgctgttctacaagtatgtgtacaaacgttaccgcgccggcaaacaacgaggaatgattatcgagcacgaaggcgaccggccttcatctaagacggaaattgaaatggatggtaaggtggttaactcgcatgtggaaaactttcttgatggcgctcttgttttggaagtggacgaacgagatcaggacgacgaagaagcacgaagagagatggctaggatcctgaaggagttgaaacaaaaacatcctgacaaagagatcgaacagctcattgagctggccaactatcaggttctctcacaacagcagaaatctcgcgccttctaccgaatacaggctacccgccttatgaccggagccggtaacatcctcaaacgccacgccgccgatcaggcccgaaaagctgttagtatgcacgaagttaacacagaagtgacggagaacgacccagtttccaaaatcttctttgagcaaggcacataccaatgtctcgagaactgcggcacagtggctctgactatcatccgccgggggggagatctgactaacacggtgttcgtagattttcgcacagaggacggaactgccaacgccggttccgattatgagtttaccgagggcacggttgtcttcaagccaggtgatacccagaaagaaattagggtggggataatcgatgatgatattttcgaagaggacgagaacttcctggtacacctctctaacgtcaaagtgtcctcggaagccagtgaggacggaattctggaggcgaatcacgtcagcactttggcctgtcttggttcccccagcaccgcaacagtcacgatttttgacgacgaccacgcaggcattttcaccttcgaggagccagtgacccacgtatccgagtcgatcggaatcatggaggtgaaagtactgaggacctcaggggcccgcggcaacgtcatcgtaccttataagaccattgaggggactgctcgaggcggaggcgaagacttcgaggacacttgtggtgaactggaatttcagaacgacgagattgtaaaaaccatctcagtcaaagtcattgacgatgaggagtatgaaaagaacaagacattcttcctcgaaatcggagaaccacgcctggtggagatgagcgagaagaaggctttattgctgaatgaactaggggggttcacaataaccggacagcccgtgttccgaaaagttcacgcccgggaacatccaattctttccaccgttatcactatcgccgatgagtacgatgacaagcagccattgaccagcaaggaagaagaggagcgacgcattgccgagatgggaaggccaatactgggagagcatacaaagctggaggtaatcatcgaggaatcctatgagtttaaatccacagtggacaagctgatcaaaaagactaatctcgctctggtggtgggcaccaattcctggagagagcagtttatcgaggctatcactgtaagcgcgggagaagacgatgacgatgacgagtgcggggaggaaaaactcccatcctgtttcgattacgttatgcactttcttacggtgttttggaaagtgttattcgcattcgttccccccacggaatattggaacggatgggcctgctttattgtgagcatactgatgattggactgttgacagcctttattggtgaccttgcatcccacttcggctgtaccatcggcctgaaagacagtgtgaccgctgttgtgttcgtggcacttggaaccagtgtgcccgacacattcgctagcaaggtcgccgccacccaggaccagtatgctgacgcaagcatcggcaatgtcactggctctaacgccgttaacgtcttcctggggatcggagtggcctggtcaatcgccgcaatttaccatgccgctaacggcgagcagttcaaggtgtccccagggacgctcgccttttcggtcaccttattcaccatcttcgcctttatcaatgtgggtgtgcttctctatagacgccgcccggagataggcggggaactcggaggtccccgtactgctaagctgttaacctcctgcttatttgtcctgctctggctgctatacattttttttagctctctggaggcgtattgtcatattaagggcttctag

SEQ ID NO: 42418 - DNA, 2907 bp, Artificial Sequence
  derived and/or modified sequence
atgtacaacatgcggcggctgagcctgagccccaccttcagcatgggattccacctgctcgtaaccgtcagccttctgttcagccatgttgaccacgtgatcgccgagaccgagatggagggtgagggtaatgagaccggcgagtgcaccgggagctactattgcaaaaagggcgttatcttaccgatttgggaaccacaggacccctcattcggtgacaagattgctcgggccacggtttactttgtggccatggtatacatgttcctgggtgtgagtattatcgccgataggttcatgagctcaattgaggttatcacgtcccaggaaaaggagattaccatcaagaagccaaatggggagaccacgaaaaccactgttagaatctggaacgagacagtcagtaatctcacacttatggctctcggatcatccgcacccgagatcctgctgtccgtcatagaggtctgtggacacaattttaccgctggagatctgggcccatccacaattgtggggtcagccgcctttaatatgttcatcatcatagctttgtgtgtgtacgtagtgcctgacggggaaactcgaaagatcaagcacctgcgggtctttttcgtgacggcagcctggagtatattcgcgtacacttggctgtatatcattctgtccgtcataagtcccggtgtggtggaagtgtgggagggattgctaacttttttctttttccctatctgcgtggtgttcgcctgggtcgcagatcggaggcttctgttttacaaatatgtttataagagatatcgtgccgggaagcaaagggggatgatcattgagcacgagggcgacaggccgtccagcaagactgaaatagagatggatggcaaggtggttaatagtcatgtcgagaattttctcgatggagccctggtactggaggtcgacgagcgggaccaggacgacgaggaagcacgtagagaaatggctaggattttgaaggaattaaagcagaagcatcccgacaaagagattgagcagttgatcgaactcgccaactaccaggtcctgagccaacagcagaaaagtagggccttttaccggatccaggctactcgactgatgaccggtgctgggaacattctgaagcgtcacgctgccgaccaggctagaaaagctgtctcaatgcacgaagtgaacacagaagttacagagaacgaccccgtgtcgaagattttctttgaacagggcacataccagtgtttggaaaactgcggaactgtggctttgaccatcataaggaggggtggtgacctgactaatactgtatttgtcgattttaggaccgaggatggaacagctaacgccggtagcgactacgaattcaccgaaggaaccgtagtattcaaacccggagacacacaaaaagagatccgcgtgggaattatcgatgatgacatttttgaggaagatgagaattttcttgtgcacctgagtaatgtcaaagtctcaagtgaggcctccgaagacggaatcttggaagctaaccacgtgagcaccttggcttgtctgggcagcccttcgacagctactgtcaccattttcgatgacgatcacgcggggatatttacctttgaagagcctgtgacgcacgttagcgaatcgattggaatcatggaagtcaaggtgttgcgtacctccggagcccgagggaatgtaattgttccctacaaaactattgaagggacagccaggggcgggggggaagatttcgaggatacttgcggcgaacttgagtttcagaatgacgaaatcgtgaagaccatttcagtgaaggtgatcgacgacgaggagtacgaaaagaataagaccttctttctcgaaatcggcgaacctagactggtggaaatgtctgaaaaaaaagctctgctgctgaacgagctcggaggattcacaatcacagggcagccagtattccgcaaggtgcatgctcgagaacacccgattttaagcacggtgatcacaattgctgatgagtacgacgacaaacaaccactgacgagcaaagaagaagaggaacgaaggatcgccgagatgggccggccgatactcggagagcatactaaattagaagtaatcatagaagagtcttacgagtttaagagcactgttgataagctcattaaaaaaactaatcttgcattggttgtcggaactaatagctggcgagagcagttcattgaggcaattacagtatcagctggcgaggatgatgatgacgacgaatgtggcgaagagaaactccccagctgtttcgattacgtaatgcactttctgaccgttttctggaaggtgctgttcgcctttgtgccccctactgaatattggaacggctgggcctgttttattgttagcattctgatgattggactgttaacagcctttatcggtgacttggcctcccactttggctgtacaatcggattgaaagacagtgtgaccgcagtggtcttcgtcgctcttgggacatccgtgcctgatacctttgcatccaaagtagcagccacacaggaccagtatgctgatgcttccatcggaaatgtgaccggctccaacgctgtaaatgtattcctgggcattggggttgcctggtccatagctgctatttaccacgccgccaacggagaacagtttaaggtgtcgcccgggaccctcgcattttcggtcactctctttaccatatttgcattcataaacgttggcgttctactctacaggcgccgccctgaaataggcggtgagctgggcggccccagaacggctaaactgcttacatcatgtctttttgtactgttgtggttgttatacatattcttctctagcctggaagcttattgccacatcaaggggttctag

SEQ ID NO: 42419 - DNA, 2907 bp, Artificial Sequence
  derived and/or modified sequence
atgtataacatgcggagattgtccctgtctcctaccttctccatgggctttcatctgctcgttaccgttagcttgttattcagccacgttgatcatgtcatagcggagactgaaatggaaggcgaagggaacgagaccggcgagtgtaccgggtcatattactgcaaaaaaggggtcattctgccaatttgggagccgcaagacccaagctttggagacaagatcgcccgtgctacggtgtactttgtcgccatggtctatatgttccttggtgtttccatcatagctgataggtttatgtcttcaatagaggtcattacttctcaggagaaggaaatcacaatcaaaaaacctaacggggaaacaaccaagaccacggtccggatttggaatgagacagtaagtaacctgacattgatggctctaggttccagtgcccctgagattttgctttctgtaatcgaagtgtgtggacacaactttaccgctggcgatttaggcccatcaacaatcgtaggcagtgctgccttcaatatgtttattatcatagctctttgcgtctatgtagtgcccgacggcgagacaagaaagattaagcacctgcgggtgttcttcgtaactgccgcatggtccatattcgcttatacgtggttgtacattattctctccgtaatctcaccaggggtagtagaggtgtgggagggcctactgacctttttcttcttccccatctgcgtcgtatttgcctgggtcgccgacagacggctgctgttttacaagtatgtttacaaaaggtaccgcgcaggcaaacaacgcggaatgattatcgaacatgagggagacagaccatcatccaagactgaaatagaaatggacgggaaggtagtgaactcgcacgttgaaaactttttggatggagcactggtacttgaggtggacgaacgggatcaggacgacgaagaagcaaggcgggagatggccaggatacttaaagagctaaagcagaagcacccagataaagagatcgaacagctgattgagttggccaattaccaagtcctgtcacagcagcaaaagagccgagcattctaccggatccaagccacaaggctgatgacgggtgcgggaaacattttgaaacgacacgctgcagatcaggcaagaaaagccgtgagtatgcacgaagtaaatactgaggtgacggagaacgacccagtgagtaaaattttctttgagcaaggcacgtatcaatgccttgagaattgtggcacagtggcgcttacgataatcaggcgcggtggggacctaacgaacaccgtgtttgttgattttcggacagaggacggcaccgccaatgcagggtccgactatgagtttaccgaagggacagtagtttttaagcctggggatacacagaaggaaatcagagttggtatcatcgatgacgatatttttgaagaagacgaaaacttcctggtgcacctgagcaatgtcaaggtgtcctccgaagccagcgaggatggcatacttgaagctaatcacgtctccaccctggcctgtttgggaagtccctcgacagctacagtcaccatcttcgatgacgaccacgctgggatcttcactttcgaagaacccgtgacccacgtcagcgagagtattggaatcatggaagtaaaagtactgaggacatctggtgccagaggcaatgttattgtcccgtacaaaactattgagggaacagctcgcggaggcggagaggactttgaagatacatgtggggaacttgaatttcagaacgacgagatagtcaaaaccatttccgtcaaggtgatcgatgatgaagagtatgaaaagaataagaccttcttcctggagatcggcgaacctcggctggtcgagatgtctgaaaaaaaggcccttctgcttaacgaactgggcggatttacaatcaccggacaaccagtctttcgaaaagtccatgcgagggaacaccccattctgtcaactgtgataaccattgcagacgagtacgatgataaacagccattgaccagtaaggaggaggaagagcggagaattgctgaaatgggcaggcccatacttggcgaacatacaaaacttgaggttattattgaggagagctatgagttcaaaagcacagtggataaactgattaaaaagactaatcttgccctggtggtgggcactaactcctggcgagaacagtttattgaagcaatcacagtgtccgccggagaagacgatgacgacgatgagtgtggtgaagagaagctgccctcatgtttcgactacgtgatgcacttcctgaccgtgttttggaaggtgttgttcgcatttgtcccgcctacagagtactggaacggatgggcatgcttcattgtgtccatattaatgattggcctcctaaccgcttttattggggacctggcgagccatttcggctgcaccattgggctaaaggacagtgttaccgccgttgtgttcgtagcactgggaacaagtgtccccgacactttcgccagtaaagtcgccgctactcaagaccaatacgccgacgcttccatcggaaatgtcaccggcagtaacgcggtcaacgtgtttctggggatcggggttgcttggtcaatagccgctatctatcatgccgcaaatggcgagcagtttaaagtgtcacccggaacgcttgcgttctccgtgacactctttaccatcttcgccttcattaacgtgggcgtgctgctgtatagaagacggccagagattgggggagagcttggcggaccacgtacggctaaacttcttaccagttgtctatttgttctcttgtggctgttgtacattttttttagcagcctcgaggcctactgtcacatcaagggattttag

SEQ ID NO: 42420 - DNA, 2907 bp, Artificial Sequence
  derived and/or modified sequence
atgtacaacatgcggaggctgtcactcagccccaccttttctatgggctttcatctgctggttaccgtcagccttctgttcagccacgttgatcacgtcatagcggaaactgagatggaaggcgaaggaaacgagacaggggaatgcaccggaagttactactgcaaaaagggcgtgatactgccgatatgggagcctcaggaccctagcttcggcgacaagatcgctagagctacagtttattttgtcgctatggtctatatgttcctgggcgtgtcgataatcgccgatcgcttcatgagcagcatcgaagtgataacaagtcaggaaaaagagatcacgatcaaaaaacctaacggagagaccacaaaaacgacagtgagaatctggaacgaaaccgtgtcaaatctaactctaatggccctgggctcatctgcgccagaaatcctcctgtccgtcattgaagtctgcggccacaatttcacagctggggacctagggccaagcaccatagtgggtagcgcagctttcaatatgtttatcatcattgccctgtgtgtgtacgtggtgcccgatggggagacccggaagataaaacatttgcgcgttttttttgttacagccgcttggtccatattcgcctacacctggctatatattattctctccgtgattagcccaggagtggtcgaggtttgggagggccttctcactttctttttctttcccatctgcgttgtcttcgcctgggtggcagatagacgcctgcttttttacaaatacgtgtataagagatacagggccggaaaacagcggggtatgatcattgagcacgagggtgaccgcccatcaagcaaaacagagattgaaatggatggaaaagttgttaatagccacgtggaaaacttccttgacggcgctttggtgctggaagtcgatgagagagaccaggatgatgaggaagctaggcgcgagatggctcgaattctgaaggagcttaagcaaaagcatcctgacaaagaaattgaacagttaattgaactcgccaactatcaagtcctctcacagcagcaaaagagccgtgccttctataggatccaagccacacgtctcatgacaggagcgggaaacatcctgaagagacacgccgctgaccaagctcgtaaagccgtatcaatgcatgaggtgaacacagaggttactgagaacgaccccgtttccaagatcttctttgaacagggaacatatcagtgcctagagaactgcggaactgtggctctgaccatcattaggcgaggcggagatctcacgaacacagtgttcgtcgatttccgcactgaggatggaaccgcaaatgccggttccgactacgagtttacagaaggcacagttgtgtttaaacccggtgatacgcagaaggaaataagggttggaattattgatgatgacattttcgaagaagatgaaaacttccttgttcacctaagtaacgttaaggtctcttcagaggcatccgaggatggcatactggaggcaaatcacgtcagtaccttggcatgtttgggatctccttccaccgctacagtcacaatttttgatgacgaccacgctgggatcttcacctttgaagaaccggtgactcacgtgagcgaaagtattggaattatggaagtgaaggttttgcgtacatccggcgcacgtgggaacgtcattgtgccatataagaccattgaaggaaccgctcgcggtgggggagaggattttgaggatacgtgcggcgaactagaatttcaaaatgacgagatcgtcaaaactatctcagttaaggtgatagatgatgaggaatacgaaaagaacaagacattctttctggagattggagaaccccgactggtggaaatgagcgagaagaaggcactacttctgaacgagctaggcggatttacaataacgggccagccagtctttcgcaaagtgcacgcacgcgagcaccccatcttgagcactgtgatcacaatagccgacgagtatgacgacaagcagcccctcaccagtaaggaggaggaggagcggaggatcgctgaaatgggcaggcctatcctcggcgagcacactaagttggaagttattatcgaggagagctacgaatttaaatcgactgtcgacaaactgatcaagaagactaacctcgccctggtggtcggcaccaacagttggagagagcaattcatagaagccatcaccgtgtcagcgggtgaagatgacgacgatgatgagtgcggtgaagagaagctgccaagttgttttgattatgtaatgcactttctgaccgtattctggaaagtattatttgccttcgtgccacctactgagtactggaacggttgggcttgttttatcgtcagtatcctgatgattgggttattgacagccttcatcggggacttggccagccacttcggttgcaccatcggcctgaaggatagcgtaacagctgtggttttcgtggccttgggcacttcagtcccagacacttttgcttcgaaggtcgctgctacccaggatcagtacgccgacgccagcatcggcaacgtcacaggaagcaatgcagtcaacgtgtttctgggtatcggagtcgcttggtcaattgcagcgatataccacgccgcaaacggtgaacagttcaaggtctctcccggaacattggctttctcggtgactctcttcactattttcgcctttatcaatgtgggcgtgctgctttataggaggcgcccagagattggtggcgaattaggaggacccaggactgccaaactgctcactagctgtctgttcgtactgttgtggctactgtacatcttcttttcatctctagaagcctattgtcacattaaaggtttctag

SEQ ID NO: 42421 - DNA, 3139 bp, Artificial Sequence
  derived and/or modified sequence
taggttgtgacagttggaagtgtcatgtacaacatgcggcgattaagtctttcacccaccttttcaatgggatttcatctgttagttactgtgagtctcttattttcccatgtggaccatgtaattgctgagacagaaatggaaggagaaggaaatgaaactggtgaatgtactggatcatattactgtaagaaaggggtgattttgcccatttgggaaccccaagacccttcttttggggacaaaattgctagagctactgtgtattttgtggccatggtctacatgtttcttggagtctctatcatagctgatcggttcatgtcctctatagaagtcatcacatctcaagaaaaagaaataaccataaagaaacccaatggagagaccaccaagacaactgtgaggatctggaatgaaacagtttctaacctgaccttgatggccctgggatcttctgctcctgagattctcctttcagtaattgaagtgtgtggccataacttcactgcaggagacctcggtcctagcaccatcgtgggaagtgctgcattcaatatgttcatcattattgcactctgtgtttatgtggtgcctgacggagagacaaggaagattaagcatttgcgtgtcttctttgtgacagcagcctggagcatctttgcctacacctggctttacattattttgtctgtcatatctcctggtgttgtggaggtctgggaaggtttgcttactttcttcttctttcccatctgtgttgtgttcgcttgggtagcggataggagacttctgttttacaagtatgtctacaagaggtatcgagctggcaagcagagggggatgattattgaacatgaaggagacaggccatcttctaagactgaaattgaaatggacgggaaagtggtcaattctcatgttgaaaatttcttagatggtgctctggttctggaggtggatgagagggaccaagatgatgaagaagctaggcgagaaatggctaggattctgaaggaacttaagcagaagcatccagataaagaaatagagcaattaatagaattagctaactaccaagtcctaagtcagcagcaaaaaagtagagcattttatcgcattcaagctactcgcctcatgactggagctggcaacattttaaagaggcatgcagctgaccaagcaaggaaggctgtcagcatgcacgaggtcaacactgaagtgactgaaaatgaccctgttagtaagatcttctttgaacaagggacatatcagtgtctggagaactgtggtactgtggcccttaccattatccgcagaggtggtgatttgactaacactgtgtttgttgacttcagaacagaggatggcacagcaaatgctgggtctgattatgaatttactgaaggaactgtggtgtttaagcctggtgatacccagaaggaaatcagagtgggtatcatagatgatgatatctttgaggaggatgaaaatttccttgtgcatctcagcaatgtcaaagtatcttctgaagcttcagaagatggcatactggaagccaatcatgtttctacacttgcttgcctcggatctccctccactgccactgtaactatttttgatgatgaccacgcaggcatttttacttttgaggaacctgtgactcatgtgagtgagagcattggcatcatggaggtgaaagtattgagaacatctggagctcgaggaaatgttatcgttccatataaaaccatcgaagggactgccagaggtggaggggaggattttgaggacacttgtggagagctcgaattccagaatgatgaaattgtcaaaacaatatcagtcaaggtaattgatgatgaggagtatgagaaaaacaagaccttcttccttgagattggagagccccgcctggtggagatgagtgagaagaaagccctgttattgaatgagcttggtggcttcacaataacaggccaacctgtcttcaggaaggttcatgctagagaacatccgattctctctactgtaatcaccattgcagacgaatatgatgacaagcagccactgaccagcaaagaggaagaggagaggcgcattgcagaaatggggcgccccatcctgggagagcacaccaagttggaagtgatcattgaagaatcctatgaattcaagagtactgtggacaaactcattaagaagacaaacctggcccttgtggttgggactaacagctggagagaacagttcattgaagctatcactgtcagtgctggggaagatgatgacgacgatgaatgtggggaagagaagctgccctcctgtttcgattacgtgatgcactttctgactgtgttctggaaggtcctgtttgccttcgtcccccctactgaatactggaatggctgggcgtgtttcattgtctccatcctcatgattggcctactgacagctttcattggagacctggcttcccactttggctgcaccattggcctgaaagattctgtgactgcagtcgtgttcgtcgcacttggaacatcagtgccagacacatttgccagcaaagtggcagccacccaggaccagtatgcagacgcctccataggtaacgtcacgggcagcaacgcggtgaatgtcttcctgggaatcggtgtggcctggtccatcgctgccatctaccacgcagccaatggggaacagttcaaagtgtcccctggcacactagctttctctgtcactctcttcaccatttttgctttcatcaatgtgggggtgctgctgtatcggcggaggccagaaatcggaggtgagctgggtgggccccggactgccaagctcctcacatcctgcctctttgtgctcctatggctcttgtacattttcttctcctccctggaggcctactgccacataaaaggcttctaaaggaactatcagatatagtaaatttatatatatacatatatatacataaaaattatgtataatggacagaggaaactgacatttgtcatgttcacttacctgctgatggaatccagcttcaagagcatactctgtactagggccgaagtaaaaaaccatcacctcccattcccaggggcatcatcatgttcaacaaggcatggaggca

SEQ ID NO: 42422 - DNA, 6038 bp, Artificial Sequence
  derived and/or modified sequence
taggttgtgacagttggaagtgtcatgtacaacatgcggcgattaagtctttcacccaccttttcaatgggatttcatctgttagttactgtgagtctcttattttcccatgtggaccatgtaattgctgagacagaaatggaaggagaaggaaatgaaactggtgaatgtactggatcatattactgtaagaaaggggtgattttgcccatttgggaaccccaagacccttcttttggggacaaaattgctagagctactgtgtattttgtggccatggtctacatgtttcttggagtctctatcatagctgatcggttcatgtcctctatagaagtcatcacatctcaagaaaaagaaataaccataaagaaacccaatggagagaccaccaagacaactgtgaggatctggaatgaaacagtttctaacctgaccttgatggccctgggatcttctgctcctgagattctcctttcagtaattgaagtgtgtggccataacttcactgcaggagacctcggtcctagcaccatcgtgggaagtgctgcattcaatatgttcatcattattgcactctgtgtttatgtggtgcctgacggagagacaaggaagattaagcatttgcgtgtcttctttgtgacagcagcctggagcatctttgcctacacctggctttacattattttgtctgtcatatctcctggtgttgtggaggtctgggaaggtttgcttactttcttcttctttcccatctgtgttgtgttcgcttgggtagcggataggagacttctgttttacaagtatgtctacaagaggtatcgagctggcaagcagagggggatgattattgaacatgaaggagacaggccatcttctaagactgaaattgaaatggacgggaaagtggtcaattctcatgttgaaaatttcttagatggtgctctggttctggaggtggatgagagggaccaagatgatgaagaagctaggcgagaaatggctaggattctgaaggaacttaagcagaagcatccagataaagaaatagagcaattaatagaattagctaactaccaagtcctaagtcagcagcaaaaaagtagagcattttatcgcattcaagctactcgcctcatgactggagctggcaacattttaaagaggcatgcagctgaccaagcaaggaaggctgtcagcatgcacgaggtcaacactgaagtgactgaaaatgaccctgttagtaagatcttctttgaacaagggacatatcagtgtctggagaactgtggtactgtggcccttaccattatccgcagaggtggtgatttgactaacactgtgtttgttgacttcagaacagaggatggcacagcaaatgctgggtctgattatgaatttactgaaggaactgtggtgtttaagcctggtgatacccagaaggaaatcagagtgggtatcatagatgatgatatctttgaggaggatgaaaatttccttgtgcatctcagcaatgtcaaagtatcttctgaagcttcagaagatggcatactggaagccaatcatgtttctacacttgcttgcctcggatctccctccactgccactgtaactatttttgatgatgaccacgcaggcatttttacttttgaggaacctgtgactcatgtgagtgagagcattggcatcatggaggtgaaagtattgagaacatctggagctcgaggaaatgttatcgttccatataaaaccatcgaagggactgccagaggtggaggggaggattttgaggacacttgtggagagctcgaattccagaatgatgaaattgtcaaaacaatatcagtcaaggtaattgatgatgaggagtatgagaaaaacaagaccttcttccttgagattggagagccccgcctggtggagatgagtgagaagaaagccctgttattgaatgagcttggtggcttcacaataacaggccaacctgtcttcaggaaggttcatgctagagaacatccgattctctctactgtaatcaccattgcagacgaatatgatgacaagcagccactgaccagcaaagaggaagaggagaggcgcattgcagaaatggggcgccccatcctgggagagcacaccaagttggaagtgatcattgaagaatcctatgaattcaagagtactgtggacaaactcattaagaagacaaacctggcccttgtggttgggactaacagctggagagaacagttcattgaagctatcactgtcagtgctggggaagatgatgacgacgatgaatgtggggaagagaagctgccctcctgtttcgattacgtgatgcactttctgactgtgttctggaaggtcctgtttgccttcgtcccccctactgaatactggaatggctgggcgtgtttcattgtctccatcctcatgattggcctactgacagctttcattggagacctggcttcccactttggctgcaccattggcctgaaagattctgtgactgcagtcgtgttcgtcgcacttggaacatcagtgccagacacatttgccagcaaagtggcagccacccaggaccagtatgcagacgcctccataggtaacgtcacgggcagcaacgcggtgaatgtcttcctgggaatcggtgtggcctggtccatcgctgccatctaccacgcagccaatggggaacagttcaaagtgtcccctggcacactagctttctctgtcactctcttcaccatttttgctttcatcaatgtgggggtgctgctgtatcggcggaggccagaaatcggaggtgagctgggtgggccccggactgccaagctcctcacatcctgcctctttgtgctcctatggctcttgtacattttcttctcctccctggaggcctactgccacataaaaggcttctaaaggaactatcagatatagtaaatttatatatatacatatatatacataaaaattatgtataatggacagaggaaactgacatttgtcatgttcacttacctgctgatggaatccagcttcaagagcatactctgtactagggccgaagtaaaaaaccatcacctcccattcccaggggcatcatcatgttcaacaaggcatggaggcagggccatctttgcagctcagtctagaagggctgcactctctccaggttgataaatccttaaggctttgatttgttttgtttttggttttgttttcagtggagctggggaggtagttaatgtttggctttatttttgttattttgttttgttttgtttttttgggagagtcagggttgttgcttttctttgtggaaagtgaaaccatccaaatgtaaatgggttttggtaaaaatttaaatcattagtattccccctcacctcccccaatcactttaaaacttattttggattaagaaaaaatctgggcatggaagaagaaagaagcatgtcttcatcgtattaccaaagttcatgcttatctccggaatgtgagtggaggtgaagctgcctccaagaagaagcataaaagtggaatggagccaggaaatccgatggttctagaaatagtctgatatttaaacatgtgatacctggcagtctcgtttaacaggtacaaggaaaacgtgcctagattcccaggaacgtgcaaaatcctttctttcttatctctttagctctggactgtgattggcaaggtccttcttccagcattcagcccagctaagcccccaggtgccccatcccaaccctgttcctcctgtccacctgccatcccctatgcaaacagtaagaataaccccattcaaaaagcacatcatcgttttccatttgcattaacatgtgtctcagtcccatgttgccgttgcttgggattgtctgtcagttttattttcaaaggcatccatggcttgcacaatcctgttccagtcatgactgaacatttgctccttcttcatgtgccgttcggaaatgttgttgtgatacctgttacacagtgcatggtgaaaaacaaataaaacaaaacaaagagtatctgtatatagtagagtatagtacatactgttctcccatttggcaatgttgattggacattgaagacataagtgagttttcttttcacctgagttgttacttttgtgctgttattgagtttgattaattactagggataaaaggagaaaatggattattgttcacggttctgcacattcatttctaagaagcaataactgtcatgtggggagaagttaaagctattgagaggatagcaggcaaactacaaagatcttcatggaaaattagccatgtggaacacatcagaggcctctaaaaatcacccattaattcaggaaggccaaggagaaaggccttatagagacgttgatatgttggatgtgcctaggctttcagagccaccctttccacaacacccctccctgcaaagtatttatttcacatctgcactgtctggcacagatggtagatagtgctggtttgttcattttatttttttacttaaaaggctattttgagccctgtttctttcactgtccagtctagtcctctttgattatatcagtagttgctgagtaagaaagaagccagggtgaccaacgggcctttaaaagtgttgtctcctctacttatgctgaaagagaaggcaattaaataagactagtacctcccaggaggattggactgggatatttttaaccctttaaaaagaatagctgtttctatgttaaaataccaaagaacatggataaacccaacattccaaagtagtgagtccactaatgagaaaaataatagaatgactttggtcacctctcggagacttctgtgtctataaggaatcccaggctggagacattcctagccctctgtattgattcaaaaatacttaataaattaaagctgttgagacttattttttcttctgtcactcagtaaccatgatccttcctcatttaataaacatttggtgactgaatgagtaattaaatgctggttacccacttaatgtgccaggtagtatgatactttctggggactaagccatgaacaaaacagtctagatccctgccctcagaagggttacagtttatgtgattactattttcatgagtaaaagtgaagaaagccatatggaaagatttttatcttgcaagaaaaaacaattatgaaactcttttaacataaacacactgaaactgtatcaaagcaattgtccaaattgtatttatacccaagaatttctttaactaagagagcataaggcatatgtttggaaaaccaccctctttatctttgaccgacttgcagataaatatatctctccattttaaaccaagaagggcaatcatgttggtgatccagatcactgagaaagcccagtgtatcccatcttttatctttgttggcaatggaacttttctatggcccacactttacaattctttgtcattctaacccatccttcccatccttattttttttttttttgagaattgctaaatggaaagctagcctagaagcaccaagtaaatatattcaaggaatataagttgtttaaacattagaaaaatttttgcactcattttttagctgtattaggaatgtcaataatcctgtagcaaattttcacagagaactttaagaaattcttgcattggtcgatttcaatttgaaagctttttggtttgtttgctttttaaattttcatgttctaggaaactatgattctggttgttcaggattgttattattatagttgtgtaaaattattttattttgtgtgtattgtgcacagcttggggggggggcgggaaatgcactaattgtgctcttccttataaatggtacatattactgacacagacaaataaagtttctaattgtttctgatttaatcactagtgatacagcatattctgtatgaaatgttttctcctttctcattgtcatctacttcattttttgttttcatgttttgaagaaataaaaaccaaaatggta

SEQ ID NO: 42423 - protein, 960 aa, Artificial Sequence
  derived and/or modified sequence
MYNMRRLSLSPTFSMGFHLLVTVSLLFSHVDHVIAETEMEGEGNETGECTGSYYCKKGVILPIWEPQDPSFGDKIARATVYFVAMVYMFLGVSIIADRFMSSIEVITSQEKEITIKKPNGETTKTTVRIWNETVSNLTLMALGSSAPEILLSVIEVCGHNFTAGDLGPSTIVGSAAFNMFIIIALCVYVVPDGETRKIKHLRVFFVTAAWSIFAYTWLYIILSVISPGVVEVWEGLLTFFFFPICVVFAWVADRRLLFYKYVYKRYRAGKQRGMIIEHEGDRPSSKTEIEMDGKVVNSHVENFLDGALVLEVDERDQDDEEARREMARILKELKQKHPDKEIEQLIELANYQVLSQQQKSRAFYRIQATRLMTGAGNILKRHAADQARKAVSMHEVNTEVTENDPVSKIFFEQGTYQCLENCGTVALTIIRRGGDLTNTVFVDFRTEDGTANAGSDYEFTEGTVVFKPGDTQKEIRVGIIDDDIFEEDENFLVHLSNVKVSSEASEDGILEANHVSTLACLGSPSTATVTIFDDDHAGIFTFEEPVTHVSESIGIMEVKVLRTSGARGNVIVPYKTIEGTARGGGEDFEDTCGELEFQNDEIVKIITIRIFDREEYEKECSFSLVLEEPKWIRRGMKEGFWLSSQPVFRKVHAREHPILSTVITIADEYDDKQPLTSKEEEERRIAEMGRPILGEHTKLEVIIEESYEFKSTVDKLIKKTNLALVVGTNSWREQFIEAITVSAGEDDDDDECGEEKLPSCFDYVMHFLTVFWKVLFAFVPPTEYWNGWACFIVSILMIGLLTAFIGDLASHFGCTIGLKDSVTAVVFVALGTSVPDTFASKVAATQDQYADASIGNVTGSNAVNVFLGIGVAWSIAAIYHAANGEQFKVSPGTLAFSVTLFTIFAFINVGVLLYRRRPEIGGELGGPRTAKLLTSCLFVLLWLLYIFFSSLEAYCHIKGF

SEQ ID NO: 42424 - DNA, 2883 bp, Artificial Sequence
  derived and/or modified sequence
atgtacaacatgagaagactgagcctgagccccaccttcagcatgggcttccacctgctggtgaccgtgagcctgctgttcagccacgtggaccacgtgatcgccgagaccgagatggagggcgagggcaacgagaccggcgagtgcaccggcagctactactgcaagaagggcgtgatcctgcccatctgggagccccaggaccccagcttcggcgacaagatcgccagagccaccgtgtacttcgtggccatggtgtacatgttcctgggcgtgagcatcatcgccgacagattcatgagcagcatcgaggtgatcaccagccaggagaaggagatcaccatcaagaagcccaacggcgagaccaccaagaccaccgtgagaatctggaacgagaccgtgagcaacctgaccctgatggccctgggcagcagcgcccccgagatcctgctgagcgtgatcgaggtgtgcggccacaacttcaccgccggcgacctgggccccagcaccatcgtgggcagcgccgccttcaacatgttcatcatcatcgccctgtgcgtgtacgtggtgcccgacggcgagaccagaaagatcaagcacctgagagtgttcttcgtgaccgccgcctggagcatcttcgcctacacctggctgtacatcatcctgagcgtgatcagccccggcgtggtggaggtgtgggagggcctgctgaccttcttcttcttccccatctgcgtggtgttcgcctgggtggccgacagaagactgctgttctacaagtacgtgtacaagagatacagagccggcaagcagagaggcatgatcatcgagcacgagggcgacagacccagcagcaagaccgagatcgagatggacggcaaggtggtgaacagccacgtggagaacttcctggacggcgccctggtgctggaggtggacgagagagaccaggacgacgaggaggccagaagagagatggccagaatcctgaaggagctgaagcagaagcaccccgacaaggagatcgagcagctgatcgagctggccaactaccaggtgctgagccagcagcagaagagcagagccttctacagaatccaggccaccagactgatgaccggcgccggcaacatcctgaagagacacgccgccgaccaggccagaaaggccgtgagcatgcacgaggtgaacaccgaggtgaccgagaacgaccccgtgagcaagatcttcttcgagcagggcacctaccagtgcctggagaactgcggcaccgtggccctgaccatcatcagaagaggcggcgacctgaccaacaccgtgttcgtggacttcagaaccgaggacggcaccgccaacgccggcagcgactacgagttcaccgagggcaccgtggtgttcaagcccggcgacacccagaaggagatcagagtgggcatcatcgacgacgacatcttcgaggaggacgagaacttcctggtgcacctgagcaacgtgaaggtgagcagcgaggccagcgaggacggcatcctggaggccaaccacgtgagcaccctggcctgcctgggcagccccagcaccgccaccgtgaccatcttcgacgacgaccacgccggcatcttcaccttcgaggagcccgtgacccacgtgagcgagagcatcggcatcatggaggtgaaggtgctgagaaccagcggcgccagaggcaacgtgatcgtgccctacaagaccatcgagggcaccgccagaggcggcggcgaggacttcgaggacacctgcggcgagctggagttccagaacgacgagatcgtgaagatcatcaccatcagaatcttcgacagagaggagtacgagaaggagtgcagcttcagcctggtgctggaggagcccaagtggatcagaagaggcatgaaggagggcttctggctgagcagccagcccgtgttcagaaaggtgcacgccagagagcaccccatcctgagcaccgtgatcaccatcgccgacgagtacgacgacaagcagcccctgaccagcaaggaggaggaggagagaagaatcgccgagatgggcagacccatcctgggcgagcacaccaagctggaggtgatcatcgaggagagctacgagttcaagagcaccgtggacaagctgatcaagaagaccaacctggccctggtggtgggcaccaacagctggagagagcagttcatcgaggccatcaccgtgagcgccggcgaggacgacgacgacgacgagtgcggcgaggagaagctgcccagctgcttcgactacgtgatgcacttcctgaccgtgttctggaaggtgctgttcgccttcgtgccccccaccgagtactggaacggctgggcctgcttcatcgtgagcatcctgatgatcggcctgctgaccgccttcatcggcgacctggccagccacttcggctgcaccatcggcctgaaggacagcgtgaccgccgtggtgttcgtggccctgggcaccagcgtgcccgacaccttcgccagcaaggtggccgccacccaggaccagtacgccgacgccagcatcggcaacgtgaccggcagcaacgccgtgaacgtgttcctgggcatcggcgtggcctggagcatcgccgccatctaccacgccgccaacggcgagcagttcaaggtgagccccggcaccctggccttcagcgtgaccctgttcaccatcttcgccttcatcaacgtgggcgtgctgctgtacagaagaagacccgagatcggcggcgagctgggcggccccagaaccgccaagctgctgaccagctgcctgttcgtgctgctgtggctgctgtacatcttcttcagcagcctggaggcctactgccacatcaagggcttctag

SEQ ID NO: 42425 - DNA, 2883 bp, Artificial Sequence
  derived and/or modified sequence
atgtataatatgcggcggttaagcctgtccccaacattctccatggggtttcacttactagtcactgtttccctgctgttcagtcatgttgaccatgtgattgcagagaccgaaatggagggcgaaggtaacgagacaggcgagtgtactgggagctattattgcaagaagggagtcatcttgcctatttgggaacctcaggatccttcgtttggcgacaaaattgcgagagccactgtttacttcgttgcaatggtgtacatgtttttaggcgttagtatcattgcagatcgctttatgagcagcatcgaagtgattaccagccaggaaaaggagatcacaatcaagaaacctaacggggagaccacgaagaccacagttagaatctggaatgagaccgtaagtaatctgactctcatggcgctgggcagctcagcccctgagatactgttgagtgtcattgaggtttgcggtcacaatttcaccgccggcgatctcggaccgtcgactattgtgggcagtgccgcctttaatatgtttattattatcgcactttgtgtctatgtggtgccagacggtgagaccaggaagatcaagcacctgcgagttttcttcgttacggccgcctggagtatctttgcgtacacctggctgtatattatcctaagtgtcatatcccccggcgtggtagaggtttgggaaggcctcctgaccttttttttctttcccatctgcgtggttttcgcctgggtagctgatcggagactgctgttctacaagtatgtgtataaacgctatcgagcaggaaagcagcgtgggatgatcatcgaacacgagggcgaccggccgagctccaagacagagatcgagatggacggaaaagtcgtcaactctcacgtcgagaatttcctcgatggagcgctggttctggaggtagacgagcgggaccaggacgatgaggaggccagacgggagatggcacgaatcctgaaagagctgaaacagaaacatccagataaagaaattgagcagctaatcgagctcgcaaattaccaggtcctgtctcagcaacaaaagagccgcgccttctacagaatccaggcaacacgccttatgaccggtgctggcaacatcctgaagagacatgcagccgaccaggctcgcaaggcagtctctatgcacgaagtaaatactgaggtgacagaaaacgacccagtgtcaaaaatcttctttgagcagggtacatatcagtgcttagagaactgtgggacggtggctcttaccattattaggagagggggcgacctgacgaacaccgtgtttgtcgacttccgcactgaagatggcacagctaatgcagggtccgactacgagttcaccgaaggaactgtagtctttaaaccaggcgacactcagaaagagattagggtcggtatcatcgatgatgacatattcgaggaagacgagaactttttggtgcacctgtccaatgttaaagtgagttccgaagcaagcgaggatggaatcttagaggccaaccacgtaagcaccctggcctgcctggggtctccatctactgctacagttactatcttcgacgacgaccacgccggtatctttacgtttgaggagcctgtaactcatgtctcagagagtattggaattatggaagtcaaggtactcaggaccagtggggctcgaggaaacgttattgtcccttataagacaattgagggtaccgccagaggtgggggtgaggattttgaggatacttgtggagagctcgagttccagaatgatgaaatcgtaaagataattactatccgtatcttcgaccgggaagagtacgagaaggaatgcagcttctcactggtccttgaggaaccgaagtggatccggagaggaatgaaagaaggattctggctgtcctctcagcctgtgtttagaaaagtccacgcgagagaacacccaatcctgtctacagtcatcactatcgcagacgagtacgacgacaaacagcccctcacatctaaagaagaggaagagagaaggatcgccgagatggggaggccaatcctgggggagcatacaaagcttgaggtgattattgaggagagttatgaattcaaaagtacagtggacaagcttatcaagaagactaaccttgcactggtggtaggcactaacagctggagggagcaattcatagaggctatcactgtgtctgctggggaagatgatgacgacgacgaatgtggagaagagaagctgccctcttgttttgattacgtaatgcactttcttacagttttttggaaggtcttattcgcctttgttccccctaccgagtactggaacggctgggcatgcttcatcgtatccatattgatgataggcctgctaactgctttcatcggtgaccttgcgtcccattttggctgtactatcgggctcaaagacagcgtgactgctgtagtcttcgtggcactgggaacgagcgtgcctgacacttttgcttcaaaggtggccgccacccaggaccagtacgcagatgcaagtataggcaatgtaaccggaagcaatgccgtcaatgtgtttctgggcatcggggtggcttggtcgattgccgctatttaccatgccgctaacggcgaacagtttaaggtttctcctggaactctcgccttcagcgtgactttgtttacaattttcgcttttataaatgtaggagtactcctgtatcgaaggagacctgagatcggaggcgaattgggagggccacggacagccaagcttttaaccagctgtctgtttgtacttttatggctcctctatatttttttttcttccctggaggcatactgtcacattaagggattctag

SEQ ID NO: 42426 - DNA, 2883 bp, Artificial Sequence
  derived and/or modified sequence
atgtacaacatgaggcggctgagcctgagccccaccttctccatgggcttccacctgctggtgacagtgtccctgctcttcagccacgtggaccacgtgattgctgagacagagatggagggggagggcaatgagaccggggagtgcaccggcagctactactgcaagaagggcgtcatcctgcccatctgggagccccaggaccccagctttggagacaagatcgcccgggccaccgtgtactttgtggccatggtgtacatgttcctgggcgtgtccatcatcgctgaccgcttcatgagcagcattgaagtcatcaccagccaggagaaggagatcaccatcaagaagcccaatggagagaccaccaagaccaccgtgcgcatctggaatgaaacagtgagcaacctgaccctgatggccctgggcagcagcgcccctgagatcctgctgagcgtcatcgaggtgtgtggccacaacttcaccgctggggacctgggccccagcaccatcgtgggcagcgctgccttcaacatgttcatcatcatcgccctgtgtgtgtatgtggtgcctgatggagagaccaggaagatcaagcacctgcgggtcttctttgtgacagctgcctggagcatctttgcctacacctggctgtacatcatcctgagcgtcatcagccctggggtggtggaggtgtgggagggcctgctgaccttcttcttcttccccatctgtgtggtgtttgcctgggtggccgaccggcggctgctcttctacaagtatgtgtacaagcgctaccgggccggcaagcagaggggcatgatcatcgagcacgagggggaccggcccagcagcaagacagaaattgagatggatggcaaggtggtgaacagccacgtggagaacttcctggatggagccctggtgctggaggtggatgagcgggaccaggatgatgaggaggcccggcgggagatggcccgcatcctgaaggagctgaagcagaagcacccagacaaggagattgagcagctgattgagctggccaactaccaggtgctgagccagcagcagaagagccgggccttctaccgcatccaggccacccggctgatgactggagctggcaacatcctgaagagacatgctgctgaccaggccaggaaggctgtgtccatgcatgaggtgaacacagaggtgacagaaaatgaccctgtgtccaagatcttctttgagcagggcacctaccagtgcctggagaactgtggcaccgtggccctgaccatcatcagaagaggaggagacctgaccaacacagtgtttgtggacttcagaacagaagatggaacagccaatgccggcagtgactatgagttcacagagggcaccgtggtgttcaagccaggggacacccagaaggagatccgggtgggcatcattgatgatgacatctttgaagaagatgagaacttcctggtgcacctgagcaatgtgaaggtgagcagcgaggcctctgaagatggcatcctggaggccaaccacgtgtccaccctggcctgcctgggcagccccagcacagccaccgtgaccatctttgatgatgaccatgctggcatcttcacctttgaggagcctgtgacccacgtgtctgagagcatcggcatcatggaggtgaaggtgctgcggaccagcggggcccggggaaatgtgattgtgccctacaagaccatcgagggcacagcccggggcggcggggaggactttgaggacacctgtggggagctggagttccagaatgatgagatcgtgaagatcatcaccatccgcatctttgaccgggaggagtatgagaaggaatgttccttcagcctggtgctggaggagcccaagtggatcagaagaggcatgaaggagggcttctggctgagcagccagcccgtcttcaggaaggtgcacgcccgggagcaccccatcctgagcaccgtcatcaccatcgcagatgaatatgatgacaagcagcccctgaccagcaaggaggaggaggagaggagaattgctgagatgggccggcccatcctgggggagcacaccaagctggaggtgatcatcgaggagagctatgagttcaagagcacagtggacaagctgatcaagaagaccaacctggccctggtggtgggcaccaacagctggagggagcagttcatcgaggccatcaccgtgtctgctggagaagatgatgatgatgatgaatgtggggaggagaagctgcccagctgctttgattatgtgatgcacttcctgactgtgttctggaaggtgctgtttgcctttgtgcccccaacagagtactggaatggctgggcctgcttcatcgtgtccatcctgatgattggcctgctgacagccttcatcggggacctggccagccacttcggctgcaccatcggcctgaaggacagcgtgacagctgtggtgtttgtggccctgggcacctctgtgcctgacacctttgccagcaaggtggccgccacccaggaccagtatgcagatgccagcattggaaatgtgacaggcagcaatgctgtgaatgtgttcctgggcattggagtggcctggagcattgctgccatctaccacgccgccaatggagagcagttcaaggtgtccccaggcaccctggccttctctgtgaccctcttcaccatctttgccttcatcaacgtgggcgtgctgctgtacagaagaagacctgagatcggcggggagctgggcggccccaggacagccaagctgctgaccagctgcctgtttgtgctgctgtggctgctgtacatcttcttcagcagcctggaggcctactgccacatcaagggcttctag

SEQ ID NO: 42427 - DNA, 2883 bp, Artificial Sequence
  derived and/or modified sequence
atgtacaacatgcggcggctgagcctgagccccaccttcagcatgggcttccatctgctggtaacagtcagtctcctgttctcacacgtggaccatgtgatcgccgaaacagagatggagggagaaggcaatgaaaccggagagtgtactggatcatactattgtaagaaaggggtcattctaccaatatgggagccacaagacccatcgttcggcgacaaaattgcgcgagctacagtgtatttcgtggcgatggtctatatgttcctaggcgtttctattattgccgaccgttttatgtccagtattgaggtgataacaagccaggagaaagagattacgatcaagaagcccaacggagaaactacaaagaccaccgtgcggatctggaacgagactgtgagcaacctcaccctgatggccctggggtcatccgcccctgagatactcctgtccgtgattgaggtttgtggccacaacttcacggccggcgacctcggcccctctaccatcgtaggttccgccgctttcaacatgttcataatcattgctctatgcgtctacgtggtgccagacggcgagactcggaagataaaacacctccgcgtcttcttcgtcacagcggcctggagtatcttcgcctacacgtggctttacattatcctttcagtgatttctcccggcgttgtagaggtttgggaaggcctgctcacctttttctttttccctatctgcgtcgtttttgcatgggttgccgaccggcggttactcttctacaaatatgtctataaacgctacagagctgggaaacagaggggaatgatcattgagcacgagggcgaccgtccttcaagcaagacagaaattgaaatggatgggaaagttgtgaatagtcacgttgaaaactttctggatggggcattggtccttgaggtggacgagcgcgaccaggacgacgaagaggcaaggcgcgagatggcccgcattctcaaagagcttaagcaaaagcatccagataaggaaatcgagcagctgattgaattggctaattatcaggtgctgagccagcagcagaaatcccgggccttctatcgcatccaagcaacgcgtctaatgacgggggcaggaaatatcctgaagagacacgctgcagatcaggcccggaaggccgtgtccatgcatgaagtaaatacggaggttactgagaacgaccctgtgagtaaaatcttcttcgaacagggcacctaccagtgtttagagaattgtggcacagtggccttgactatcataagaaggggaggcgatttgaccaacaccgtgttcgtggacttccggacagaagatgggaccgcaaacgccggtagtgactacgagttcactgagggaactgttgtgtttaaaccaggcgatacccagaaagagattagagtcggcattattgatgacgatatattcgaggaagacgagaattttttggtgcacctctctaacgtgaaagtatcttccgaggccagtgaggacggtattctggaagccaaccacgtgagcaccttggcatgcctagggtcgccctcaaccgccactgttactattttcgatgacgaccatgcagggatatttacattcgaggagcccgtcacccatgtgagcgaaagcataggcataatggaagttaaagtgttgcgaacgtctggcgcgcgcggaaacgtcatcgtgccctacaaaactatcgaagggacagctcgcggggggggcgaggactttgaggacacctgcggagagctcgaatttcaaaacgatgagatcgtcaagatcatcaccatacgcatcttcgacagggaggagtatgagaaagaatgcagcttttccctggtgctggaggaacccaagtggatacgacgggggatgaaggagggtttctggctgtctagccagccggtgttcagaaaggtgcatgctcgagaacacccaatcctgtctacagttatcactattgccgatgagtatgatgataaacagccattaaccagcaaagaagaggaggagcgcaggatagccgagatggggcgccctatcctaggtgagcacaccaaactcgaggtaattatcgaagagtcttacgagtttaagtctactgttgacaagctgatcaagaaaacaaatctggccctcgtagtagggaccaacagctggagggagcagtttattgaggcaatcactgtatccgctggagaggatgacgacgacgacgagtgcggagaagagaaattgccatcttgtttcgactatgttatgcactttttaactgtgttctggaaagtgctctttgctttcgttcctccaacagagtactggaatgggtgggcctgtttcatagtatcgattctgatgatcggacttctcaccgccttcatcggtgacctcgcgtctcacttcggctgcactattggtctaaaggacagtgttaccgcggtggtcttcgtggcgttaggtacaagcgtgcccgacacatttgccagcaaggtggcagccactcaagaccagtacgcagatgcatctattggaaatgtcaccggcagcaacgccgtcaatgtgtttctcggcattggcgtggcatggtctattgctgccatttatcacgctgctaacggggagcaatttaaggtgtcgcccggcacactcgcattcagtgtgaccctctttacaattttcgcctttatcaacgtgggtgtactcctgtaccggcgacgcccagagataggaggcgaacttggcgggcctcggaccgctaaattgcttacctcctgtttgttcgtgcttctctggctcctatacattttcttctcgtcactcgaagcctactgccacattaagggcttctag

SEQ ID NO: 42428 - DNA, 2883 bp, Artificial Sequence
  derived and/or modified sequence
atgtacaacatgcgcaggttgtccttgagtccaacatttagcatgggctttcacctgctcgtgactgtgagcctgctgtttagccatgtggaccatgtcatcgcagaaacagagatggagggagagggaaacgagaccggagagtgcactggctcttattactgcaagaagggggtcatcctgccaatatgggaacctcaagatccttccttcggcgacaagattgcaagggccaccgtgtattttgtggcaatggtgtatatgttcctgggagtttcgatcattgcggacagattcatgagttctatagaagtcatcacctcccaagaaaaagagataactataaaaaaaccaaatggggaaacaaccaaaacaacagtgagaatctggaacgaaacagtttccaatctgactttgatggcactgggatcctctgccccagagatcctgctcagcgtcatcgaggtctgcggacacaattttaccgcaggtgatctcgggccttccactatagtggggagcgctgcattcaacatgttcatcattatcgccctttgcgtgtacgtggtgcccgacggtgagactcgcaagatcaaacacctgagggtgttcttcgttactgcagcgtggagcattttcgcctatacatggctctatattatactctcagtaatctctcccggagttgtcgaggtgtgggagggattactcacattctttttcttccctatctgcgtcgtgtttgcttgggtggcagaccgcaggctgctgttctacaaatatgtgtataaacgataccgcgctggcaaacaaaggggaatgattattgagcatgagggcgatagaccaagtagcaagacagagattgaaatggacggtaaggttgtgaattcgcatgttgagaattttcttgacggcgctttagtgttggaagtggatgagagagaccaggacgacgaggaggccaggcgggagatggccagaatccttaaagaattaaagcagaaacaccctgataaggagattgagcagttgatcgagctggcaaattaccaggtactttctcagcagcagaagtcccgggcattctatcgaattcaggccacccgcctgatgaccggagctggtaatatcctaaagcgccacgccgctgaccaagcgaggaaagctgtcagtatgcacgaggtgaatacagaagtcactgagaatgatccagtgtccaaaatcttttttgaacagggaacctaccaatgtctcgagaactgcgggacagtagcactgacaatcatccgaagaggtggcgatctcaccaataccgtgtttgtggattttagaacggaggatggcacagccaatgcaggctcagactacgagtttaccgaaggcacagtggtttttaaaccgggagatacccagaaggagattcgagtcggtatcatagacgatgacatctttgaagaagacgagaacttcttggtgcacctttccaatgtgaaagtgtcatccgaagcttcagaagatgggattcttgaagcaaatcacgtaagcaccctggcctgcctcggatctccatcaactgccacagtgacaatattcgacgatgaccacgcgggaatctttacgtttgaagaaccagtgactcacgtgtcggaatccataggaattatggaggtaaaggtgctgcgcacctccggtgcgaggggcaacgtaatagttccgtacaaaaccatcgagggcacagccaggggcggtggggaggacttcgaggacacatgcggtgagctggagttccagaacgacgagatcgttaagatcattaccatcagaattttcgatcgagaggagtacgagaaagagtgtagctttagtttggtgctggaagaacctaaatggataagaaggggaatgaaggagggattctggttgtcgtcccagccggtgtttcgaaaagttcacgcacgcgaacaccctatcctgagtacagtgatcacaattgctgacgaatacgacgacaagcagccattgaccagtaaggaagaagaagagagaaggatagcagaaatgggcagacctattctcggcgagcacaccaaactggaggtaataattgaagaatcgtacgagtttaaaagcaccgtggacaaactgattaagaagactaaccttgcacttgtcgtgggcaccaatagctggagggagcagttcatcgaggctatcaccgttagcgctggagaggacgatgacgatgacgagtgtggcgaggagaaacttccatcatgtttcgattatgttatgcattttttgaccgtgttctggaaagtgctctttgcctttgtcccccctactgagtattggaatggatgggcctgctttatagtcagcattttaatgatcggactgctgacagcctttatcggagatctggcctctcatttcggctgtactataggacttaaggatagcgtcacagctgtcgttttcgtagctctcggaacttctgtgcccgatactttcgcttccaaggttgcggctacccaggatcagtatgccgatgctagtattggaaacgtgactggatctaatgcagtcaacgtcttccttggaatcggcgtcgcatggagcattgccgcaatttaccacgccgctaacggcgaacaatttaaggtgtcgccaggcacactggccttcagcgtcactttgtttacaatttttgctttcattaacgtcggagttctcctatacagaagacgccctgagatcggcggagagctggggggtccgaggacggcaaagctcctgacctcttgcctatttgtactgctgtggctgctgtacatcttttttagctctttagaggcatattgccatatcaagggcttctag

SEQ ID NO: 42429 - DNA, 2883 bp, Artificial Sequence
  derived and/or modified sequence
atgtacaacatgcggcgattaagtctttcacccaccttttcaatgggatttcatctgttagttactgtgagtctcttattttcccatgtggaccatgtaattgctgagacagaaatggaaggagaaggaaatgaaactggtgaatgtactggatcatattactgtaagaaaggggtgattttgcccatttgggaaccccaagacccttcttttggggacaaaattgctagagctactgtgtattttgtggccatggtctacatgtttcttggagtctctatcatagctgatcggttcatgtcctctatagaagtcatcacatctcaagaaaaagaaataaccataaagaaacccaatggagagaccaccaagacaactgtgaggatctggaatgaaacagtttctaacctgaccttgatggccctgggatcttctgctcctgagattctcctttcagtaattgaagtgtgtggccataacttcactgcaggagacctcggtcctagcaccatcgtgggaagtgctgcattcaatatgttcatcattattgcactctgtgtttatgtggtgcctgacggagagacaaggaagattaagcatttgcgtgtcttctttgtgacagcagcctggagcatctttgcctacacctggctttacattattttgtctgtcatatctcctggtgttgtggaggtctgggaaggtttgcttactttcttcttctttcccatctgtgttgtgttcgcttgggtagcggataggagacttctgttttacaagtatgtctacaagaggtatcgagctggcaagcagagggggatgattattgaacatgaaggagacaggccatcttctaagactgaaattgaaatggacgggaaagtggtcaattctcatgttgaaaatttcttagatggtgctctggttctggaggtggatgagagggaccaagatgatgaagaagctaggcgagaaatggctaggattctgaaggaacttaagcagaagcatccagataaagaaatagagcaattaatagaattagctaactaccaagtcctaagtcagcagcaaaaaagtagagcattttatcgcattcaagctactcgcctcatgactggagctggcaacattttaaagaggcatgcagctgaccaagcaaggaaggctgtcagcatgcacgaggtcaacactgaagtgactgaaaatgaccctgttagtaagatcttctttgaacaagggacatatcagtgtctggagaactgtggtactgtggcccttaccattatccgcagaggtggtgatttgactaacactgtgtttgttgacttcagaacagaggatggcacagcaaatgctgggtctgattatgaatttactgaaggaactgtggtgtttaagcctggtgatacccagaaggaaatcagagtgggtatcatagatgatgatatctttgaggaggatgaaaatttccttgtgcatctcagcaatgtcaaagtatcttctgaagcttcagaagatggcatactggaagccaatcatgtttctacacttgcttgcctcggatctccctccactgccactgtaactatttttgatgatgaccacgcaggcatttttacttttgaggaacctgtgactcatgtgagtgagagcattggcatcatggaggtgaaagtattgagaacatctggagctcgaggaaatgttatcgttccatataaaaccatcgaagggactgccagaggtggaggggaggattttgaggacacttgtggagagctcgaattccagaatgatgaaattgtgaagatcattaccattagaatatttgaccgtgaggaatatgagaaagagtgcagtttctcccttgtgcttgaggaaccaaaatggataagaagaggaatgaaagaaggattctggttatctagccaacctgtcttcaggaaggttcatgctagagaacatccgattctctctactgtaatcaccattgcagacgaatatgatgacaagcagccactgaccagcaaagaggaagaggagaggcgcattgcagaaatggggcgccccatcctgggagagcacaccaagttggaagtgatcattgaagaatcctatgaattcaagagtactgtggacaaactcattaagaagacaaacctggcccttgtggttgggactaacagctggagagaacagttcattgaagctatcactgtcagtgctggggaagatgatgacgacgatgaatgtggggaagagaagctgccctcctgtttcgattacgtgatgcactttctgactgtgttctggaaggtcctgtttgccttcgtcccccctactgaatactggaatggctgggcgtgtttcattgtctccatcctcatgattggcctactgacagctttcattggagacctggcttcccactttggctgcaccattggcctgaaagattctgtgactgcagtcgtgttcgtcgcacttggaacatcagtgccagacacatttgccagcaaagtggcagccacccaggaccagtatgcagacgcctccataggtaacgtcacgggcagcaacgcggtgaatgtcttcctgggaatcggtgtggcctggtccatcgctgccatctaccacgcagccaatggggaacagttcaaagtgtcccctggcacactagctttctctgtcactctcttcaccatttttgctttcatcaatgtgggggtgctgctgtatcggcggaggccagaaatcggaggtgagctgggtgggccccggactgccaagctcctcacatcctgcctctttgtgctcctatggctcttgtacattttcttctcctccctggaggcctactgccacataaaaggcttctaa

SEQ ID NO: 42430 - protein, 433 aa, Artificial Sequence
  derived and/or modified sequence
MRIISRQIVLLFSGFWGLAMGAFPSSVQIGGLFIRNTDQEYTAFRLAIFLHNTSPNASEAPFNLVPHVDNIETANSFAVTNAFCSQYSRGVFAIFGLYDKRSVHTLTSFCSALHISLITPSFPTEGESQFVLQLRPSLRGALLSLLDHYEWNCFVFLYDTDRGYSILQAIMEKAGQNGWHVSAICVENFNDVSYRQLLEELDRRQEKKFVIDCEIERLQNILEQIVSVGKHVKGYHYIIANLGFKDISLERFIHGGANVTGFQLVDFNTPMVIKLMDRWKKLDQREYPGSETPPKYTSALTYDGVLVMAETFRSLRRQKIDISRRGNAGDCLANPAAPWGQGIDMERTLKQVRIQGLTGNVQFDHYGRRVNYTMDVFELKSTGPRKVGYWNDMDKLVLIQDVPTLGNDTAAIENRTVVVTTIMPLMKNPILRN

SEQ ID NO: 42431 - DNA, 1302 bp, Artificial Sequence
  derived and/or modified sequence
atgagaattatttctagacagattgtgctgctgttctcaggtttttggggccttgcgatgggggctttcccatcctctgttcaaataggtggcctgttcatcagaaacacagaccaggagtacaccgcctttcgactagcaatctttttgcataatacatcacctaatgcttcagaggcacccttcaacctggttccacacgtcgataatatcgagaccgcaaacagcttcgccgtcaccaacgccttttgtagccaatattcacgcggcgtattcgccatctttggtctttatgataagcgctcagtgcatacactcacaagcttttgcagcgcgctgcatattagcctgataactcccagtttcccgactgagggggagagccaattcgtactgcagctccggccatctctcagaggcgcgctgctgtcactcctggaccactacgaatggaattgttttgtgtttctctatgacactgaccgaggctatagtatcctgcaggctattatggagaaggcaggtcagaatgggtggcacgtgtcggcaatctgcgtggagaatttcaatgacgtatcgtaccggcagttactggaggagttggacaggaggcaggaaaagaagtttgtcatcgactgtgaaatagaacgactccagaacatcttggagcaaatagtttccgtgggtaagcacgtgaaagggtatcactacatcatcgcaaatctagggttcaaagacattagtctagagcgttttatccacggcggggccaatgtgaccggatttcagctggtggacttcaacactccaatggttatcaagctgatggacagatggaagaagcttgaccagcgggagtatcccggatccgaaaccccacctaaatatacatcggcgttgacttacgatggggtgctggtcatggctgaaactttcaggagcctccggaggcagaaaatcgatatcagccggaggggcaatgcgggtgattgtctggccaaccctgcagcgccgtggggtcaaggtatagatatggagaggaccctgaagcaggtgcgaatccaggggctgactggaaatgtgcaattcgaccactacggtaggcgggttaattatacgatggatgtgttcgagctcaagagcaccggccccagaaaggtgggatactggaacgatatggataaactggtgctgatccaggacgtcccaaccctggggaacgacactgccgctatcgaaaaccgtacagttgtcgtgaccacgataatgccattaatgaagaatcccattctgaggaattag

SEQ ID NO: 42432 - DNA, 1302 bp, Artificial Sequence
  derived and/or modified sequence
atgaggattatctcacggcagatcgtgcttctgttttcaggcttttggggcctcgccatgggagcttttccttcgagcgtccaaatcggcggattatttatccgtaatactgatcaggagtatacagcttttcgacttgctatttttcttcacaacacgtccccgaatgcctcagaggctccattcaatctggtcccacatgtagacaacatagagaccgccaacagcttcgcagtgaccaatgcgttttgctcccagtactctaggggggtttttgcaatctttggcctctacgacaagagaagtgtgcacacactgacctccttttgcagcgcgcttcatatatccttaatcactccgtctttccccacagagggcgagagccagtttgtgcttcagctacggccaagcctgcgtggcgcactgttaagccttctggaccattatgaatggaactgctttgtcttcctatacgacactgatagaggatacagtattctgcaggctataatggagaaagccggacagaacggatggcacgtatctgctatctgcgtcgaaaacttcaatgacgtttcttacagacaactgctggaggagttggataggagacaggagaagaaattcgtaatcgattgtgagatcgagcgcttacagaacatcctggaacagatagtgagtgtggggaaacacgtgaaggggtatcactacataattgccaatctcgggtttaaggatatatcccttgaaagattcatccatgggggcgccaacgtaacaggattccaactggtggattttaacacacctatggtgatcaaactaatggatagatggaagaagctcgaccaaagggagtaccctgggtctgagacccccccgaagtataccagtgccctcacctacgacggcgtattagtaatggccgagacctttcgatctcttcggcgccagaagattgatatcagcaggcgcgggaacgctggggattgcctcgctaatcccgccgccccttggggccagggcatcgacatggaaaggactctaaaacaagtcagaatccaggggttaactggcaacgtgcagtttgatcattatggtcggagagttaattataccatggacgtgtttgaattaaaatctacaggtccacggaaggtgggctattggaacgacatggataaattggttctaattcaggatgtacctactctgggcaacgacacagctgccatagagaatagaacagtcgtagttacaactattatgcctctgatgaaaaacccaatactgcggaactag

SEQ ID NO: 42433 - DNA, 249 bp, Artificial Sequence
  derived and/or modified sequence
atgcggatcatctcacggcagattgtcctattgttttccggtttttggggactggccatgggagctttcccttcttcggtccaaataggtggactttttatcagaaacaccgaccaggagtacactgccttcagactggccatctttctccataacacctcgcccaacgcctctgaagccccatttaatttggtgccccacgttgacaatattgaaacagctaattctttcgctgtcaccaatgcttag

SEQ ID NO: 42434 - DNA, 249 bp, Artificial Sequence
  derived and/or modified sequence
atgcgcatcatttctaggcagattgtactgctgttttccgggttctggggattggccatgggcgcttttcctagcagcgtccagataggcggtctgttcattagaaacacagatcaggaatacactgccttccggctagccattttcctgcacaatacgtctccaaacgccagcgaagccccatttaatttagtgcctcatgttgacaacatcgagactgccaactcatttgccgtcactaatgcgtag

SEQ ID NO: 42435 - DNA, 2994 bp, Artificial Sequence
  derived and/or modified sequence
aaatctttgctgcagcgaggaccggagtcccccgcgcgcagcccagtggcagaagagggctaggctgagagggaagccaggactgtaggagagggaggcagcccgtcctcctcacgaacctgcaaggatgcggcaggggcctgggggcatggggaggtactaaccccccggagcccccgattggggcttgcagacctggcccgtgggcggattttctgcctagcgcagccgagaagcagaggtgccaggaaaaccaagagaggggcgctgggggtgcccatccccagagtcggtccctctgcgaaccgaggaagaaaagaggagggagtcagcgagtggtcagaagggaaaacctgacaccagactggctccggagcgtccgggagactggggcgctccgcgccatcgtcttcaatgcttctctgaacagcctttaggaagagtgcgagagaaagagagagagcgcgcgccagggagaggagaaaagaagatgaggattatttccagacagattgtcttgttattttctggattttggggactcgccatgggagcctttccgagcagcgtgcaaataggtggtctcttcatccgaaacacagatcaggaatacactgcttttcgattagcaatttttcttcataacaccagccccaatgcgtcggaagctccttttaatttggtacctcatgtggacaacattgagacagccaacagttttgctgtaacaaacgccttctgttcccagtattctagaggagtatttgccatttttggactctatgataagaggtcggtacataccttgacctcattctgcagcgccttacatatctccctcatcacaccaagtttccctactgagggggagagccagtttgtgctgcaactaagaccttcgttacgaggagcactcttgagtttgctggatcactacgaatggaactgttttgtcttcctgtatgacacagacaggggatactcgatactccaagctattatggaaaaagcaggacaaaatggttggcatgtcagcgctatatgtgtggaaaattttaatgatgtcagctataggcaacttctagaagaacttgacagaagacaagagaagaagtttgtaatagactgtgagatagagagacttcaaaacatattagaacagattgtaagtgttggaaagcatgttaaaggctaccattatatcattgcaaacttgggattcaaggatatttctcttgagaggtttatacatggtggagccaatgttactggattccagttggtggattttaatacacctatggtaatcaaactaatggatcgctggaagaaactagatcagagagagtatccaggatctgagactcctccaaagtacacctctgctctgacttatgatggagtccttgtgatggctgaaactttccgaagtcttaggaggcagaaaattgatatctcaaggagaggaaatgctggggattgtctggcaaatcctgctgctccatggggccagggaattgacatggagaggacactcaaacaggttcgaattcaagggctgacagggaatgttcagtttgaccactatggacgtagagtcaattacacaatggatgtgtttgagctgaaaagcacaggacctagaaaggttggttactggaatgatatggataagttagtcttgattcaagatgtaccaactcttggcaatgacacagctgctattgagaacagaacagtggttgtaaccacaattatgcctctgatgaagaatcctattttaagaaattgatcaagaaagaaaagagttccgcgctgttcgaccattcctaactaaggctcaagtcttgttctccagtgtagtaaatttaagcttatttttcatgtgggattcttcttggatgaccaactctggactaccagaaaaaaaaaattttaagttctgtgacttttctgagatactagaacaaaagaagaattaatcttcatctttctcaagaaatagatgttgacaaagaatcacttagcgattctgacatatcaattcccctatcttgaaatgaggtcactgtatgtaaatgatggaattatatcactccatttccaagggtagattttctataagtaaatatctcggaatttgtgtgcttgttttctgaatatatacagttgttttctttaaagatctcttggaattttgcctgttctgtgtgaaataaagtgttttaatgtgcattataggtatgatatagagaatctcctttccatccttgttactaaagggactggacaaataaatcttaaaaccaaaatactgaattaattttgcaagcatggctagtttttaggaagcatgctatcaaaaaaaaaaagactaaaaatgactgaaaaaatccaactgttttatatatatataaatatatatatatttatatatatatataaaggatattctgtaaagttatatgttgtttgacagtaaagccatcaatatttttgctatcaaaatagtataatactagtatctttttgtatgaaaatgtaatctttatataaataatacctctgatatttgcaactgcataatcgttcagtaattcaaaaagacatactagaatcctttttctgaaagtgttccttcaatttgcttttgttgaaaacggtagtccaggacctatgatatccctccacttcattcattatgaaagaaatcccttgtagataaacaagatattggcatctgcatgtaattatccccagattcagctgaaaactcccaacacagatggaattggctagacattttaatatatgtgatacctatatctagatatagaaggctgagagtgagcactggatataattcattttgattgaaattgatatggtgttattgttcttccagttgtctgtcctttgtgtatgttcttatttatatgttgatacactgtaacactatatgctattgctaaataaaattgattgagaaattca

SEQ ID NO: 42436 - DNA, 2778 bp, Artificial Sequence
  derived and/or modified sequence
atttgcagccggacagaaaacctctcccagggctatggagactgcgggaaaaatctggcggctcgcgatggattgctaaggagaactagtcataatcttaaaccaccgaaacctctttccttttttttctttcttttctttcttttctttttttttttttttttttggttgattttaattttagcgccatcgtcttcaatgcttctctgaacagcctttaggaagagtgcgagagaaagagagagagcgcgcgccagggagaggagaaaagaagatgaggattatttccagacagattgtcttgttattttctggattttggggactcgccatgggagcctttccgagcagcgtgcaaataggtggtctcttcatccgaaacacagatcaggaatacactgcttttcgattagcaatttttcttcataacaccagccccaatgcgtcggaagctccttttaatttggtacctcatgtggacaacattgagacagccaacagttttgctgtaacaaacgccttctgttcccagtattctagaggagtatttgccatttttggactctatgataagaggtcggtacataccttgacctcattctgcagcgccttacatatctccctcatcacaccaagtttccctactgagggggagagccagtttgtgctgcaactaagaccttcgttacgaggagcactcttgagtttgctggatcactacgaatggaactgttttgtcttcctgtatgacacagacaggggatactcgatactccaagctattatggaaaaagcaggacaaaatggttggcatgtcagcgctatatgtgtggaaaattttaatgatgtcagctataggcaacttctagaagaacttgacagaagacaagagaagaagtttgtaatagactgtgagatagagagacttcaaaacatattagaacagattgtaagtgttggaaagcatgttaaaggctaccattatatcattgcaaacttgggattcaaggatatttctcttgagaggtttatacatggtggagccaatgttactggattccagttggtggattttaatacacctatggtaatcaaactaatggatcgctggaagaaactagatcagagagagtatccaggatctgagactcctccaaagtacacctctgctctgacttatgatggagtccttgtgatggctgaaactttccgaagtcttaggaggcagaaaattgatatctcaaggagaggaaatgctggggattgtctggcaaatcctgctgctccatggggccagggaattgacatggagaggacactcaaacaggttcgaattcaagggctgacagggaatgttcagtttgaccactatggacgtagagtcaattacacaatggatgtgtttgagctgaaaagcacaggacctagaaaggttggttactggaatgatatggataagttagtcttgattcaagatgtaccaactcttggcaatgacacagctgctattgagaacagaacagtggttgtaaccacaattatgcctctgatgaagaatcctattttaagaaattgatcaagaaagaaaagagttccgcgctgttcgaccattcctaactaaggctcaagtcttgttctccagtgtagtaaatttaagcttatttttcatgtgggattcttcttggatgaccaactctggactaccagaaaaaaaaaattttaagttctgtgacttttctgagatactagaacaaaagaagaattaatcttcatctttctcaagaaatagatgttgacaaagaatcacttagcgattctgacatatcaattcccctatcttgaaatgaggtcactgtatgtaaatgatggaattatatcactccatttccaagggtagattttctataagtaaatatctcggaatttgtgtgcttgttttctgaatatatacagttgttttctttaaagatctcttggaattttgcctgttctgtgtgaaataaagtgttttaatgtgcattataggtatgatatagagaatctcctttccatccttgttactaaagggactggacaaataaatcttaaaaccaaaatactgaattaattttgcaagcatggctagtttttaggaagcatgctatcaaaaaaaaaaagactaaaaatgactgaaaaaatccaactgttttatatatatataaatatatatatatttatatatatatataaaggatattctgtaaagttatatgttgtttgacagtaaagccatcaatatttttgctatcaaaatagtataatactagtatctttttgtatgaaaatgtaatctttatataaataatacctctgatatttgcaactgcataatcgttcagtaattcaaaaagacatactagaatcctttttctgaaagtgttccttcaatttgcttttgttgaaaacggtagtccaggacctatgatatccctccacttcattcattatgaaagaaatcccttgtagataaacaagatattggcatctgcatgtaattatccccagattcagctgaaaactcccaacacagatggaattggctagacattttaatatatgtgatacctatatctagatatagaaggctgagagtgagcactggatataattcattttgattgaaattgatatggtgttattgttcttccagttgtctgtcctttgtgtatgttcttatttatatgttgatacactgtaacactatatgctattgctaaataaaattgattgagaaattca

SEQ ID NO: 42437 - DNA, 470 bp, Artificial Sequence
  derived and/or modified sequence
agaggtgccaggaaaaccaagagaggggcgctgggggtgcccatccccagagtcggtccctctgcgaaccgaggaagaaaagaggagggagtcagcgagtggtcagaagggaaaacctgacaccagactggctccggagcgtccgggagactggggcgctccgcctttaggaagagtgcgagagaaagagagagagcgcgcgccagggagaggagaaaagaagatgaggattatttccagacagattgtcttgttattttctggattttggggactcgccatgggagcctttccgagcagcgtgcaaataggtggtctcttcatccgaaacacagatcaggaatacactgcttttcgattagcaatttttcttcataacaccagccccaatgcgtcggaagctccttttaatttggtacctcatgtggacaacattgagacagccaacagttttgctgtaacaaacgcct

SEQ ID NO: 42438 - DNA, 367 bp, Artificial Sequence
  derived and/or modified sequence
aggctctccagattcccgggctgtttgctgcgccatcgtcttcaatgcttctctgaacagcctttaggaagagtgcgagagaaagagagagagcgcgcgccagggagaggagaaaagaagatgaggattatttccagacagattgtcttgttattttctggattttggggactcgccatgggagcctttccgagcagcgtgcaaataggtggtctcttcatccgaaacacagatcaggaatacactgcttttcgattagcaatttttcttcataacaccagccccaatgcgtcggaagctccttttaatttggtacctcatgtggacaacattgagacagccaacagttttgctgtaacaaacgcct

SEQ ID NO: 42439 - DNA, 1302 bp, Artificial Sequence
  derived and/or modified sequence
atgaggatcatcagccggcagatcgtgctgctcttcagcggcttctggggcctggccatgggcgccttccccagctctgtgcagattggaggcctcttcatccggaacacagaccaggagtacacagccttccggctggccatcttcctgcacaacaccagccccaatgccagcgaggcccccttcaacctggtgccccacgtggacaacattgaaacagccaacagctttgctgtgaccaatgccttctgcagccagtacagccggggcgtgtttgccatcttcggcctgtatgacaagaggtctgtgcacaccctgaccagcttctgcagcgccctgcacatcagcctcatcacccccagcttccccacagaaggagagagccagtttgtgctgcagctgcggcccagcctgcggggggccctgctgagcctgctggaccactatgagtggaactgctttgtgttcctgtatgacacagaccggggctacagcatcctgcaggccatcatggagaaggccggccagaatggctggcacgtgtctgccatctgtgtggagaacttcaatgatgtgtcctaccggcagctgctggaggagctggaccggcggcaggagaagaagtttgtgattgactgtgaaattgagcggctgcagaacatcctggagcagatcgtgtctgtgggcaagcacgtgaagggctaccactacatcatcgccaacctgggcttcaaggacatcagcctggagcgcttcatccacggcggggccaacgtgacaggcttccagctggtggacttcaacacccccatggtgatcaagctgatggaccgctggaagaagctggaccagcgggagtacccaggcagcgagaccccacccaagtacaccagcgccctgacctatgatggagtgctggtgatggccgagaccttccgcagcctgcggcggcagaagattgacatcagcagaagaggaaatgctggggactgcctggccaacccagctgccccctggggccagggcatcgacatggagaggaccctgaagcaggtgcgcatccagggcctgactggaaatgtgcagtttgaccactacggccggcgggtgaactacaccatggatgtgtttgagctgaagagcacaggccccaggaaggtgggctactggaatgacatggacaagctggtgctgatccaggatgtgcccaccctgggcaatgacacagctgccattgaaaatagaacagtggtggtgaccaccatcatgcccctgatgaagaaccccatcctgaggaactag

SEQ ID NO: 42440 - DNA, 249 bp, Artificial Sequence
  derived and/or modified sequence
atgaggatcatcagccggcagatcgtgctgctcttcagcggcttctggggcctggccatgggcgccttccccagctctgtgcagattggaggcctcttcatccggaacacagaccaggagtacacagccttccggctggccatcttcctgcacaacaccagccccaatgccagcgaggcccccttcaacctggtgccccacgtggacaacattgaaacagccaacagctttgctgtgaccaatgcctag

SEQ ID NO: 42441 - DNA, 1302 bp, Artificial Sequence
  derived and/or modified sequence
atgcggatcatcagccggcagatcgtgctgctgttcagcggcttctggggactagccatgggggcttttccttcatcagtccagattggtggcctgttcatccggaatacagatcaggaatacaccgcatttaggctagctatcttccttcataacaccagccccaatgccagcgaagccccattcaacttagtgccacacgtcgacaatatcgaaaccgccaactcctttgctgtgactaatgccttctgttcacagtactctcgaggcgtctttgccatatttggactgtacgataagagaagcgtgcatactttaactagcttctgcagtgccttgcacatctctcttattacaccctcatttccaacagagggtgagtctcagtttgtgctgcagttacggccctctctacgcggcgcccttctctccctcctcgatcattacgaatggaactgttttgtctttctttatgataccgaccgcggatactcgatcctgcaggccattatggagaaggctgggcagaatggatggcatgtttcagccatttgcgtagagaactttaacgatgtgtcgtatagacagctgctggaggagttggaccgcagacaggaaaagaagtttgtcattgactgtgagattgagcgcctgcagaatatcctagagcagattgtctccgtaggtaagcatgtgaaaggatatcactatatcattgcgaacctcggattcaaggacatctcactggagagattcattcatggaggtgctaatgtaactggtttccaacttgttgattttaacactccaatggtgatcaaattaatggaccggtggaagaaactggaccagagggaatacccaggaagcgaaacgcctcctaaatacacttcagctcttacatacgatggcgtcttggtgatggctgaaaccttccgcagcttgcgccgacaaaagattgacatctctaggaggggaaacgccggagattgcctggccaacccggcggcgccctgggggcagggcatcgacatggaacgcacactgaagcaggtacgaattcagggactgactgggaacgtgcagtttgatcattacggtcgccgcgtgaattatactatggacgtgttcgaactaaaaagtacgggcccacggaaggtgggctactggaacgatatggacaaactggttttgatccaggacgtgcctacacttggtaatgacactgccgcaattgaaaatagaacagttgtggttacgacaattatgcctctgatgaaaaacccgatcctgaggaattag

SEQ ID NO: 42442 - DNA, 1302 bp, Artificial Sequence
  derived and/or modified sequence
atgcggatcatcagccggcagatcgtgctgctgttcagcggcttctgggggctcgctatgggtgcctttcctagttcagtccaaattggcggactgttcattcgaaacaccgatcaggagtataccgccttccgcttggccatattcttgcacaatactagtccaaatgcctccgaagcgcccttcaatctagtccctcatgtggataacatagagacagccaatagctttgctgtgactaacgccttttgcagtcagtacagtcgaggtgtgtttgccatcttcggcctctacgacaagcggagcgtccatacactcacctccttttgctcagcattgcacatctccctgattaccccctctttcccaaccgagggtgagtcccaatttgtgctgcaattgaggccctcccttcgcggggctctgctgtctctgctggatcattacgagtggaactgcttcgtgttcctctacgacacagaccgcggctactccattctgcaggccattatggagaaggccggtcagaatggttggcacgtgtctgctatctgtgtcgaaaactttaatgatgtctcctataggcagctgcttgaggagctcgatcggagacaggaaaagaaatttgtgatcgactgtgagattgagcgcctgcagaacatactagagcagatagtcagtgtcgggaagcatgtcaagggatatcattatatcatcgccaatctgggcttcaaggatatcagtctggaaaggttcattcacggaggcgcaaatgtcactggtttccaactggtggactttaataccccaatggttattaagctcatggacaggtggaagaagctcgaccagcgcgaataccctggttccgaaacccctccgaaatacactagtgccctgacatacgacggggtgttagttatggcagagacgtttaggagcctccgtcgacaaaaaatcgacatctcccgtcgaggcaacgcgggcgattgtctcgccaatcctgccgccccttgggggcaggggatcgacatggagcgaaccctcaagcaagtacgaatccagggtttgaccggaaatgtgcaatttgatcactatgggcgcagggtgaattacaccatggatgtgtttgagctgaagtccaccggacctaggaaagtgggctattggaatgatatggataaactggtccttattcaggatgttccaaccctgggaaatgacaccgccgcgatcgagaatcgcacagtagtggtgaccactatcatgcccctgatgaagaatcccatcctgcgtaactag

SEQ ID NO: 42443 - DNA, 249 bp, Artificial Sequence
  derived and/or modified sequence
atgcggatcatcagccggcagatcgtgctgctgttcagcggcttctggggactggcaatgggtgctttcccctctagtgttcagataggtggattattcatcaggaacactgaccaggagtacactgcctttcgactggccatatttctccataacacgagcccaaatgcaagcgaggcacccttcaatctcgtgccacacgtagacaacatagaaacagctaacagctttgctgtcactaatgcatag

SEQ ID NO: 42444 - DNA, 249 bp, Artificial Sequence
  derived and/or modified sequence
atgcggatcatcagccggcagatcgtgctgctgttcagcggcttctggggcctcgctatgggagcgtttcccagttctgtgcagattggcggcctattcatccgcaataccgatcaggaatatacggcctttcgactagcaattttcttacacaacacttccccgaatgctagcgaggccccctttaatctggtgccacacgtcgacaatatcgagactgctaacagctttgcagtcactaacgcctag

SEQ ID NO: 42445 - DNA, 1302 bp, Artificial Sequence
  derived and/or modified sequence
atgcggatcatttccagacagattgtgctgcttttctcaggattctggggtctcgctatgggggctttcccctcttccgttcagattggaggtctcttcatcagaaacacagatcaggagtatactgctttcaggctggctattttcttgcacaatacctcgcctaacgccagcgaagcccctttcaatttagtgcctcacgtggacaacatagagaccgccaactccttcgcagtgacaaatgccttctgcagccaatattccagaggtgtgttcgcgatattcggtctgtatgataagcgatccgtccataccctcacaagcttctgttctgcactccacatttctctgatcacaccaagcttccccacagaaggagagagccagttcgtgctgcagttacggccatcattgcgcggagcgttgctctctttgctggaccactatgaatggaattgcttcgttttcttgtatgacaccgatcggggatattctattctgcaggccataatggagaaggcaggccagaacggctggcatgtctcggcaatctgcgtagagaacttcaacgacgtcagttaccggcagctactcgaagaactggatagaaggcaggaaaaaaaatttgttatcgattgcgaaatcgagcgactgcagaatattctggagcagatagtttccgttggtaagcatgtgaagggatatcactacattatagccaacctgggattcaaggatatatcactggagcggttcatacacggcggagccaacgtgacaggatttcagctggtcgactttaacacccccatggttatcaagctgatggacaggtggaagaaactggaccagcgtgaataccccggatcagaaaccccacccaagtatacaagtgctctgacttacgacggggtcctcgtgatggccgagactttccgatccttgcgcaggcagaaaatagatatctccaggagaggcaatgccggagattgtctcgctaaccccgcagctccttggggacagggtatcgacatggagcggacactgaagcaggtcaggatccagggattaacagggaatgtgcagttcgaccattacggacgcagggtaaactatacaatggacgtgttcgagctcaagtctactggccctcgcaaggtaggctactggaacgatatggataagttagtgctcattcaagatgtcccaacgcttgggaatgacacagccgctatcgagaaccgcactgttgtggtaacaaccatcatgcccctgatgaagaaccccattctccggaattag

SEQ ID NO: 42446 - DNA, 1302 bp, Artificial Sequence
  derived and/or modified sequence
atgcggattatcagccgccagatcgtactgctgtttagcggattttggggcctcgccatgggcgcttttccctcctccgtgcagattggtggactgttcatacgcaacacagatcaggaatacaccgctttccgtttggcaatttttctgcataatacttcccccaatgcatccgaggctccatttaacctggttccccatgtggacaacatagagacagcaaatagcttcgcagtgacgaacgccttttgctctcaatactctaggggtgtgttcgccatctttggactgtacgacaagcggagtgtgcacacacttacctctttctgttccgcactacacatcagtctgatcactccaagcttccccacagagggcgagagtcagtttgtactgcagctgcgaccatccctcaggggagccctcctgtccctgttggaccactacgagtggaactgctttgtgtttctttatgataccgaccgcggatacagcatccttcaggcaatcatggagaaggctggtcagaatggctggcatgtaagcgcgatatgcgtcgaaaatttcaatgacgtgagctacaggcaactgctggaagagctggaccgcaggcaggaaaagaagttcgttatcgactgcgagatcgagagactacagaacatcctggagcagatcgtgtctgtcgggaaacacgtgaagggttatcattacataattgccaatctcgggttcaaagatattagcctggaacgatttatccatggcggagcaaacgtgacgggctttcagctggtggatttcaatacaccaatggtaatcaagctcatggaccgctggaagaaactggaccagcgcgaatatccaggatccgagacacctcctaagtacacatcagcactgacatacgacggtgtgctcgtcatggccgagacattcagatcccttcgccgtcagaaaattgatatatccagacgcggaaatgctggcgattgcttggccaaccctgccgctccctgggggcagggtatagacatggagcggaccctgaaacaggttagaattcagggcttaaccggtaacgtgcaatttgaccactacggcaggcgggtcaactacaccatggacgttttcgaacttaagtctaccggccctcggaaggtgggctactggaatgacatggataaactggttctgattcaggatgtgccgacgttgggaaacgacactgccgcaattgaaaatcgtaccgtagtcgttactacgataatgcccctaatgaagaaccctattcttcgcaactag

SEQ ID NO: 42447 - DNA, 249 bp, Artificial Sequence
  derived and/or modified sequence
atgaggattatcagccgacagatcgtcttactgtttagtgggttctgggggctagccatgggcgctttccccagttccgtccaaatcgggggattgttcatccgcaacacagaccaggagtacactgcgttcaggcttgcaatcttcctgcacaacacaagccctaacgcttctgaagccccattcaatctcgtaccacatgtcgacaatatcgagactgctaactctttcgcagtgaccaacgcgtag

SEQ ID NO: 42448 - DNA, 249 bp, Artificial Sequence
  derived and/or modified sequence
atgaggatcatctcacgtcagatagtccttcttttttcaggcttctggggtctcgcaatgggagcctttccaagcagcgttcagattgggggattatttatcagaaatacggaccaggagtacactgcatttcgacttgctatatttttgcataacaccagtccaaatgcgagcgaagctcctttcaacctcgttccacatgtggataatatcgaaacagccaactcttttgccgtgactaatgcctag

SEQ ID NO: 42449 - DNA, 1302 bp, Artificial Sequence
  derived and/or modified sequence
atgagaatcatcagcagacagatcgtgctgctgttcagcggcttctggggcctggccatgggcgccttccccagcagcgtgcagatcggcggcctgttcatcagaaacaccgaccaggagtacaccgccttcagactggccatcttcctgcacaacaccagccccaacgccagcgaggcccccttcaacctggtgccccacgtggacaacatcgagaccgccaacagcttcgccgtgaccaacgccttctgcagccagtacagcagaggcgtgttcgccatcttcggcctgtacgacaagagaagcgtgcacaccctgaccagcttctgcagcgccctgcacatcagcctgatcacccccagcttccccaccgagggcgagagccagttcgtgctgcagctgagacccagcctgagaggcgccctgctgagcctgctggaccactacgagtggaactgcttcgtgttcctgtacgacaccgacagaggctacagcatcctgcaggccatcatggagaaggccggccagaacggctggcacgtgagcgccatctgcgtggagaacttcaacgacgtgagctacagacagctgctggaggagctggacagaagacaggagaagaagttcgtgatcgactgcgagatcgagagactgcagaacatcctggagcagatcgtgagcgtgggcaagcacgtgaagggctaccactacatcatcgccaacctgggcttcaaggacatcagcctggagagattcatccacggcggcgccaacgtgaccggcttccagctggtggacttcaacacccccatggtgatcaagctgatggacagatggaagaagctggaccagagagagtaccccggcagcgagaccccccccaagtacaccagcgccctgacctacgacggcgtgctggtgatggccgagaccttcagaagcctgagaagacagaagatcgacatcagcagaagaggcaacgccggcgactgcctggccaaccccgccgccccctggggccagggcatcgacatggagagaaccctgaagcaggtgagaatccagggcctgaccggcaacgtgcagttcgaccactacggcagaagagtgaactacaccatggacgtgttcgagctgaagagcaccggccccagaaaggtgggctactggaacgacatggacaagctggtgctgatccaggacgtgcccaccctgggcaacgacaccgccgccatcgagaacagaaccgtggtggtgaccaccatcatgcccctgatgaagaaccccatcctgagaaactag

SEQ ID NO: 42450 - DNA, 249 bp, Artificial Sequence
  derived and/or modified sequence
atgagaatcatcagcagacagatcgtgctgctgttcagcggcttctggggcctggccatgggcgccttccccagcagcgtgcagatcggcggcctgttcatcagaaacaccgaccaggagtacaccgccttcagactggccatcttcctgcacaacaccagccccaacgccagcgaggcccccttcaacctggtgccccacgtggacaacatcgagaccgccaacagcttcgccgtgaccaacgcctag

SEQ ID NO: 42451 - protein, 1548 aa, Artificial Sequence
  derived and/or modified sequence
MPSDFISLLSADLDLESPKSLYSRDSLKLHPSQNFHRAGLLEESVYDLLPKELQLPPSRETSVASMSQTSGGEAGSPPPAVVAADASSAPSSSSMGGACSSFTTSSSPTIYSTSVTDSKAMQVESCSSAVGVSNRGVSEKQLTSNTVQQHPSTPKRHTVLYISPPPEDLLDNSRMSCQDEGCGLESEQSCSMWMEDSPSNFSNMSTSSYNDNTEVPRKSRKRNPKQRPGVKRRDCEESNMDIFDADSAKAPHYVLSQLTTDNKGNSKAGNGTLENQKGTGVKKSPMLCGQYPVKSEGKELKIVVQPETQHRARYLTEGSRGSVKDRTQQGFPTVKLEGHNEPVVLQVFVGNDSGRVKPHGFYQACRVTGRNTTPCKEVDIEGTTVIEVGLDPSNNMTLAVDCVGILKLRNADVEARIGIAGSKKKSTRARLVFRVNIMRKDGSTLTLQTPSSPILCTQPAGVPEILKKSLHSCSVKGEEEVFLIGKNFLKGTKVIFQENVSDENSWKSEAEIDMELFHQNHLIVKVPPYHDQHITLPVSVGIYVVTNAGRSHDVQPFTYTPDPAAGALNVNVKKEISSPARPCSFEEAMKAMKTTGCNLDKVNIIPNALMTPLIPSSMIKSEDVTPMEVTAEKRSSTIFKTTKSVGSTQQTLENISNIAGNGSFSSPSSSHLPSENEKQQQIQPKAYNPETLTTIQTQDISQPGTFPAVSASSQLPNSDALLQQATQFQTRETQSREILQSDGTVVNLSQLTEASQQQQQSPLQEQAQTLQQQISSNIFPSPNSVSQLQNTIQQLQAGSFTGSTASGSSGSVDLVQQVLEAQQQLSSVLFSAPDGNENVQEQLSADIFQQVSQIQSGVSPGMFSSTEPTVHTRPDNLLPGRAESVHPQSENTLSNQQQQQQQQQQVMESSAAMVMEMQQSICQAAAQIQSELFPSTASANGNLQQSPVYQQTSHMMSALSTNEDMQMQCELFSSPPAVSGNETSTTTTQQVATPGTTMFQTSSSGDGEETGTQAKQIQNSVFQTMVQMQHSGDNQPQVNLFSSTKSMMSVQNSGTQQQGNGLFQQGNEMMSLQSGNFLQQSSHSQAQLFHPQNPIADAQNLSQETQGSLFHSPNPIVHSQTSTTSSEQMQPPMFHSQSTIAVLQGSSVPQDQQSTNIFLSQSPMNNLQTNTVAQEAFFAAPNSISPLQSTSNSEQQAAFQQQAPISHIQTPMLSQEQAQPPQQGLFQPQVALGSLPPNPMPQSQQGTMFQSQHSIVAMQSNSPSQEQQQQQQQQQQQQQQQQQSILFSNQNTMATMASPKQPPPNMIFNPNQNPMANQEQQNQSIFHQQSNMAPMNQEQQPMQFQSQSTVSSLQNPGPTQSESSQTPLFHSSPQIQLVQGSPSSQEQQVTLFLSPASMSALQTSINQQDMQQSPLYSPQNNMPGIQGATSSPQPQATLFHNTAGGTMNQLQNSPGSSQQTSGMFLFGIQNNCSQLLTSGPATLPDQLMAISQPGQPQNEGQPPVTTLLSQQMPENSPLASSINTNQNIEKIDLLVSLQNQGNNLTGSF

SEQ ID NO: 42452 - DNA, 4647 bp, Artificial Sequence
  derived and/or modified sequence
atgcccagcgacttcatcagcctgctgagcgccgacctggacctggagagccccaagagcctgtacagcagagacagcctgaagctgcaccccagccagaacttccacagagccggcctgctggaggagagcgtgtacgacctgctgcccaaggagctgcagctgccccccagcagagagaccagcgtggccagcatgagccagaccagcggcggcgaggccggcagccccccccccgccgtggtggccgccgacgccagcagcgcccccagcagcagcagcatgggcggcgcctgcagcagcttcaccaccagcagcagccccaccatctacagcaccagcgtgaccgacagcaaggccatgcaggtggagagctgcagcagcgccgtgggcgtgagcaacagaggcgtgagcgagaagcagctgaccagcaacaccgtgcagcagcaccccagcacccccaagagacacaccgtgctgtacatcagccccccccccgaggacctgctggacaacagcagaatgagctgccaggacgagggctgcggcctggagagcgagcagagctgcagcatgtggatggaggacagccccagcaacttcagcaacatgagcaccagcagctacaacgacaacaccgaggtgcccagaaagagcagaaagagaaaccccaagcagagacccggcgtgaagagaagagactgcgaggagagcaacatggacatcttcgacgccgacagcgccaaggccccccactacgtgctgagccagctgaccaccgacaacaagggcaacagcaaggccggcaacggcaccctggagaaccagaagggcaccggcgtgaagaagagccccatgctgtgcggccagtaccccgtgaagagcgagggcaaggagctgaagatcgtggtgcagcccgagacccagcacagagccagatacctgaccgagggcagcagaggcagcgtgaaggacagaacccagcagggcttccccaccgtgaagctggagggccacaacgagcccgtggtgctgcaggtgttcgtgggcaacgacagcggcagagtgaagccccacggcttctaccaggcctgcagagtgaccggcagaaacaccaccccctgcaaggaggtggacatcgagggcaccaccgtgatcgaggtgggcctggaccccagcaacaacatgaccctggccgtggactgcgtgggcatcctgaagctgagaaacgccgacgtggaggccagaatcggcatcgccggcagcaagaagaagagcaccagagccagactggtgttcagagtgaacatcatgagaaaggacggcagcaccctgaccctgcagacccccagcagccccatcctgtgcacccagcccgccggcgtgcccgagatcctgaagaagagcctgcacagctgcagcgtgaagggcgaggaggaggtgttcctgatcggcaagaacttcctgaagggcaccaaggtgatcttccaggagaacgtgagcgacgagaacagctggaagagcgaggccgagatcgacatggagctgttccaccagaaccacctgatcgtgaaggtgcccccctaccacgaccagcacatcaccctgcccgtgagcgtgggcatctacgtggtgaccaacgccggcagaagccacgacgtgcagcccttcacctacacccccgaccccgccgccggcgccctgaacgtgaacgtgaagaaggagatcagcagccccgccagaccctgcagcttcgaggaggccatgaaggccatgaagaccaccggctgcaacctggacaaggtgaacatcatccccaacgccctgatgacccccctgatccccagcagcatgatcaagagcgaggacgtgacccccatggaggtgaccgccgagaagagaagcagcaccatcttcaagaccaccaagagcgtgggcagcacccagcagaccctggagaacatcagcaacatcgccggcaacggcagcttcagcagccccagcagcagccacctgcccagcgagaacgagaagcagcagcagatccagcccaaggcctacaaccccgagaccctgaccaccatccagacccaggacatcagccagcccggcaccttccccgccgtgagcgccagcagccagctgcccaacagcgacgccctgctgcagcaggccacccagttccagaccagagagacccagagcagagagatcctgcagagcgacggcaccgtggtgaacctgagccagctgaccgaggccagccagcagcagcagcagagccccctgcaggagcaggcccagaccctgcagcagcagatcagcagcaacatcttccccagccccaacagcgtgagccagctgcagaacaccatccagcagctgcaggccggcagcttcaccggcagcaccgccagcggcagcagcggcagcgtggacctggtgcagcaggtgctggaggcccagcagcagctgagcagcgtgctgttcagcgcccccgacggcaacgagaacgtgcaggagcagctgagcgccgacatcttccagcaggtgagccagatccagagcggcgtgagccccggcatgttcagcagcaccgagcccaccgtgcacaccagacccgacaacctgctgcccggcagagccgagagcgtgcacccccagagcgagaacaccctgagcaaccagcagcagcagcagcagcagcagcagcaggtgatggagagcagcgccgccatggtgatggagatgcagcagagcatctgccaggccgccgcccagatccagagcgagctgttccccagcaccgccagcgccaacggcaacctgcagcagagccccgtgtaccagcagaccagccacatgatgagcgccctgagcaccaacgaggacatgcagatgcagtgcgagctgttcagcagcccccccgccgtgagcggcaacgagaccagcaccaccaccacccagcaggtggccacccccggcaccaccatgttccagaccagcagcagcggcgacggcgaggagaccggcacccaggccaagcagatccagaacagcgtgttccagaccatggtgcagatgcagcacagcggcgacaaccagccccaggtgaacctgttcagcagcaccaagagcatgatgagcgtgcagaacagcggcacccagcagcagggcaacggcctgttccagcagggcaacgagatgatgagcctgcagagcggcaacttcctgcagcagagcagccacagccaggcccagctgttccacccccagaaccccatcgccgacgcccagaacctgagccaggagacccagggcagcctgttccacagccccaaccccatcgtgcacagccagaccagcaccaccagcagcgagcagatgcagccccccatgttccacagccagagcaccatcgccgtgctgcagggcagcagcgtgccccaggaccagcagagcaccaacatcttcctgagccagagccccatgaacaacctgcagaccaacaccgtggcccaggaggccttcttcgccgcccccaacagcatcagccccctgcagagcaccagcaacagcgagcagcaggccgccttccagcagcaggcccccatcagccacatccagacccccatgctgagccaggagcaggcccagcccccccagcagggcctgttccagccccaggtggccctgggcagcctgccccccaaccccatgccccagagccagcagggcaccatgttccagagccagcacagcatcgtggccatgcagagcaacagccccagccaggagcagcagcagcagcagcagcagcagcagcagcagcagcagcagcagcagcagagcatcctgttcagcaaccagaacaccatggccaccatggccagccccaagcagcccccccccaacatgatcttcaaccccaaccagaaccccatggccaaccaggagcagcagaaccagagcatcttccaccagcagagcaacatggcccccatgaaccaggagcagcagcccatgcagttccagagccagagcaccgtgagcagcctgcagaaccccggccccacccagagcgagagcagccagacccccctgttccacagcagcccccagatccagctggtgcagggcagccccagcagccaggagcagcaggtgaccctgttcctgagccccgccagcatgagcgccctgcagaccagcatcaaccagcaggacatgcagcagagccccctgtacagcccccagaacaacatgcccggcatccagggcgccaccagcagcccccagccccaggccaccctgttccacaacaccgccggcggcaccatgaaccagctgcagaacagccccggcagcagccagcagaccagcggcatgttcctgttcggcatccagaacaactgcagccagctgctgaccagcggccccgccaccctgcccgaccagctgatggccatcagccagcccggccagccccagaacgagggccagccccccgtgaccaccctgctgagccagcagatgcccgagaacagccccctggccagcagcatcaacaccaaccagaacatcgagaagatcgacctgctggtgagcctgcagaaccagggcaacaacctgaccggcagcttctag

SEQ ID NO: 42453 - DNA, 4647 bp, Artificial Sequence
  derived and/or modified sequence
atgccctcggactttatcagcctgctctcagcggacctggatctggaaagccctaagtctctttatagcagagattcactcaagttgcacccatcacaaaattttcatcgcgcagggctgctcgaggaatcagtgtatgatctgttacccaaggaattacagttacccccatctcgagagacttctgttgcatccatgagccagacgagtggaggagaagccgggtctcctccacccgctgtagtcgctgcggacgcctcttctgccccatcttccagctccatgggaggcgcctgcagcagttttacgaccagttctagtcctactatatattctacgtcagtgacggattctaaagcaatgcaggtggagtcctgcagctcggcagtgggggtcagcaatcgaggggtgtcggaaaaacagctcacctccaatacagtgcagcagcaccctagcaccccaaaacggcacacagtgctgtatatttccccccctccagaggacctgctggataattcacggatgtcgtgccaggatgagggctgtggcctcgaatctgagcagagttgtagcatgtggatggaagactctcctagtaatttcagtaacatgagcacttcctcttataacgacaacacagaggttcctcgaaagtcaaggaaaagaaatcctaaacaaagacctggcgtgaaaaggagggattgcgaggaatccaacatggatatcttcgatgcagactctgctaaggccccacactatgtcctgtctcagctgacgactgataacaagggaaattctaaagctggaaatggcacactggaaaaccagaaagggactggcgtcaagaaatccccaatgttgtgtggacagtaccccgtcaaaagcgagggcaaggaactgaaaatcgttgtgcagccagaaacgcagcaccgtgctcgatatctcactgaggggagtcggggttcggtaaaggacaggacgcagcaggggttccccaccgtgaagcttgagggccataatgaaccggtagtcctccaggtatttgtggggaacgacagcggaagagttaaaccacatggcttttaccaggcatgcagagtcacaggtcgaaatacaactccctgcaaggaggttgacatcgagggcactactgtgatcgaagtgggcctggaccctagcaataacatgactctggctgtggactgcgtcggaatccttaaactcaggaatgcggacgtcgaagctaggatcggtatagcaggctctaagaaaaaatcaactagagctcgcctggtctttcgcgtcaatattatgagaaaagatggtagcaccttgaccctgcagaccccttcatctccaattctctgtacccaacccgccggcgtcccggagattctgaaaaagtccctccactcttgttctgtgaagggtgaagaggaggtgtttctgatcggaaagaactttctgaaggggaccaaggtaatttttcaggaaaacgtgtcggatgaaaattcttggaagtctgaagccgaaattgacatggaattgtttcatcaaaatcaccttatagtcaaggtgccaccctatcatgatcagcacataaccctgccggtctcagtgggaatctacgtggtcaccaacgccgggagatcacatgatgttcagcctttcacttatacaccagaccccgctgcaggtgccttgaacgtcaacgtgaagaaagaaatttctagtccagctcgaccgtgttcctttgaggaagctatgaaagcaatgaaaaccacgggctgtaacctcgacaaggttaacatcatccccaatgctctgatgacgccactaatcccatcctctatgatcaagtctgaagacgttacccctatggaggtcaccgccgagaaaaggtcgtctacaatctttaaaactacaaagtctgtaggctctacacagcagacactggaaaacattagcaacatagccggaaacggctcattcagctcaccatcctccagccatctgccaagcgaaaatgagaagcaacagcagattcaacccaaagcctacaacccagagactctaactaccatccagacccaggacatttcacagcctggaacatttcctgctgtgagtgcctcctctcagctgcccaacagcgatgcccttctgcagcaagctacccagttccagacgcgggaaacccagtcccgggagattctccagtccgatggcactgtggtgaatttgtcacagctcactgaggcatctcagcagcagcaacagtcccccctgcaggaacaagcccagaccctccagcagcagatctcctcaaacattttcccttctcccaatagcgttagccaattgcagaacaccatccagcagctccaggcaggctctttcaccgggagcaccgcctcagggtcaagcggatccgttgatctggtgcagcaggtgctggaggcccaacagcagctgagttctgtgctattcagtgcccctgacggaaacgaaaatgtgcaggagcaactcagtgcagatatcttccaacaggtttcgcaaatccaatccggagtgtcgcctggcatgttttcttcaaccgaacctactgtccatacacgtccagataacctcctcccaggtagagccgaatcagtgcatcctcagtctgagaataccctaagtaaccagcagcaacagcaacaacagcagcaacaggtgatggagagcagcgctgccatggtgatggagatgcagcagtccatctgccaggccgcagcccagattcagagcgaactttttcctagcactgcctcggccaacggaaatctgcaacaatctcctgtctatcaacaaacgtctcacatgatgtctgccctcagtaccaatgaggatatgcaaatgcagtgtgaattatttagcagccccccagctgtcagtggcaacgagaccagcactaccaccacccagcaggtggcgacaccgggaacaacgatgtttcagaccagttctagcggcgatggtgaggaaactgggacacaggcaaagcagattcagaacagcgtgttccaaaccatggtgcagatgcagcatagtggggataaccagcctcaggtgaatcttttctcttccacaaagtctatgatgtctgttcaaaactcaggcacccagcaacagggcaacgggttgttccagcagggcaacgagatgatgagcctccaaagtggcaattttctgcagcaatcatcccactcacaggcccaattgttccacccacaaaaccctatagccgacgcccaaaacctgtcccaggagacccagggcagtctatttcattcccccaatcccatagttcactcccagacgagcaccaccagctctgagcaaatgcagcctcctatgttccattcccagagcactatcgctgtcttgcaggggtcatcagtaccacaagaccagcaatcaaccaatatcttcctgagtcagagccctatgaataacctgcagacaaatactgtagcccaggaggctttttttgccgctccaaattccatttctccactgcaatccacatccaattcagagcagcaagccgctttccagcagcaagccccaatctcccacatccaaacgccaatgctttcccaggagcaggctcagccgcctcagcaggggctgttccagccacaggtagcactcggttcactcccaccaaatcctatgccacaatcacagcaaggtaccatgtttcagtctcagcactcaattgtggctatgcagagcaactcgccctcccaggagcagcaacaacagcagcaacaacagcagcaacagcagcagcaacagcaacagtcgattttgttcagtaaccagaacaccatggcaaccatggcatcccccaagcagcccccacccaatatgattttcaaccccaatcagaatccaatggccaatcaggagcagcagaaccagagcattttccaccagcagtcaaacatggctcctatgaatcaggagcagcaacctatgcagttccagtctcagagcactgtgtcctctctccagaacccaggtccaactcagagcgagtcctcacaaactccgctctttcactcatctccacagatccagctggtgcagggctcaccctcaagccaggagcaacaggtcacactgtttttatcccctgcctcaatgagtgctctccagacttcaatcaatcagcaagatatgcagcagtcgccgctatacagcccccagaataatatgcctggcatccagggcgcgaccagctccccccagccccaggccaccctgttccataataccgcgggtggtaccatgaaccaacttcagaacagtccaggctcaagtcaacagaccagtggcatgtttctgtttggaatccaaaataactgctctcaactcctgacttccgggcccgctaccctccctgaccagctcatggctatcagtcaacctggccagcctcaaaatgaaggacagcccccagtgaccactctgctgtcacagcagatgcccgaaaattccccactcgctagcagcattaatactaatcagaacatcgaaaaaattgacctgttggtgtctctccagaaccaggggaacaatttaacggggtccttttag

SEQ ID NO: 42454 - DNA, 4647 bp, Artificial Sequence
  derived and/or modified sequence
atgccctcagatttcattagccttctgtcagccgatttggatctggaatctcccaagagcctgtatagcagagattccctcaaactgcacccctcacagaatttccaccgggccggccttttagaggagagcgtgtacgacctgttaccgaaagaattacagctaccccctagccgcgagacctcagtagcatcaatgagccaaacctccggcggtgaagcgggttcccccccacccgccgtggtagctgcggacgcgtcctcagctcccagcagctctagcatgggtggagcctgcagtagcttcactacgtcatcttcacccaccatttacagtacctccgttacagactccaaggctatgcaggtggagtcctgctccagtgcggtgggtgtgtccaacaggggcgtatcggagaaacagctgacctcaaataccgtacagcagcacccttcaacgccaaagcgtcatacagtcctgtatatttcacctcccccagaagacctgcttgataactctaggatgtcgtgccaggacgaggggtgcggcctggaaagcgagcagtcttgttccatgtggatggaggattcccctagcaacttcagcaacatgtcaactagctcctacaacgacaataccgaagtcccacgtaaaagtcgtaagcgaaacccgaagcagagacccggtgtaaagcgcagggactgcgaagaatccaatatggacatttttgacgccgattcagccaaagcaccccattatgtgctgagtcagctgacgactgataacaagggcaactcaaaggctggcaacggaacactggaaaaccagaagggcactggggtcaagaagtcaccgatgttgtgtggccagtacccagttaaaagcgagggcaaggagctgaagatcgttgtgcaacctgaaacacagcacagagccagatacctgacagagggtagtagaggcagcgtgaaagacagaacacagcaggggtttcccaccgttaagctggagggccacaacgaacccgtcgtgttacaggtgtttgtagggaacgattcaggtcgcgttaaaccacatggtttctatcaagcctgccgggtcaccggccgaaatactacgccttgtaaagaagtggatattgaagggacaactgttatcgaagttgggctggaccccagtaacaacatgactctggcagtcgattgcgttggcatcctcaagcttcggaacgccgacgtggaggcccggattgggatcgccggctcaaaaaaaaagtcaacccgcgctcgccttgtatttcgcgtgaatatcatgcgaaaggacggctcaaccctgacgctacagacaccctcaagtccgatcttgtgtacgcagccggctggagtaccagaaatcctgaaaaaaagccttcatagctgtagcgtaaagggggaagaagaggtgtttctgatcggaaagaattttctgaaaggaaccaaagtcatctttcaggagaatgtgagcgacgaaaactcatggaaatccgaggctgagatcgatatggagctgttccaccaaaatcacctcattgttaaggttcctccataccatgaccagcacataactctcccagtgagcgtaggtatttacgtcgtgactaatgctggcagaagccatgatgtgcagcccttcacctacacacccgaccctgcagctggcgcactcaatgtgaatgtgaaaaaggagatcagcagcccagcaagaccttgttcatttgaagaggcgatgaaagcaatgaaaactactgggtgcaacctggataaagtcaatattatccccaatgcgctcatgacaccactcattcctagctccatgattaagagcgaagatgtcacaccgatggaggttactgccgaaaaaaggtcatctacaatttttaagaccaccaaatctgtagggagcacgcaacagacattggagaacatcagcaatatcgcaggcaacggatccttttcttcaccctcatcttctcatctcccatccgagaatgaaaaacagcagcaaattcagccgaaagcctacaatcctgagacccttaccacaatccagacacaggacataagccagcctggcacctttcccgctgtcagtgcgtccagccagctgcccaactctgatgccctgctccagcaagcaacccaatttcagacgcgtgagactcagagccgggagattttacaaagtgacggcaccgtggtaaacctgtctcaactgacagaggcttcacagcaacagcagcagtcaccacttcaggaacaggctcagactctccaacagcaaattagctcaaatatctttcctagccccaactcagtgtcacagttgcagaacaccatacagcagctacaagctggttcttttaccggaagtacagctagtggctcatccgggtcggtcgatctggtccagcaggtcttggaggctcaacagcagttatcttctgtgctgttcagcgcacctgacgggaacgaaaatgtgcaggaacagttgagcgccgacatcttccaacaggtgtcccaaatccagagcggagtgtcaccagggatgttctccagtaccgagcccactgtgcatacaagacccgacaatttactgccaggtagagctgagtcagtgcacccacagagcgagaataccttgtccaaccagcagcaacagcaacagcagcaacagcaggtgatggaaagctccgctgcaatggttatggagatgcagcagagcatatgtcaggccgcggctcaaattcaaagcgagctgtttccaagtactgcgagtgccaatggtaacttgcaacagagcccagtataccagcagacatctcacatgatgtctgcactttccacgaatgaagacatgcagatgcagtgtgagctcttttcttcccctcctgccgtcagtggaaatgagacctctaccacgaccacacaacaagtggcaactccaggaacaaccatgttccagacgtcgagttcaggagatggggaagagaccggaactcaggcgaaacaaatccagaactccgtgttccagacgatggtccaaatgcagcactcgggcgacaatcaaccccaggtcaacttatttagctctactaagtccatgatgtctgttcaaaatagcggaacccagcagcaagggaacgggcttttccagcagggtaacgaaatgatgtcactgcaaagtggtaatttcctgcaacagtcttctcactcacaggcgcagctcttccacccccagaaccctattgccgacgcccagaatctgtcccaggagacacaggggtccctttttcactcccctaaccccattgtccactcacagacatccactacatcatctgagcagatgcagcccccaatgttccattcgcagtcgacaattgcggtgctgcaggggagctccgtgcctcaggaccagcaatcgacaaatatcttcctcagccagtctccgatgaataacttacagaccaatactgttgcacaggaggctttctttgccgccccgaatagcatttcccctttacaaagcacaagtaattcagagcagcaagcagctttccagcagcaggctcctatttcacacatccagacgcctatgcttagccaggagcaggcccaacctccacagcagggactctttcagccacaagttgccctcggcagcctcccacctaaccccatgccccaaagccaacaaggtactatgttccaatcacagcactccattgtggccatgcaaagcaattctcctagccaagaacaacagcaacagcagcaacaacaacagcagcagcagcagcaacagcagcaaagtattctgttttccaaccaaaatactatggccaccatggcgtcccccaaacaacctccaccaaacatgatcttcaaccccaatcagaaccccatggctaatcaggaacaacagaatcaaagtatctttcaccagcagtctaacatggccccaatgaatcaggagcaacagcccatgcagttccaaagccagtccacagtgagctcgttgcagaacccagggcccacacagtcagaaagctcccagacccctctctttcactcaagcccacagatacagctggtccagggatccccctcatcccaagaacagcaggtgactttattccttagccccgcgtccatgtccgccctccagacaagtattaatcagcaggacatgcagcagagcccactgtatagcccccagaacaatatgccgggaatccaaggggcaactagctctcctcagccgcaggcaacactttttcacaacaccgcagggggaaccatgaatcagttacaaaactccccagggtctagtcagcaaacgtccggaatgtttctgtttgggatccagaacaactgcagtcagctgctgacctcaggaccggccaccctgccagatcagctgatggctatttctcagcccggccagcctcagaatgagggccagcctccagtgacaacactgctgagccaacagatgcccgagaacagccccttagcctccagcataaacacgaaccagaacattgagaagatcgatctgttagtctcgctgcagaatcaggggaataatctcaccggaagtttctag

SEQ ID NO: 42455 - DNA, 4647 bp, Artificial Sequence
  derived and/or modified sequence
atgcccagcgacttcatcagcctgctgtctgctgacctggacctggagagccccaagagcctgtacagccgggacagcctgaagctgcaccccagccagaacttccaccgggccggcctgctggaggagagcgtgtatgacctgctgcccaaggagctgcagctgccccccagccgggagacctctgtggcctccatgagccagaccagcggcggggaggccggcagccccccacctgctgtggtggccgcagatgccagcagcgcccccagcagcagctccatgggcggggcctgcagcagcttcaccaccagcagcagccccaccatctacagcacctctgtgacagacagcaaggccatgcaggtggagagctgcagcagcgctgtgggcgtgagcaacagaggagtgtctgagaagcagctgaccagcaacacagtgcagcagcaccccagcacccccaagaggcacacagtgctgtacatcagccccccacctgaggacctgctggacaacagcaggatgagctgccaggatgagggctgcggcctggagagcgagcagagctgcagcatgtggatggaggacagccccagcaacttcagcaacatgagcaccagcagctacaatgacaacacagaggtgcccaggaagagcaggaagaggaaccccaagcagaggcctggggtgaagaggcgggactgtgaggagagcaacatggacatctttgatgctgacagcgccaaggccccccactacgtgctgagccagctgaccacagacaacaagggcaacagcaaggctggaaatggcaccctggagaaccagaagggcactggagtgaagaagagccccatgctgtgtggccagtaccctgtgaagtctgagggcaaggagctgaagatcgtggtgcagcctgagacccagcaccgggcccgctacctgacagagggcagccggggctctgtgaaggacaggacccagcagggcttccccaccgtgaagctggagggccacaatgaacctgtggtgctgcaggtgtttgtgggcaatgattctggccgggtgaagccccacggcttctaccaggcctgccgggtgacaggcaggaacaccaccccctgcaaggaggtggacatcgagggcaccaccgtcatcgaggtgggcctggaccccagcaacaacatgaccctggccgtggactgtgtgggcatcctgaagctgagaaatgctgatgtggaggccagaattggaattgctggcagcaagaagaagagcacccgggcccggctggtgttccgggtgaacatcatgaggaaggatggcagcaccctgaccctgcagacccccagcagccccatcctgtgcacccagcctgctggggtgcctgagatcctgaagaagagcctgcacagctgcagcgtgaagggggaggaggaggtgttcctgattggcaagaacttcctgaagggcaccaaggtgatcttccaggagaatgtgtctgatgaaaattcctggaagtctgaggccgagattgacatggagctgttccaccagaaccacctgattgtgaaggtgcccccctaccatgaccagcacatcaccctgcctgtgtctgtgggcatctacgtggtgaccaatgccggccgcagccatgatgtgcagcccttcacctacaccccagaccctgctgctggggccctgaatgtgaatgtgaagaaggagatcagcagccctgcccggccctgcagctttgaggaggccatgaaggccatgaagaccaccggctgcaacctggacaaggtgaacatcatccccaatgccctgatgacccccctcatccccagctccatgatcaagtcagaagatgtgacccccatggaggtgacagctgagaagaggagcagcaccatcttcaagaccaccaagtctgtgggcagcacccagcagaccctggagaacatcagcaacattgctggaaatggcagcttcagcagccccagcagcagccacctgcccagtgaaaatgagaagcagcagcagatccagcccaaggcctacaaccctgagaccctgaccaccatccagacccaggacatcagccagcccggcaccttccctgctgtgtctgccagcagccagctgcccaacagtgatgccctgctgcagcaggccacccagttccagacccgggagacccagagccgggagatcctgcagagtgatggcaccgtggtgaacctgagccagctgacagaggccagccagcagcagcagcagagccccctgcaggagcaggcccagaccctgcagcagcagatcagcagcaacatcttccccagccccaacagcgtgtcccagctgcagaacaccatccagcagctgcaggccggcagcttcaccggcagcacagccagcggcagcagcggctctgtggacctggtgcagcaggtgctggaggcccagcagcagctgagctctgtgctcttcagcgccccagatggaaatgaaaatgtgcaggagcagctgtctgctgacatcttccagcaggtgtcccagatccagagcggcgtgtccccaggcatgttcagcagcacagagcccaccgtgcacaccaggccagacaacctgctgcccggccgggcagagagcgtgcacccccagagcgagaacaccctgagcaaccagcagcagcagcagcagcagcagcagcaggtgatggagagcagcgctgccatggtgatggagatgcagcagagcatctgccaggccgccgcccagatccagagcgagctgttccccagcacagccagcgccaacggcaacctgcagcagagccctgtgtaccagcagaccagccacatgatgtctgccctgagcaccaatgaagacatgcagatgcagtgtgagctgttcagcagccccccagctgtgtctggaaatgagaccagcaccaccaccacccagcaggtggccaccccaggcaccaccatgttccagaccagcagcagtggagatggagaggagaccggcacccaggccaagcagatccagaacagcgtcttccagaccatggtgcagatgcagcacagcggggacaaccagccccaggtgaacctcttcagcagcaccaagtccatgatgtctgtgcagaacagcggcacccagcagcagggcaatggcctcttccagcagggcaatgagatgatgagcctgcagagcggcaacttcctgcagcagagcagccacagccaggcccagctgttccacccccagaaccccatcgcagatgcccagaacctgagccaggagacccagggcagcctcttccacagccccaaccccatcgtgcacagccagaccagcaccaccagcagcgagcagatgcagccccccatgttccacagccagagcaccatcgctgtgctgcagggcagctctgtgccccaggaccagcagagcaccaacatcttcctgagccagagccccatgaacaacctgcagaccaacacagtggcccaggaggccttctttgctgcccccaacagcatcagccccctgcagagcaccagcaacagcgagcagcaggccgccttccagcagcaggcccccatcagccacatccagacccccatgctgagccaggagcaggcccagcccccccagcagggcctcttccagccccaggtggccctgggcagcctgccccccaaccccatgccccagagccagcagggcaccatgttccagagccagcacagcatcgtggccatgcagagcaacagccccagccaggagcagcagcagcagcagcagcagcagcagcagcagcagcagcagcagcagcagagcatcctcttcagcaaccagaacaccatggccaccatggccagccccaagcagcccccacccaacatgatcttcaaccccaaccagaaccccatggccaaccaggagcagcagaaccagagcatcttccaccagcagagcaacatggcccccatgaaccaggagcagcagcccatgcagttccagagccagagcacagtgagcagcctgcagaaccctggccccacccagagcgagagcagccagacccccctcttccacagcagcccccagatccagctggtgcagggcagccccagcagccaggagcagcaggtgaccctcttcctgagccctgcctccatgtctgccctgcagaccagcatcaaccagcaggacatgcagcagagccccctgtacagcccccagaacaacatgcctggcatccagggcgccaccagcagcccccagccccaggccaccctcttccacaacacagctgggggcaccatgaaccagctgcagaacagccctggcagcagccagcagaccagcggcatgttcctgtttggcatccagaacaactgcagccagctgctgaccagcggccctgccaccctgcctgaccagctgatggccatcagccagcccggccagccccagaatgaaggccagccccctgtgaccaccctgctgagccagcagatgcctgagaacagccccctggccagcagcatcaacaccaaccagaacatcgagaagattgacctgctggtgtccctgcagaaccagggcaacaacctgaccggcagcttctag

SEQ ID NO: 42456 - DNA, 4647 bp, Artificial Sequence
  derived and/or modified sequence
atgcccagcgacttcatcagcctgctgagcgccgacctggacctggagagcccaaaatcactctattctagggacagcctgaagctgcacccaagccagaatttccacagagctggcctgttggaagagtctgtgtacgacctcctgcctaaggagttacagctgccccccagccgagaaactagcgtggcctcaatgagccagacgtctggcggcgaagccggttcgcctccacccgctgtagtggcagccgatgcatctagtgcaccaagctcatcctctatgggtggcgcatgttcctctttcactacaagctcatcccccaccatatacagtacatcagtcacggacagcaaagcaatgcaagtagagtcgtgctccagtgcagtcggggtgtcaaatcgtggagtttcggagaaacagctaacttctaatacagttcaacagcacccttcaacgcctaagaggcatactgtgctgtacatcagtccacctcctgaggatctgctggataattcccgcatgagctgtcaagatgagggatgcggtcttgaaagtgaacaatcatgcagcatgtggatggaagactctccctctaatttcagcaatatgtcaactagctcctacaatgacaacacagaagtacccaggaagagtcgaaaacggaaccccaaacagaggcccggggtgaagcggcgcgactgtgaagaatcaaatatggatattttcgacgcagatagtgcaaaggctcctcactatgtgctgtctcaactgacaactgataacaaggggaattctaaggcgggcaacggcactctggaaaaccagaagggcaccggtgtcaaaaaatctccaatgctgtgtggacaatatcccgtgaagagcgaagggaaagaactgaagattgtggtccagcctgaaacccagcatcgtgctcgctacctcacagagggctcacgtgggtcagtgaaagacaggacccagcagggctttcctacagttaagcttgaaggtcacaacgagcctgtagtgctccaagtgttcgtgggcaacgattccggtcgggtgaagcctcacggtttttatcaggcctgtcgcgttactggtcggaataccacaccatgcaaagaggtggacatcgaaggcactaccgtgattgaggttggactggatccatctaacaacatgactttggcggtggattgcgtcggaattttaaaacttagaaatgcagatgtcgaagctcgcataggcatcgccggctccaagaagaaatccacccgcgcccgcctggtgtttagagtgaacatcatgaggaaagatggctctaccctcacgcttcagacgccgtcttctcccattttgtgtacccaacccgcaggggtacctgagatcttgaaaaagtctctacacagttgctcggtgaagggcgaagaagaggtgtttttgattgggaagaacttcctcaagggcacaaaggttatattccaggagaacgtcagcgatgaaaatagttggaagagtgaagctgaaattgatatggagctcttccaccagaaccacctgatcgtaaaggtgcccccataccacgaccagcacattacccttccggtgtcagtgggtatttatgtagttacaaatgcaggcagaagtcacgacgtgcaacctttcacatacacccctgatccagccgcaggggcccttaacgtgaacgtgaagaaggaaatatcttctcccgcgagaccttgctccttcgaggaggccatgaaagctatgaagaccaccggctgtaacctggacaaggtcaatatcattccaaacgcactgatgactccgctcatcccgtcctccatgatcaaaagtgaggacgtgacccctatggaagtcaccgccgaaaaacggtcttctactattttcaaaaccaccaagtcagtggggtctactcagcagactcttgaaaatattagcaatatagccggtaacggatccttctcatccccctcaagttctcacttgccgtcagagaatgaaaagcagcagcaaatccagcccaaggcctataacccagagactctaactactatccagacccaggacatatcacagcccggcactttccccgccgtgagcgcatccagccagctgcctaattccgacgccttgctgcagcaggccactcagtttcaaacacgcgaaacgcaaagcagagagattctgcagtccgacggcaccgtcgtgaatctttcccagctcacggaagcaagccagcagcagcagcagtctccgctccaggagcaggcacagactttgcaacaacagatcagtagcaatattttcccaagtcctaactcagtgtcacaactgcagaataccatacaacagttgcaggccggaagctttactggcagtacagcctctggtagtagcgggagtgtggacctagtccagcaggtactggaagctcagcagcagctttcttctgtgttgttttcagctccagacggtaacgagaacgtccaggagcagctgtcagcagatatcttccagcaggtctcacagatccaaagtggtgtcagtcctgggatgttctcctcgacggagccgacagtgcacactcggcccgataatctcctgccgggacgcgccgagagcgtccaccctcagtctgaaaacaccctgagcaaccaacaacagcagcaacagcagcagcagcaagttatggaaagcagcgcggctatggtgatggagatgcaacagagtatatgtcaagccgctgcgcagattcagagcgaactgttccccagtacagcctccgctaacggaaatttgcagcagtctcccgtttatcagcagacctcacatatgatgtcagccctgagtacaaatgaggatatgcagatgcaatgtgagcttttctctagtcctcctgccgtatccgggaacgagacatcaacaacaacgacacaacaggtggcgacacccggcaccactatgttccaaacatctagctcgggggacggagaggaaactggcacacaggcaaaacagattcagaactccgtctttcagacgatggttcagatgcaacatagcggagataaccaaccacaggtgaacctcttttcttctaccaaaagcatgatgtctgtgcaaaatagcggcactcagcagcagggtaacgggcttttccagcagggaaatgaaatgatgtccctgcagtccggtaactttctgcaacagtcctctcattcccaggctcagctttttcacccccagaacccaatagctgatgctcagaacctgtctcaggagactcagggttccttgtttcacagcccaaatcccatagttcattcccagaccagcactacttcttctgaacaaatgcagccgccaatgttccacagccagtccaccatagccgtgctgcaggggtctagcgtgccacaggaccagcaatctactaatatctttctgtcacaaagcccgatgaataacttacagacgaatactgtggcccaggaagccttttttgccgctcccaactccatcagccccttacagtctacatctaactctgaacagcaagccgcatttcagcagcaggcacccatcagtcacatccagacgcctatgctatcacaagagcaagcacaaccaccacaacagggactgttccagccgcaggtcgcccttggatcactgccaccgaatcccatgccccagtcccaacaaggaaccatgttccaatcccagcactctattgtagctatgcaaagcaatagccccagccaagagcagcaacagcagcagcagcaacagcagcagcagcaacagcagcaacaacagtccattcttttcagcaaccagaacacgatggcaactatggcttctcctaaacaacccccaccgaacatgattttcaacccaaatcaaaatccaatggcaaatcaagagcagcagaaccagagcatttttcatcaacagagcaatatggcaccaatgaaccaggaacagcagccaatgcaattccagagtcagtcgaccgtttcaagcctgcagaatcctggacccacgcagtctgaaagcagtcagacacctctgtttcatagctcccctcaaatccagctggtgcagggtagccctagcagccaggaacagcaagtgactctgttcctgtcgccggccagcatgtccgcgctgcagacttccattaaccagcaggacatgcagcagagccccctgtatagcccgcaaaataacatgccagggattcaaggtgccacgtccagcccccagccccaggccactctatttcataatacagccggtggaacaatgaaccagctgcagaacagccccggctcgtcccagcagacatcagggatgttcttattcggcatccaaaacaattgtagtcagctgttgaccagtgggccagccactctcccagatcaacttatggccattagtcagcccggacagccgcagaatgaggggcagcctcccgtgacaactctcttgtcccagcagatgcccgaaaatagcccccttgcgtcttctattaataccaatcaaaacattgaaaagattgacctgttggtctcattacaaaaccagggcaataatctgactgggtcattctag

SEQ ID NO: 42457 - DNA, 4647 bp, Artificial Sequence
  derived and/or modified sequence
atgcccagcgacttcatcagcctgctgagcgccgacctggacctggagagtcccaagtccctgtactctcgcgactcgttgaaacttcacccttcccaaaatttccacagagccggtctcttggaagaaagcgtttatgatctcctgcccaaagagcttcagttgccccccagtcgtgaaacatccgtcgcgtctatgtctcaaaccagcggtggtgaggcaggaagtcccccaccagcagttgtggccgctgacgcctcttccgctcctagttcctcaagcatggggggggcctgttcctctttcacaacttcatcttcacctaccatttactccacgagtgtgaccgacagcaaggcaatgcaggttgagtcttgtagctccgctgtcggagtgagcaacagaggtgtctccgaaaaacagctgaccagcaacaccgtgcagcaacatccttctacaccgaaaaggcacacggtgctatatattagcccaccgccggaggacttattagataactccaggatgtcttgccaagatgaaggttgtggcctcgagagcgaacagtcttgctctatgtggatggaggattcccctagtaacttcagtaatatgtccaccagctcatataacgacaacaccgaggtccctcggaagtcgaggaagaggaatcccaagcagcgacccggggttaaaaggagagactgtgaggagtctaatatggatatctttgatgcggactccgccaaggctccacactacgtcctgagccaactcacgacagataacaaagggaatagcaaggcaggtaatggcacgttagaaaatcagaaggggactggcgtaaagaaatctcctatgttatgcggccagtaccccgtgaagagtgagggcaaagaactgaagatcgtggttcagcctgagacccagcatagggccagatatctgacagaaggaagtcgcggtagcgtaaaagatcgtacacagcagggattcccaaccgtgaaactcgaagggcacaacgaacctgtggttttgcaagtcttcgttggaaacgattccggtagggttaagccgcacgggttctatcaggcttgtagagtaaccggccggaacacaacaccttgtaaggaggttgatatagagggcacgaccgtcatagaagtgggtctggacccgtccaataacatgactcttgctgttgattgcgtaggaattctgaaactgaggaacgccgacgtagaagcaaggattgggattgcaggatcaaaaaagaagagcacgcgggctcgcctcgtgtttcgcgtcaatatcatgcgtaaggacggttctaccctgactctgcaaacaccaagctcccccattctttgcactcagcctgctggcgtgcctgagatattaaaaaagtcactgcactcctgctcggtgaaaggcgaggaagaggtgttccttattggcaagaattttttgaaaggcaccaaagtcatcttccaggagaatgtttctgatgagaacagctggaagagtgaggcagaaatcgacatggagttgtttcaccaaaaccatctgattgtgaaagttcccccctaccacgatcaacacataacgctccccgtttccgtcggcatctatgttgtgacaaacgccggcagaagccacgacgttcaaccctttacatatacccctgaccccgcggccggggctctaaacgtgaacgtgaaaaaggagatcagcagtcctgcacgcccttgctccttcgaggaggcaatgaaggccatgaaaaccaccggttgcaatctggacaaggtgaatataatacccaacgcgctcatgacccctctcataccgtctagcatgatcaagtccgaagatgtgacaccaatggaggtgacagccgagaaaagaagttcaaccatctttaaaacaacaaaaagtgtcggttcgacacaacaaaccctcgaaaatatttctaacatcgcaggcaacggctccttctccagtccctcttcctcccacctccccagtgagaacgaaaagcagcagcagatccaaccaaaagcgtacaaccccgagactctgaccaccatacagactcaagacatctcgcagcctggaaccttccccgctgtttcagcgagcagccaactgcccaattcagacgcactgctccagcaggcaacgcaattccagaccagagaaactcagtccagagaaatcctccagtccgatgggactgtcgttaatttgtctcagctgaccgaagccagccagcagcaacagcaatcacctctgcaggaacaggcccagactctgcagcaacagatctctagcaatatcttcccctcccccaactccgtgtcccagctccagaacacaattcaacagctgcaagctggatcttttacaggctcaacagcgtctggttcttccggctctgtggatctggttcaacaagtactcgaggcgcaacagcaacttagttcagtgttgttttctgccccggatggcaatgagaatgtccaggagcagctctctgcagatattttccagcaggtaagtcaaatccagtctggggtcagtcctggtatgttttcaagtactgagcctaccgtccatactagacccgataacctgcttccgggcagagcagagtcagtgcacccacagtctgagaacacccttagcaatcagcaacagcaacagcagcagcagcagcaagtgatggagtcaagtgcagccatggtgatggagatgcagcaaagcatttgccaagccgccgcacagattcagtccgaattgttcccctcgacggcctccgccaatggcaacctccaacaaagcccggtctaccaacaaaccagtcatatgatgtctgcactgtctactaatgaagatatgcagatgcaatgcgaactcttttctagtccacccgccgtgtcaggaaacgagacctctactacgaccacccagcaggtcgccactcctggtaccaccatgtttcagacctcctccagcggagatggcgaggagaccggaacgcaagcaaaacagatccaaaacagcgtctttcagaccatggtgcagatgcaacactctggcgataatcagccccaagtcaatctgttttctagcactaagagtatgatgtccgttcagaactcaggcacccaacagcagggaaatggtctctttcagcagggtaacgagatgatgtctctccaatccgggaactttcttcagcagtcttctcattctcaagctcagctcttccacccccaaaatcctatcgcagatgctcagaacctgtcccaagaaactcagggcagtctgttccacagtcctaacccaattgtacacagtcagacttctacaacttccagtgaacagatgcagccgcccatgttccactcccagtccaccatcgccgtgctgcaaggcagtagtgtcccccaggaccaacagagtaccaacatctttcttagccaaagccccatgaacaatcttcaaaccaacactgtggcccaggaggccttttttgctgcccctaactctatctcgccgttgcagagcactagtaactctgaacagcaggccgcttttcaacagcaggcaccgatttcacacatccagactcctatgctgagccaagaacaggcccagcctccacagcaggggctgttccaacctcaagtcgccctgggttctctccctcccaacccaatgccccaatctcagcagggcacaatgttccaatcgcagcactccatcgttgccatgcagtcaaattctccctctcaggagcagcagcagcaacaacaacagcagcagcagcagcagcagcaacaacaacaaagcatactcttcagcaaccagaacaccatggctaccatggcctcccctaagcaacccccccccaatatgatattcaatccgaatcagaaccctatggcaaaccaggagcagcaaaaccagagtatattccaccagcaatccaacatggcccctatgaatcaggagcagcagcctatgcagttccagtcccagagcaccgtcagcagtctgcagaacccaggaccaacccagtccgagagcagccagactcccctgttccacagctcccctcagattcaactggttcaggggagcccttcaagccaggaacagcaagttaccctcttcctgtcccccgcttccatgtctgcactacagacatcaatcaatcaacaggacatgcaacaatctcctctctacagccctcagaataatatgcccggcattcagggggcaacaagtagtcctcagccccaggccacgctcttccacaacactgctggagggacaatgaatcagctgcagaattctccgggatcctcccagcaaacctcaggcatgtttttattcggaattcaaaataattgttcccagctattaacttccggtcctgctactctccccgatcagctgatggcaatctcacaacctgggcagccacaaaacgagggccagccacccgtcacaaccctcttgagccagcagatgccagagaattcccccctggccagcagtatcaacactaatcagaatattgagaaaattgatctcctcgtgtctctccagaaccagggtaataacttaacagggagcttttag

SEQ ID NO: 42458 - DNA, 6376 bp, Artificial Sequence
  derived and/or modified sequence
ccgtcctgaacccctctcctggtcaccgagaatcagtccccgtggagttccccctccacctcgccatcgtttcctcggtcctcggcccagtggaagtcactaccctcgaggaggaggcagcggcagccgccctcgcgtcgccgcccccggttcggtgcccgcggtcccggagaggaggtgccgccgccaccgccgctccccccctcccgctgccctcgggccgggctgggtcgagctgcgatgccctcggacttcatctcattgctcagcgcggacctagacctggaatcgcccaagtccctctactcgcgagattctctgaagttacacccatcacagaattttcatagagctggactattggaagaatctgtctatgatcttctcccaaaggagttacagttacctccatctagagaaacatctgtagcatcaatgagtcagacaagcggtggtgaggcaggctcgcctcctccagctgttgttgctgctgatgcttcttcagctccctcctcttcctccatgggcggtgcttgcagctcctttaccacctcttccagccctaccatttattctacctcagtcaccgacagcaaggctatgcaagtggagagctgctcctcagccgtgggggtaagtaacagaggggtaagtgaaaagcagttaaccagtaacacagttcagcagcatccatcaacaccgaagaggcacacagtcttgtacatctcaccaccacctgaggacttgctggataacagtcggatgtcctgccaggatgaggggtgtggattggaatctgagcagagctgcagtatgtggatggaggattccccctccaacttcagtaacatgagcaccagttcctacaatgataacactgaggtacctcgtaaatcacgaaaacgaaatccaaagcagaggccgggggtcaaacgacgagattgtgaagaatctaatatggatatatttgatgccgacagtgccaaagcacctcactatgtgctttctcagcttaccacggacaacaaaggcaactcaaaagcgggaaatggaacattggaaaaccaaaaaggaactggagtaaagaagagccctatgttgtgtggacaatatcctgttaaaagtgagggaaaggagctgaagatagttgtacaacctgagacacagcaccgagctcggtacctgactgagggcagccgtggctcagtgaaagatagaacacagcaaggctttcctacagtaaagctggaaggccataatgaacctgtagtgttgcaagtgtttgtgggcaacgactctggacgagtgaaaccacatggattttatcaggcctgcagagtaactggacgaaatacaactccttgcaaagaagtggacattgaaggcactactgttatagaagtcggccttgatcctagcaacaacatgacactggcggtggactgcgtagggatattgaaattgaggaatgctgatgtcgaagccagaataggaattgctggttccaagaagaaaagcactcgtgccagattggtttttcgagttaatatcatgaggaaagatggctccactttgacactgcaaacaccctcttctccaattttgtgtactcagccagcaggagtgccagaaatcttaaagaaaagcttgcatagctgttcagtgaaaggagaagaagaagtgtttttaatcggcaagaactttctgaaaggaactaaagttattttccaagaaaatgtttctgatgaaaactcttggaagtcagaagctgaaattgatatggaactatttcatcagaatcatcttattgtgaaggttcctccctatcatgaccaacatataactttgcctgtgtcagtgggaatatatgtagtgacaaatgctggaagatctcatgatgttcaaccattcacttacactccagacccagcagctggtgctttgaatgtaaatgtgaagaaggaaatatctagtccagcaagaccttgctcttttgaagaggccatgaaagcaatgaaaactactggatgtaatttagataaggtaaatattatccctaatgccctgatgactccactcataccaagcagtatgattaagagtgaagatgttactccaatggaagtaacagcagaaaaaagatcttccactatttttaagactacaaagtctgttggatcaactcagcaaacattagaaaacatctcaaacatagcaggaaatggctctttttcatcaccatcatcttcccacctaccttctgaaaatgaaaaacagcagcagattcagcccaaggcatacaacccagagaccctgacaactattcaaacccaggacatctcacagcctggtacttttccagcagtttctgcttctagtcagctgcccaacagcgatgcactattgcagcaggctacacagtttcagacaagagaaactcagtctagagagatattacagtcagatggtacagtggttaatttgtcacaactgactgaggcatcacaacaacagcagcagtcaccactacaagaacaagcacagactttacagcagcagatttcatcaaatatttttccatcaccaaatagtgtgagtcagcttcagaatactattcagcagctgcaagcagggagtttcacaggcagtactgctagtggcagcagtggaagtgttgacttggtccaacaagttttagaggcacagcagcagttatcttcagttttattttctgctccagatggtaatgagaatgttcaagagcagcttagtgcagatatttttcaacaagtcagtcaaattcagagtggtgtaagccctggaatgttttcctcaacagagccaacagtccataccagaccagataatttattacctggaagagctgaaagtgttcatccacagtctgaaaacacgttatctaatcaacagcagcagcagcagcagcaacagcaagtgatggaatcttcagccgcaatggtgatggagatgcaacagagtatctgccaggcagctgcccagattcagtcagagttattcccttcaactgcttcagcaaatggaaaccttcagcaatcgccagtttaccagcagacttctcacatgatgagtgcattgtctaccaatgaggatatgcaaatgcagtgtgaattgttttcttctcctcctgcagtttctggaaatgaaacttctacaactaccacacagcaggttgcaacccctggcactaccatgtttcagacatcaagttcaggagatggagaagaaactggaacacaagcaaaacagattcagaacagtgtctttcagaccatggtccaaatgcaacatagtggggacaatcaacctcaagttaaccttttttcatccacaaaaagtatgatgagtgttcagaatagtggtacccaacaacaaggtaatggtttattccagcaagggaatgagatgatgtcacttcaatctggaaattttttgcagcagtcttctcattcacaggcccaactttttcatcctcaaaatcctattgccgatgctcagaacctttcccaggaaactcaaggttctctctttcatagtccaaatcctattgtccacagtcagacttctacaacctcctctgaacaaatgcagcctccaatgtttcactctcaaagtaccattgctgtgttacagggctcttcagttcctcaagaccagcagtcaaccaacatatttctttcccagagtcccatgaataatcttcagactaacacagtagcccaagaagcattttttgcagcaccgaactcaatttctccacttcagtcaacatcaaacagtgaacaacaagctgctttccaacagcaagctccaatatcacacatccagactcctatgctttcccaagaacaggcacaacccccgcagcagggtttatttcagcctcaggtggccctgggctcccttccacctaatccaatgcctcaaagccaacaaggaaccatgttccagtcacagcactcaatagttgccatgcagagtaactctccatcccaggaacagcagcagcagcagcaacagcagcagcaacagcagcagcaacaacaacagagcattttattcagtaatcagaataccatggctacaatggcgtctccaaagcaaccaccaccaaacatgatattcaacccaaatcaaaatccaatggctaatcaggagcaacagaaccagtcaatttttcaccaacaaagtaacatggccccaatgaatcaagagcaacagcccatgcaatttcagagtcagtccacagtttcctcacttcagaacccaggtcctacccagtcggaatcatcacagacccccttgttccatagctctcctcagattcagttggtacaagggtcacctagttctcaagagcagcaagtaactctcttcttatctccagcatccatgtctgccttgcagaccagtataaatcaacaagatatgcaacagtctcctctttattcccctcagaacaacatgcctggaattcaaggagccacatcttcgcctcaaccacaggctactttatttcacaacacagcaggaggcacaatgaaccaactgcagaattctcctggctcatctcagcagacatcaggaatgttcttatttggcattcaaaataactgtagtcagcttttaacctctggaccagctacattgcctgatcagttgatggccataagtcagccaggccaaccacaaaacgagggccagccacctgtgacaacacttctttctcagcaaatgccagagaattctccactggcatcctctataaacaccaaccagaacatcgaaaagattgatttgcttgtttcattgcaaaaccaagggaacaacttgactggctccttttaactggatataaattccacgaagaaaatcctgattccaagatgtcctgagatcttgtggttccatgagaattattactttaaaaacaaaacaaaatataaaaaactgtgtttgagtaaactgatagattttactctgactgcaaaagagcacacctatgctgcttgttgcagtaactaaccaccaatgttaacatcttcatattttatattcctaataacagtgatgactgagaatctatttgagtttccagctggcagaattaattgttattattttcctaggcgcaatttccttaaacgtacagtttaaattcaaggctggaccactcagttattattgctattagaaaataatatatcatgtttacttttgttcttcattattttctttcctgcattgttttagtcaagtaatggcttttgaaaaagtaaagttcaataataactaaggctgtgatttttttcaatataaaaggcacagctgttggccaaagtgaaggaatcttttttcagttttattggagaaactgaagggtaacattctaacaagtaaactgtatgtgcagataaaagtactcttgatttaacacaaaggcagatgatacacttataaaactgggaacagctggaatgcttcttgattttattttttcagagagttgttagttctctgggtttctactaaggggtttagccataactgtgcatagaaaaataattatctgtaaaaaatgaaggggataatatatgataaattatgttctgatatcctcctacagtagtttaaattgacagaaaaatttgaatgttttcttcttaacccagtcttaggctggtattccctttttatatatatctatattacttttcacctctttttcactttactttagagaactattaatatactactggcttcatgaccctgtagcatctttggccactttaatctagggtgacctagcaatcctgcagcacagggcagagagtactgtcttaggaattattaggagttgattcctgagaaacaacacatttttccccatgaacggtgctgttctgaagtcttcaaatttttccctctaataggaaacagtataaattttaattaaaaaaaaaaggcaaactaaaatttcttgaaatatcacttctccctgatctgcagtgagtataaattcacttgtcacctcagtgctttacagtttgaagtggtcacttacctgatggttcccacaagccttaggctttacagggttgtatcattgacttaaaatgaagaattaacttgtgttacatctataaagagcaaaataacacactccagaacttggcagttgtagcattagttatacagttttgggtgttcttgccacccgtgggatgcctgcttctcactaccacctgtgtctggacacatgcttatgtctcattttccttttggcatgtggaaagctgtcaatgcagtgtaaggccaacgtgtgtgtggcttc

SEQ ID NO: 42459 - DNA, 14154 bp, Artificial Sequence
  derived and/or modified sequence
tgcaacggaaacttttggctccacgaacagaaaagcaagagcaaaaactcagttaaatgcgttcttcctccatctttgcctagtccaaaaggaaaaaaaaagaaacagaaaaaagaaaaactgtttggaagagtagcgttgaggtttgctttttacctgtttttcctctagaacagccaggtggattcacatgatccaattttttaattgtcttctatgtcccactccgaataacccggatgccccagcacaatcagagagatcgttttttttaaaaaaaatttcagcctccaaaggtaggaggggagtgttaggggagaaagtactttaattaaaaatcaataactcgaggtttttgggatacggtttgccatttcctaattaagaaatgggtttgacagtccctttgtacacactgctatgcaaaccccaaagggttggcggctgtccgggcgatgacactccggtcccctgcgagaccccgggccagccaggcccgtccgccgccggcctctggggtccgtccccggctcgcgcagacctctcgcttctctcggctctgtctcctgcgctcagctctgctcggggccggccgcctcaggctcgccgccaccaggtcgttgcaaataccttttccctccccggggccccagcgcgcggccacctcccagcctccccccctcccaccctggcagcggggccctttcccggctcaggaacagcagcagcccgggccgcgccggcaggaagcgaggcccatgttgctgctgttccctggcgcgcctccccgccctccgggggccgccacggctcttccgcgctcccgggcacccccctccgcgcctgcgctgtgccccacgggggcggggctcagattcctgtcagcggcggcggcggtggcggcgaccgtcagttttcgctgaggagaaacacgaaacggaccctttggctctcccccttccccttccccgtcctgaacccctctcctggtcaccgagaatcagtccccgtggagttccccctccacctcgccatcgtttcctcggtcctcggcccagtggaagtcactaccctcgaggaggaggcagcggcagccgccctcgcgtcgccgcccccggttcggtgcccgcggtcccggagaggaggtgccgccgccaccgccgctccccccctcccgctgccctcgggccgggctgggtcgagctgcgatgccctcggacttcatctcattgctcagcgcggacctagacctggaatcgcccaagtccctctactcgcgagattctctgaagttacacccatcacagaattttcatagagctggactattggaagaatctgtctatgatcttctcccaaaggagttacagttacctccatctagagaaacatctgtagcatcaatgagtcagacaagcggtggtgaggcaggctcgcctcctccagctgttgttgctgctgatgcttcttcagctccctcctcttcctccatgggcggtgcttgcagctcctttaccacctcttccagccctaccatttattctacctcagtcaccgacagcaaggctatgcaagtggagagctgctcctcagccgtgggggtaagtaacagaggggtaagtgaaaagcagttaaccagtaacacagttcagcagcatccatcaacaccgaagaggcacacagtcttgtacatctcaccaccacctgaggacttgctggataacagtcggatgtcctgccaggatgaggggtgtggattggaatctgagcagagctgcagtatgtggatggaggattccccctccaacttcagtaacatgagcaccagttcctacaatgataacactgaggtacctcgtaaatcacgaaaacgaaatccaaagcagaggccgggggtcaaacgacgagattgtgaagaatctaatatggatatatttgatgccgacagtgccaaagcacctcactatgtgctttctcagcttaccacggacaacaaaggcaactcaaaagcgggaaatggaacattggaaaaccaaaaaggaactggagtaaagaagagccctatgttgtgtggacaatatcctgttaaaagtgagggaaaggagctgaagatagttgtacaacctgagacacagcaccgagctcggtacctgactgagggcagccgtggctcagtgaaagatagaacacagcaaggctttcctacagtaaagctggaaggccataatgaacctgtagtgttgcaagtgtttgtgggcaacgactctggacgagtgaaaccacatggattttatcaggcctgcagagtaactggacgaaatacaactccttgcaaagaagtggacattgaaggcactactgttatagaagtcggccttgatcctagcaacaacatgacactggcggtggactgcgtagggatattgaaattgaggaatgctgatgtcgaagccagaataggaattgctggttccaagaagaaaagcactcgtgccagattggtttttcgagttaatatcatgaggaaagatggctccactttgacactgcaaacaccctcttctccaattttgtgtactcagccagcaggagtgccagaaatcttaaagaaaagcttgcatagctgttcagtgaaaggagaagaagaagtgtttttaatcggcaagaactttctgaaaggaactaaagttattttccaagaaaatgtttctgatgaaaactcttggaagtcagaagctgaaattgatatggaactatttcatcagaatcatcttattgtgaaggttcctccctatcatgaccaacatataactttgcctgtgtcagtgggaatatatgtagtgacaaatgctggaagatctcatgatgttcaaccattcacttacactccagacccagcagctggtgctttgaatgtaaatgtgaagaaggaaatatctagtccagcaagaccttgctcttttgaagaggccatgaaagcaatgaaaactactggatgtaatttagataaggtaaatattatccctaatgccctgatgactccactcataccaagcagtatgattaagagtgaagatgttactccaatggaagtaacagcagaaaaaagatcttccactatttttaagactacaaagtctgttggatcaactcagcaaacattagaaaacatctcaaacatagcaggaaatggctctttttcatcaccatcatcttcccacctaccttctgaaaatgaaaaacagcagcagattcagcccaaggcatacaacccagagaccctgacaactattcaaacccaggacatctcacagcctggtacttttccagcagtttctgcttctagtcagctgcccaacagcgatgcactattgcagcaggctacacagtttcagacaagagaaactcagtctagagagatattacagtcagatggtacagtggttaatttgtcacaactgactgaggcatcacaacaacagcagcagtcaccactacaagaacaagcacagactttacagcagcagatttcatcaaatatttttccatcaccaaatagtgtgagtcagcttcagaatactattcagcagctgcaagcagggagtttcacaggcagtactgctagtggcagcagtggaagtgttgacttggtccaacaagttttagaggcacagcagcagttatcttcagttttattttctgctccagatggtaatgagaatgttcaagagcagcttagtgcagatatttttcaacaagtcagtcaaattcagagtggtgtaagccctggaatgttttcctcaacagagccaacagtccataccagaccagataatttattacctggaagagctgaaagtgttcatccacagtctgaaaacacgttatctaatcaacagcagcagcagcagcagcaacagcaagtgatggaatcttcagccgcaatggtgatggagatgcaacagagtatctgccaggcagctgcccagattcagtcagagttattcccttcaactgcttcagcaaatggaaaccttcagcaatcgccagtttaccagcagacttctcacatgatgagtgcattgtctaccaatgaggatatgcaaatgcagtgtgaattgttttcttctcctcctgcagtttctggaaatgaaacttctacaactaccacacagcaggttgcaacccctggcactaccatgtttcagacatcaagttcaggagatggagaagaaactggaacacaagcaaaacagattcagaacagtgtctttcagaccatggtccaaatgcaacatagtggggacaatcaacctcaagttaaccttttttcatccacaaaaagtatgatgagtgttcagaatagtggtacccaacaacaaggtaatggtttattccagcaagggaatgagatgatgtcacttcaatctggaaattttttgcagcagtcttctcattcacaggcccaactttttcatcctcaaaatcctattgccgatgctcagaacctttcccaggaaactcaaggttctctctttcatagtccaaatcctattgtccacagtcagacttctacaacctcctctgaacaaatgcagcctccaatgtttcactctcaaagtaccattgctgtgttacagggctcttcagttcctcaagaccagcagtcaaccaacatatttctttcccagagtcccatgaataatcttcagactaacacagtagcccaagaagcattttttgcagcaccgaactcaatttctccacttcagtcaacatcaaacagtgaacaacaagctgctttccaacagcaagctccaatatcacacatccagactcctatgctttcccaagaacaggcacaacccccgcagcagggtttatttcagcctcaggtggccctgggctcccttccacctaatccaatgcctcaaagccaacaaggaaccatgttccagtcacagcactcaatagttgccatgcagagtaactctccatcccaggaacagcagcagcagcagcaacagcagcagcaacagcagcagcaacaacaacagagcattttattcagtaatcagaataccatggctacaatggcgtctccaaagcaaccaccaccaaacatgatattcaacccaaatcaaaatccaatggctaatcaggagcaacagaaccagtcaatttttcaccaacaaagtaacatggccccaatgaatcaagagcaacagcccatgcaatttcagagtcagtccacagtttcctcacttcagaacccaggtcctacccagtcggaatcatcacagacccccttgttccatagctctcctcagattcagttggtacaagggtcacctagttctcaagagcagcaagtaactctcttcttatctccagcatccatgtctgccttgcagaccagtataaatcaacaagatatgcaacagtctcctctttattcccctcagaacaacatgcctggaattcaaggagccacatcttcgcctcaaccacaggctactttatttcacaacacagcaggaggcacaatgaaccaactgcagaattctcctggctcatctcagcagacatcaggaatgttcttatttggcattcaaaataactgtagtcagcttttaacctctggaccagctacattgcctgatcagttgatggccataagtcagccaggccaaccacaaaacgagggccagccacctgtgacaacacttctttctcagcaaatgccagagaattctccactggcatcctctataaacaccaaccagaacatcgaaaagattgatttgcttgtttcattgcaaaaccaagggaacaacttgactggctccttttaactggatataaattccacgaagaaaatcctgattccaagatgtcctgagatcttgtggttccatgagaattattactttaaaaacaaaacaaaatataaaaaactgtgtttgagtaaactgatagattttactctgactgcaaaagagcacacctatgctgcttgttgcagtaactaaccaccaatgttaacatcttcatattttatattcctaataacagtgatgactgagaatctatttgagtttccagctggcagaattaattgttattattttcctaggcgcaatttccttaaacgtacagtttaaattcaaggctggaccactcagttattattgctattagaaaataatatatcatgtttacttttgttcttcattattttctttcctgcattgttttagtcaagtaatggcttttgaaaaagtaaagttcaataataactaaggctgtgatttttttcaatataaaaggcacagctgttggccaaagtgaaggaatcttttttcagttttattggagaaactgaagggtaacattctaacaagtaaactgtatgtgcagataaaagtactcttgatttaacacaaaggcagatgatacacttataaaactgggaacagctggaatgcttcttgattttattttttcagagagttgttagttctctgggtttctactaaggggtttagccataactgtgcatagaaaaataattatctgtaaaaaatgaaggggataatatatgataaattatgttctgatatcctcctacagtagtttaaattgacagaaaaatttgaatgttttcttcttaacccagtcttaggctggtattccctttttatatatatctatattacttttcacctctttttcactttactttagagaactattaatatactactggcttcatgaccctgtagcatctttggccactttaatctagggtgacctagcaatcctgcagcacagggcagagagtactgtcttaggaattattaggagttgattcctgagaaacaacacatttttccccatgaacggtgctgttctgaagtcttcaaatttttccctctaataggaaacagtataaattttaattaaaaaaaaaaggcaaactaaaatttcttgaaatatcacttctccctgatctgcagtgagtataaattcacttgtcacctcagtgctttacagtttgaagtggtcacttacctgatggttcccacaagccttaggctttacagggttgtatcattgacttaaaatgaagaattaacttgtgttacatctataaagagcaaaataacacactccagaacttggcagttgtagcattagttatacagttttgggtgttcttgccacccgtgggatgcctgcttctcactaccacctgtgtctggacacatgcttatgtctcattttccttttggcatgtggaaagctgtcaatgcagtgtaaggccaacgtgtgtgtggcttctatgtgttgagataatgttttggtatccttgtccgtttcatttattttttaagtgtacaaaaaataacctgttaattgttgaaggctacttttctgttctttttttttttttttttctatcctgtacatttagttgaactgtgcggaattgtggtgttggttttgtttacacagccagatttttccttctttttgttttgtgatgatcttcctttgttctttgaatgtgctcttttgtctttttctcttttttctcatgttttcttccctccacctccacccctttctttctttctctctctgattgagaggcattgaattacgttttcagtagtacaggcttcttgccgatatgaagggaacttttcagaaagagacctactctgggtcatttaattttgaatacagttttcaatcgttcaagttttggatggtttatatctaatgtgtgtttcatttttttggaaagctatattttgtatttaggaaatggtatactattttgctatttgtactgagtgagtacattggcataaatatagaaatttatatatatacatatatataaactattcttttttgccacacatttttgtggtaaatttgtgagtttgtctgatgttctaccacaacgtggcgtctgataacagtgagggggggtggggtttgttatgtctttattgagtatttaagtatcttttgaaacaaatgacctgttcatctgtggccattccatcaggcagttagttccttgatgtcagtagtgggctaaaggcagcttactgtgtgtttgctggagctttcactcagccaagtgttagagtcaggaaacccattgaggcaatggcgtcaaatggtgtttcacaagaatgagccattcagtctttgctcactatatatttaatattttattattgttgttattgttattattaattggctttctgtattctatgccttttatttataaagacactaagaaaacccatgtttgtaattttaataacatttttcccatcttgtaatatccagagctactttataaattctctgaaccaaaagtattttcctcagtgtatctcttctcccccagcccctattgggaaaaattacccagtatagttcaggttatgaggaggatcagccacacaatccagtgcttcagtttgaaaatgtaaaattctaaccctaaagtagggttggttgaaatttcagacaaagcaaacccagcaggtataaaaagtagtataaatacaaatctgtaagttatttttgaattttctgaacttttttctaagagattacataggagactaaagaaatctatctgttcaagttctaattaggatgattgttaatactgcactgtggatgaagtggcgactggcttgtgtgctgacttctgtggtttagcaagaggtttattgttatcaaatgctaattggcaatgccaagtcactgggaccaattttctgttttataatatctaagtttagaacagaatatatacctgaactgtagtggtttgatcggatggagacagaaaacccgatttttattctcataaattttgtggttatttatacaagggctgtgctatgctaccatattcttgttcaataataataggtttgttgttttttttacattgttaaatgttccttacccctaaaggtcaatgttaagtacaacattctgaaaatacaatttggctacgaagagtattcatcttctttgaagctcagtggttgatatttgtgctaataatgcaatttcctgattactgttacaagttatagctacatatgggagagactcagtgagccagcaaaggccatagaaacaacaatttattaaatgtatttatggcagaaggacctaaataaactgtgagccaccttttcttctttatattgttacatttaagtgttcttgctttcagcaactcacattaatgcttggagcttatctctttctctctctctctctctctctctgtgtgtgtgtgtgtatgtgtgtgtgtgtgtgtgtgtgtttccttattgtcattccattatatatccacaccaacatgggtgacgataattcaaagtcatattttgcctctaagcttgatcatgttacctttatgattaaagtatcatgttatttagccaatgcaaatctgttttaaaacaaatagtttaaaaaaagaacaagtttttaagggctttattatagaagaagtattaatgaaggactttccttcctccctccctttcctcccctccctgcctcccttcttcccttccatctccccctcctccctgccttctttgtttctccttcccttattcctccctccctcctttctcccttccttcctttcttccattcatccttccttgccttttatttttattttttgtaatatcacatgtgctgtagtttggaattttattctagtgcatttcttgctcatcagaacctcagctaatctacctaggaaaaatagtatcaaaggaaatgagaaagttgtatctgagtccctccagaactaagataattctttttgaccatttaagcctttataaatgcgttttgaccatttaagcctttataaatgcttgttttaggaaagtgaatctgttagatgcatcaacaaataatgaccaggacaaaacgatttaataattaaagtctcaaatcaccatggttatacattttcaccagaaatagtaatcttacaatttttcatttttctgatgaagatttctgttccaatatctgtttcctaatagattttttaaattaattagctttcctctgctttatgaccacaggttttatccctaaccgagacagctgtcttatatctgcatgccttagactgtgtggagggactccatgaagaaagaccataggttagaaaaataactcatagtatataccctagtaagtgggttagtagaatctcataacatgtattaaaaagaggttttcttctctgcttgtttgtgtcactagagcaaaattgtagagataatgctcataatgcagtaaatatcagaataatatctacaatatcatttgtggatggtcccaggtcccagtgctctagttactttacttctttttttttttttgagatggagtcttgctctgtctctcaggctagagcagtgtgcgatctcagctcactgcagcctccacctcccaggttcaagcgattctcctgcctcagcctcccaagtagccaggattacaggcaccctccactaggcccggctaattttttttgtatttttttagtagagatggggttttgccatgttggccaggctggtttcgaactcctaacctccagtgatccacctgcctcggcgtcccaaagtgctaggattacaggcatgagccaccacatccggcctaattacttctttaatccccatttatttttatgccattctagcctcatttattaataaaattatgtttttactttctctttcaggaaattttttaaattaatattttatatctagatctaatgctatggaaaagtgcctttttatcatttataatttcatttttcactatttccaaaaacacataaacaaatagtttcagtaggtcccagcttttactttttccatttaaaccttcttttctccatttcttccctttggcttaagaataaaagaaaaggtacattgctagaattgtttctttgggagagggtaaaagattacagaattagactgttcagcctttatataaactaaatttgtcttcatctcaaccagctaatggtaggtcttatctgaatactcatgagaattttagcatctgtgaaactccatgcaccagatgtgtgtaaatttcaggaagaaagtgttgaaagcattttctctgatgttaattagatggaaataaatcactaaaacatagtttaggtaaagcctgattatgccacttttttttaactagacagggcaaagttgtttatgttagtgtacttcttgtctatcctcagttaatttacctagacaaaaagtgtcaaaggaaatgagaaaaaggttatatctgactccctccagacctaagataattccttttgatcagatacagtcagatggagtgccttggtttttgttaattttgcctctattccagctccttaccacagcggtggtgcttaaagaaaggatcatcagcaacaggtcaggatagttctacctttgggatagggctgctttccccgtgctagtatttctgtgactgttagtggcactgaggactgcaaacttttatgcaatattcttaataccctattgatattatgcactttaatcattccaaagaagccaagaatgctgtatagtgatgattccttcctaatgaattcatcttaactatttagaatgttatgtcccttttcttttggatagccaacttggtataaatgttatatggatttttctaaaatgactatataggacttaagactttgaaatgtaatttacttataaggggaaataattatgctttagcacatcattttagaaacgtcacattttagaaacattcagcttgctaacctacatgtttgggaattcattaaaaccagttgtctatatattttgtgccatgtatataagaacattacaatatatctttttctacatatgtagtatgtgcaaccagtggttctcagagtatggttctcagcccaccagctagtatcagtatcacctgggaactagttagaaatgtaaattctttggccccatcccagacatactgagtcagaaactctggaatagggcccccgcaatctgttttcacaagccctccaggtgattctgatgcacactttaaagtttaggaaccactgggctaagactctgttgagatatagagtttttcttccactcagactgatatagttatacattgttcttcatgtaaattcagcttaacctggttatctataatcttttattggcaaaagttaattctcagtactgcctatagagatacagtgtattttatgtacatacacaattagtctaattcttgataattcagttaatttagtttggcattttcctaccacttactaaaaggtttacattaaatgactgatttaaatatataggtgcaatgttctatgtttattttaattgttatgacatttaagtagctaatataattgaccggtgctaaagtctcctgtttatccataaaatgggtacattatgggcagtgtaatacaagctttcttttcattgcctagtactttaccagcagaccacagttttgccctggctagaccaaccctcagaacaaaatcatcattccttgtatttatatttgtatctgagatagtaaacaagatggctggccaggtcaacatggcaccttaacttatttttttaataggtaaaacttcttcaaaagtagcttgctttgtataagaactaagctatcagtatagatatagctatccttggagcttatgtttcagacaagaattatttactaaaataaataataaacaagataatgcattatacaatttgggcatttctcgtttctcaagtgtatgcatcatggtaaatataaactaaccacaagataggtagattgattcatttcattttaatctccttgtgtaattcagtacctccataattgttctaatcttcttcccactgtttacaaattaccagttaattaactcgtgaaagaaaaattcacatatcagaataaaaataaatgtatactcactttataaaaatcaccactgctgtctttccttaatactagcagtggaaatgtaagtggcttactctacaaattttggtgctggcaaatacataggcaaactgttgggagctgctctagttacattcctcccttcttattccctttttctcttcctcactttattgcataacatattcctgtacccaaagcattctaccacagttctatttgactcccacttgtaataactcctttaaaaaattccatgtttaaccatatgaccctgcttgcttactcatattctccctccctctccccttcctttctctctcttccagaagtcatttgcctggtttgaaatattttgtagggattgcttattatattattttagctgatgaacctcaggacaacgtctacacacacacacatacatacacgcacacaaaatctcagctgttgaagagtgggcttggaatcagacttctgtgtccagtaaaaaactcctgcactgaagtcattgtgacttgagtagttacagactgattccagtgaacttgatctaatttcttttgatctaatgaatgtgtctgcttaccttgtttccttttaattgataagctccaagtagttgctaattttttgacaactttaaatgagtttcattcacttcttttacttaatgttttaagtatagtaccaataatttcattaacctgttctcaagtggtttagctaccattctgccatttttaatttttatttaattttatttgcttgagcacactgatcaaccactgaactgccttcttccattgtcctgcaatgatataagggttacatttttgtgtatatggctttcatagttgggatttcagagcactgataccagatattttcagtttgttctctgggggaatttcatttgcatctatgtttttagctatctgtgataacttgttaaatattaaaaagatattttgcttctattggaacatttgtatactcgcaactatatttctgtaaacagctgcagtcaaaaataaaacactgaaagtt

SEQ ID NO: 42460 - DNA, 4647 bp, Artificial Sequence
  derived and/or modified sequence
atgccgtccgattttatctcattactatccgccgatctggacctggagagtccgaagagcctgtacagccgggactccctcaagctgcatccttcccagaactttcatcgcgctggcctgctggaggaaagtgtgtacgacctgctccccaaagagctacagttgcccccatccagggagacatcagttgccagtatgtctcaaacttccggaggcgaggctgggtcacctcctcctgccgttgtggcagcggatgcgtctagtgctccgtcaagctccagcatgggtggagcctgttctagctttaccacaagtagttcacctacgatttattctacaagtgtgaccgattccaaggcaatgcaagtggagagctgtagcagcgccgttggtgtctcgaacaggggggtctccgagaagcagctgacaagcaatactgtccaacaacatcccagcactcctaagaggcatacagtcctatatatttctccgccaccagaggacctgctcgacaattcccggatgtcgtgccaagacgagggatgcggccttgagagtgagcagtcttgcagtatgtggatggaagattctcctagtaatttttcaaacatgtcaacatccagctataatgataacactgaagtccctagaaagtctagaaagcggaaccccaagcagagacccggagtgaagcgccgagattgtgaagaatctaatatggacatctttgacgccgactcagctaaggcacctcactacgtgctgtctcagctgacaactgacaacaaaggcaacagcaaggcaggtaatggaactctggagaatcaaaagggcacaggggtgaaaaaatcgccgatgctgtgtgggcagtaccccgtcaagtctgagggcaaggaactgaaaatcgtggtgcagccggagacccagcaccgggctcggtacttaactgaggggtctcgtggatcagtcaaagaccggacgcagcaaggctttcccacagtgaaactggagggccacaatgaaccagttgtgttgcaggtatttgtaggtaatgattctggcagagtgaaacctcacggattttatcaggcgtgccgggtgacggggaggaacactacgccatgtaaagaggtcgacattgaggggaccacagtaattgaggttgggttagatccctcaaataatatgaccctggctgttgattgcgtgggcatccttaaactccggaacgcggacgtcgaagcaaggattggtatcgctggatctaaaaagaaatctacccgggcacgcttggtatttagggtgaacataatgaggaaggacggatcaactttaaccctgcagacacccagctctcccattctgtgtacacaaccagcaggtgtcccagagatactgaagaagagcttgcattcctgctcggtgaagggtgaagaagaggtgttcctgatcggaaagaacttcctcaaggggaccaaagtaatcttccaggagaacgtgtccgatgaaaattcctggaagagcgaggcagagatcgacatggagctctttcaccaaaatcaccttatcgttaaggtgccaccctatcatgatcagcatattaccctacccgtgtcggtgggcatctatgtggtcacgaacgcagggagaagccatgacgtacagcctttcacatataccccagacccagccgcaggcgctcttaacgtgaacgttaaaaaagaaattagcagtcctgccaggccttgttcctttgaggaggcgatgaaggcaatgaaaacgactggatgcaatcttgacaaggtgaacattatccctaacgcattgatgacacccttgatccctagtagcatgatcaagagtgaagatgtgacaccgatggaggtgacagcagagaagagaagttctaccatcttcaagacgactaaatctgttggcagcacccagcagactctggagaatattagtaacattgccggtaacggttctttctctagtccctcgtcaagccatctcccttctgagaacgaaaagcagcagcagatccagcccaaggcctacaaccctgagacactgaccacgatccagactcaggatatctcgcaacccggaaccttccccgctgtcagtgcctcctcgcagctgccgaactcggacgccttgttgcaacaggctacacagtttcagacccgagagacccagtctcgcgagatcttacagtctgacggtactgtggtgaatctgtcccagctcacggaggcctcccagcagcagcagcagtccccactacaggagcaggcacagaccctgcagcagcagattagctccaatatctttccaagtcccaacagcgtttctcaactgcagaatacaatccagcagctccaggcgggatctttcaccggatccacggcaagcgggagttccgggagtgtggaccttgtgcaacaggtcctcgaggcacagcagcagctctcatcggttctcttcagtgcccctgacggtaatgagaacgtgcaggaacagctgagtgccgacatcttccagcaagtgtctcagatccaatccggggtcagtccagggatgtttagctcaacagaacccactgtgcacacccggcctgacaacctgctgcctggtcgtgctgagagcgtccaccctcagtccgagaacactctatccaatcagcagcagcagcagcaacaacagcagcaggtgatggagtccagtgctgccatggtgatggagatgcaacagagtatctgtcaggctgcagcccagattcaaagtgagctgttcccttccaccgcgtctgccaacgggaacttacagcagtccccagtgtatcagcagaccagccatatgatgagtgctttaagtaccaacgaggatatgcagatgcagtgcgaactgttctccagccctcctgctgtttctggaaacgagacttcaacaaccacaactcaacaggtcgcaactcccggaactactatgtttcaaacaagctcaagcggggacggcgaggaaactggcacccaggcgaaacagatccagaattcagtgttccagacgatggtgcagatgcagcactccggcgacaatcagccacaggtgaatctgttctcttctactaaatccatgatgagtgtgcaaaattctggaactcaacagcagggcaatgggttattccagcagggcaacgaaatgatgagtctgcagtccgggaattttctgcaacaatccagccattctcaagcccagttgtttcaccctcaaaacccgatcgccgatgctcaaaacctcagccaggaaacacagggttcgctctttcacagcccgaaccccatcgtccacagccagacttcaaccacaagctccgaacagatgcaacctccaatgttccatagtcagtcaacgatcgccgtgctgcaggggagcagcgttccgcaggaccagcaatccactaacatcttcctctcgcagtcaccgatgaacaatctgcagacaaatactgtcgcacaggaagcgtttttcgccgcacccaactccatatcacctcttcagtcaactagtaattctgagcagcaggcagcatttcaacagcaagccccaatatcgcatattcagacacctatgcttagccaggagcaggcacagccgcctcagcaagggttattccagcctcaggtcgccctgggctccctgccacccaatcccatgccccagtcccaacagggaaccatgtttcaatcacaacacagcattgtagccatgcagtcaaatagcccgagccaagagcagcagcagcagcagcagcagcaacaacaacagcagcagcaacagcagcagagcatcctcttttcgaaccagaataccatggccaccatggcaagcccaaaacagcctccgcctaacatgatcttcaacccaaatcagaaccctatggcaaaccaggagcagcagaaccaaagtatctttcaccagcagtccaatatggctcctatgaatcaggagcaacagccaatgcagttccagtcccaaagcactgtgtcgtctctgcagaatcccggtccaacacagtccgagagttcacagacacccttgtttcactcgtctccccagattcaactagtgcagggctccccttcatcccaggaacaacaggttaccctgtttttgtccccagcctcgatgagcgctctgcagacatcaattaaccagcaggatatgcagcagtcacccctgtattctccccagaacaacatgccgggaatccagggtgcaacaagcagcccacagccgcaggccactctctttcataacaccgccggagggactatgaatcagctgcagaatagtcccggttcatctcagcaaacttccggaatgtttctctttggcatacagaacaattgtagccagctgctgacatccggaccagctacactccctgaccagcttatggctatttcccagcccggacagccacagaacgagggccagccgcctgtgaccacgcttttatcccagcagatgcccgagaatagccctcttgcatctagcatcaatactaaccagaacatagaaaagatcgatttgctggtgagcctgcagaatcaggggaataacttgaccggatctttttag

SEQ ID NO: 42461 - DNA, 4646 bp, Artificial Sequence
  derived and/or modified sequence
atgcccagcgatttcatctctctcttatctgcggatctggacctagagagcccgaaaagcctgtactccagggacagcctgaagctacacccaagtcagaactttcaccgggcagggctgctcgaagaatccgtgtatgatctgcttcccaaggagctgcagttacctccaagccgggagacatctgtggccagcatgtcccaaacctccgggggtgaagccggttccccaccccctgcagtcgtagcagcggatgcctccagtgccccaagcagctctagcatggggggtgcatgctcgtcatttacaaccagtagcagccccaccatatacagcacaagtgtgaccgactccaaagccatgcaggtggagtcctgttcttcagccgtgggcgtatccaatcgtggggttagcgagaagcagctgacgtctaacacagtccagcagcatcccagcacacctaaaaggcacactgtgctctacatttcccctcccccagaggacttgctcgacaattcaagaatgtcctgtcaggacgagggctgcggactggaaagcgaacagtcatgctccatgtggatggaggatagtccgtcgaatttctcgaacatgagcactagtagctataatgataatactgaagtcccacgtaaatccaggaagagaaacccaaaacaacgcccaggagtgaaacgtcgcgactgcgaggagagcaacatggacatcttcgatgcagacagtgcaaaggctcctcattatgtgctcagccagctgacaacagacaataaagggaacagcaaggccggtaacggaaccttggaaaaccagaaggggacgggcgtaaaaaagtctcctatgttgtgcggccagtacccagtgaagtccgaaggcaaagaattaaagatcgtcgtacaacccgagacccagcacagggcacgttatctgactgaggggtccagagggtctgtgaaagaccggacgcagcagggctttccgaccgtgaaactcgagggacacaacgagccagtggtcctccaggtcttcgttggtaacgattctggcagagtgaaaccacacggcttctatcaggcttgcagagtcacaggcaggaacaccactccctgcaaagaagttgacattgaggggactacagttatcgaggtgggcttggacccttctaacaacatgactctcgccgtcgattgtgtcggtatcctaaagttgcggaacgcagatgttgaagctcgaatcggaattgcaggctctaagaagaaatcaacacgcgcacgcctcgtcttccgcgtgaatataatgcgcaaggatggaagtactctcacattgcagaccccttcatcccccatattgtgcacgcagcccgcaggcgttccggagatcctcaagaagtcattacattcttgttcagtgaagggagaagaggaggtgttcctgattggaaaaaacttccttaagggcaccaaagtcatttttcaagagaacgtgagtgatgaaaattcgtggaagagcgaggccgaaatcgatatggaattattccaccagaaccatctgattgtgaaagtccctccctaccacgaccagcacatcactctgccagtttctgtaggcatctacgtcgtcaccaacgccggtcgctcccacgacgtgcagccctttacctacacccccgatccagccgctggcgctctgaacgtaaatgttaagaaggagatctcctctccggctcggccatgtagcttcgaagaggcgatgaaggctatgaaaactaccggctgtaatctcgacaaagttaacatcatcccgaatgctttaatgactcctctgatcccctcttctatgattaagtctgaggacgttactcctatggaggtgacagccgaaaagagatctagcactattttcaaaacgacaaagagcgtggggtccacgcagcagacactcgagaatatttctaacatagccggaaatgggtcctttagcagtccctcatcttctcatctacctagcgagaacgaaaaacagcaacagatccagccgaaagcatacaacccagaaacactgacaactattcagacacaagatatcagccagccaggaactttcccagccgtcagcgcctctagccaactgcccaattcagatgccctcctgcaacaggccactcagttccagacacgcgagacccagagccgggagatactccagtcagatggaacagtggtcaacttgtctcagctgactgaagccagccagcagcagcaacagtctcccctgcaagaacaggcgcaaacgctgcagcaacagatttcaagtaatatcttcccaagccctaactctgtgagtcagctgcagaacacaattcagcagttgcaggcaggttcatttactggcagcaccgcgagcggctcctccggcagcgtggatctcgtgcagcaggtgttggaggcccagcaacagctgtcatcagtgttattttccgccccagacggaaacgagaacgtacaagaacagcttagcgccgacattttccagcaagttagtcagattcagagtggtgtatccccgggaatgttcagctctaccgagcccacagttcatacccggccagacaacctgctgccaggtcgtgccgaatcagtgcacccccagtctgaaaacactcttagtaaccaacaacagcagcagcaacagcagcagcaggttatggagtcctctgctgccatggtgatggagatgcagcagagtatttgccaggccgctgctcagatccagagtgagctttttcccagcacagcaagcgctaacgggaatctgcaacaatcaccagtgtatcagcaaaccagccacatgatgagcgcgctgtctacaaatgaagatatgcagatgcaatgcgagctattctcatctcctcctgccgtgagcgggaatgagacctccaccacaaccacccagcaggtcgcgacccctggtactactatgtttcagacatcttccagcggtgacggcgaagaaaccggcacacaggctaagcagatccagaattctgtgtttcaaactatggtccaaatgcaacactctggcgacaaccagccccaggtgaaccttttctcaagtacgaaaagcatgatgtctgtgcaaaacagtggcactcaacagcaagggaatggcctgtttcagcagggcaacgaaatgatgagtctacagagcggcaatttcctgcagcagagctctcattcccaggcccagttattccatcctcaaaatcctatagccgacgcccaaaacctgtcccaggagacgcaaggaagtctttttcatagccctaatcccattgtacactctcagacctccaccacttcatctgagcagatgcaaccgcctatgttccatagccagtccactattgcggtgctccagggtagctctgtgccccaggaccagcaatccaccaatatcttcctcagtcagagtcccatgaacaacctacagaccaatacagtggcacaggaagccttctttgccgcacccaattcaatctcccccctgcaaagtacaagcaacagcgagcagcaggctgcctttcagcagcaggctccaatcagccacatccagacaccgatgctgtctcaagaacaagcccagccaccccagcaaggcctgtttcagccccaggtggcactggggtctttgccacctaatccaatgcctcaatcacagcagggcacaatgtttcagagccagcatagtatagtcgcaatgcagagcaattcacctagccaggagcagcagcagcagcaacagcagcagcagcagcaacaacagcaacagcagcagtcaattctcttttctaatcagaacacaatggctactatggcctccccgaaacagccacccccaaatatgatttttaatcctaaccagaatcctatggccaaccaggagcagcagaaccagtcaatctttcatcagcagagcaacatggcccctatgaatcaggaacagcagcccatgcagttccaatcgcagtcaacagtgagctctctgcaaaaccctgggcctacccagtcagagtcaagccagacacctctgtttcatagttctccccagatccagctggttcaaggatctccatcatcccaggagcaacaggttaccttgttcttgagccctgcctcaatgagcgcgctccagaccagtattaatcaacaagacatgcagcaatcccctctatactccccccagaacaatatgccgggaatccagggtgcaacttccagtccccaaccccaggccactttattccataacacggcgggtggtactatgaaccagttacaaaacagtcccggaagtagccagcaaacctctgggatgttcttgtttggcatccaaaacaactgctcacagctgctgacgtcgggccctgccactctgccagatcaattgatggctattagtcagccgggacagcctcaaaatgagggccagccgccagtgactacgctgctttcacagcagatgcccgaaaattcccctttagcaagctctatcaatactaaccaaaacattgagaagatcgatcttttagtgtcattgcagaaccaggggaataaccttaccggctccttcta

SEQ ID NO: 42462 - protein, 801 aa, Artificial Sequence
  derived and/or modified sequence
MLQNVTPHNKLPGEGNAGLLGLGPEAAAPGKRIRKPSLLYEGFESPTMASVPALQLTPANPPPPEVSNPKKPGRVTNQLQYLHKVVMKALWKHQFAWPFRQPVDAVKLGLPDYHKIIKQPMDMGTIKRRLENNYYWAASECMQDFNTMFTNCYIYNKPTDDIVLMAQTLEKIFLQKVASMPQEEQELVVTIPKNSHKKGAKLAALQGSVTSAHQVPAVSSVSHTALYTPPPEIPTTVLNIPHPSVISSPLLKSLHSAGPPLLAVTAAPPAQPLAKKKGVKRKADTTTPTPTAILAPGSPASPPGSLEPKAARLPPMRRESGRPIKPPRKDLPDSQQQHQSSKKGKLSEQLKHCNGILKELLSKKHAAYAWPFYKPVDASALGLHDYHDIIKHPMDLSTVKRKMENRDYRDAQEFAADVRLMFSNCYKYNPPDHDVVAMARKLQDVFEFRYAKMPDEPLEPGPLPVSTAMPPGLAKSSSESSSEESSSESSSEEEEEEDEEDEEEEESESSDSEEERAHRLAELQEQLRAVHEQLAALSQGPISKPKRKREKKEKKKKRKAEKHRGRAGADEDDKGPRAPRPPQPKKSKKASGSGGGSAALGPSGFGPSGGSGTKLPKKATKTAPPALPTGYDSEEEEESRPMSYDEKRQLSLDINKLPGEKLGRVVHIIQAREPSLRDSNPEEIEIDFETLKPSTLRELERYVLSCLRKKPRKPYTIKKPVGKTKEELALEKKRELEKRLQDVSGQLNSTKKPPKKANEKTESSSAQQVAVSRLSASSSSSDSSSSSSSSSSSDTSDSDSG

SEQ ID NO: 42463 - protein, 296 aa, Artificial Sequence
  derived and/or modified sequence
  misc_feature (1)..(1): Xaa can be any naturally occurring amino acid
XRPLGVQQPGARLPGEGNAGLLGLGPEAAAPGKRIRKPSLLYEGFESPTMASVPALQLTPANPPPPEVSNPKKPGRVTNQLQYLHKVVMKALWKHQFAWPFRQPVDAVKLGLPDYHKIIKQPMDMGTIKRRLENNYYWAASECMQDFNTMFTNCYIYNKPTDDIVLMAQTLEKIFLQKVASMPQEEQELVVTIPKNSHKKGAKLAALQGSVTSAHQVPAVSSVSHTALYTPPPEIPTTVLNIPHPSVISSPLLKSLHSAGPPLLAVTAAPPAQPLAKKKGVKRKADTTTPTPTAIL

SEQ ID NO: 42464 - protein, 801 aa, Artificial Sequence [sequence omitted]

SEQ ID NO: 42465 - protein, 613 aa, Artificial Sequence
  derived and/or modified sequence
MLQNVTPHNKLPGEGNAGLLGLGPEAAAPGKRIRKPSLLYEGFESPTMASVPALQLTPANPPPPEVSNPKKPGRVTNQLQYLHKVVMKALWKHQFAWPFRQPVDAVKLGLPDYHKIIKQPMDMGTIKRRLENNYYWAASECMQDFNTMFTNCYIYNKPTDDIVLMAQTLEKIFLQKVASMPQEEQELVVTIPKNSHKKGAKLAALQGSVTSAHQVPAVSSVSHTALYTPPPEIPTTVLNIPHPSVISSPLLKSLHSAGPPLLAVTAAPPAQPLAKKKGVKRKADTTTPTPTAILAPGSPASPPGSLEPKAARLPPMRRESGRPIKPPRKDLPDSQQQHQSSKKGKLSEQLKHCNGILKELLSKKHAAYAWPFYKPVDASALGLHDYHDIIKHPMDLSTVKRKMENRDYRDAQEFAADVRLMFSNCYKYNPPDHDVVAMARKLQDVFEFRYAKMPDEPLEPGPLPVSTAMPPGLAKSSSESSSEESSSESSSEEEEEEDEEDEEEEESESSDSEEERAHRLAELQEQLRAVHEQLAALSQGPISKPKRKREKKEKKKKRKAEKHRGRAGADEDDKGPRAPRPPQPKKSKKASGSGGGSAALGPSGFGPSGGSGT

SEQ ID NO: 42466 - protein, 807 aa, Artificial Sequence
  derived and/or modified sequence
  misc_feature (1)..(1): Xaa can be any naturally occurring amino acid
XNGGGGSATARGGEYRLPGEGNAGLLGLGPEAAAPGKRIRKPSLLYEGFESPTMASVPALQLTPANPPPPEVSNPKKPGRVTNQLQYLHKVVMKALWKHQFAWPFRQPVDAVKLGLPDYHKIIKQPMDMGTIKRRLENNYYWAASECMQDFNTMFTNCYIYNKPTDDIVLMAQTLEKIFLQKVASMPQEEQELVVTIPKNSHKKGAKLAALQGSVTSAHQVPAVSSVSHTALYTPPPEIPTTVFNIPHPSVISSPLLKSLHSAGPPLLAVTAAPPAQPLAKKKGVKRKADTTTPTPTAILAPGSPASPPGSLEPKAARLPPMRRESGRPIKPPRKDLPDSQQQHQSSKKGKLSEQLKHCNGILKELLSKKHAAYAWPFYKPVDASALGLHDYHDIIKHPMDLSTVKRKMENRDYRDAQEFAADVRLMFSNCYKYNPPDHDVVAMARKLQDVFEFRYAKMPDEPLEPGPLPVSTAMPPGLAKSSSESSSEESSSESSSEEEEEEDEEDEEEEESESSDSEEERAHRLAELQEQLRAVHEQLAALSQGPISKPKRKREKKEKKKKRKAEKHRGRAGADEDDKGPRAPRPPQPKKSKKASGSGGGSAALGPSGFGPSGGSGTKLPKKATKTAPPALPTGYDSEEEEESRPMSYDEKRQLSLDINKLPGEKLGRVVHIIQAREPSLRDSNPEEIEIDFETLKPSTLRELERYVLSCLRKKPRKPYTIKKPVGKTKEELALEKKRELEKRLQDVSGQLNSTKKPPKKANEKTESSSAQQVAVSRLSASSSSSDSSSSSSSSSSSDTSDSDSG

SEQ ID NO: 42467 - protein, 296 aa, Artificial Sequence
  derived and/or modified sequence
  misc_feature (1)..(1): Xaa can be any naturally occurring amino acid
XRPLGVQQPGARLPGEGNAGLLGLGPEAAAPGKRIRKPSLLYEGFESPTMASVPALQLTPANPPPPEVSNPKKPGRVTNQLQYLHKVVMKALWKHQFAWPFRQPVDAVKLGLPDYHKIIKQPMDMGTIKRRLENNYYWAASECMQDFNTMFTNCYIYNKPTDDIVLMAQTLEKIFLQKVASMPQEEQELVVTIPKNSHKKGAKLAALQGSVTSAHQVPAVSSVSHTALYTPPPEIPTTVFNIPHPSVISSPLLKSLHSAGPPLLAVTAAPPAQPLAKKKGVKRKADTTTPTPTAIL

SEQ ID NO: 42468 - protein, 807 aa, Artificial Sequence
  derived and/or modified sequence
  misc_feature (1)..(1): Xaa can be any naturally occurring amino acid
XNGGGGSATARGGEYRLPGEGNAGLLGLGPEAAAPGKRIRKPSLLYEGFESPTMASVPALQLTPANPPPPEVSNPKKPGRVTNQLQYLHKVVMKALWKHQFAWPFRQPVDAVKLGLPDYHKIIKQPMDMGTIKRRLENNYYWAASECMQDFNTMFTNCYIYNKPTDDIVLMAQTLEKIFLQKVASMPQEEQELVVTIPKNSHKKGAKLAALQGSVTSAHQVPAVSSVSHTALYTPPPEIPTTVLNIPHPSVISSPLLKSLHSAGPPLLAVTAAPPAQPLAKKKGVKRKADTTTPTPTAILAPGSPASPPGSLEPKAARLPPMRRESGRPIKPPRKDLPDSQQQHQSSKKGKLSEQLKHCNGILKELLSKKHAAYAWPFYKPVDASALGLHDYHDIIKHPMDLSTVKRKMENRDYRDAQEFAADVRLMFSNCYKYNPPDHDVVAMARKLQDVFEFRYAKMPDEPLEPGPLPVSTAMPPGLAKSSSESSSEESSSESSSEEEEEEDEEDEEEEESESSDSEEERAHRLAELQEQLRAVHEQLAALSQGPISKPKRKREKKEKKKKRKAEKHRGRAGADEDDKGPRAPRPPQPKKSKKASGSGGGSAALGPSGFGPSGGSGTKLPKKATKTAPPALPTGYDSEEEEESRPMSYDEKRQLSLDINKLPGEKLGRVVHIIQAREPSLRDSNPEEIEIDFETLKPSTLRELERYVLSCLRKKPRKPYTIKKPVGKTKEELALEKKRELEKRLQDVSGQLNSTKKPPKKANEKTESSSAQQVAVSRLSASSSSSDSSSSSSSSSSSDTSDSDSG

SEQ ID NO: 42469 - protein, 619 aa, Artificial Sequence
  derived and/or modified sequence
  misc_feature (1)..(1): Xaa can be any naturally occurring amino acid
XNGGGGSATARGGEYRLPGEGNAGLLGLGPEAAAPGKRIRKPSLLYEGFESPTMASVPALQLTPANPPPPEVSNPKKPGRVTNQLQYLHKVVMKALWKHQFAWPFRQPVDAVKLGLPDYHKIIKQPMDMGTIKRRLENNYYWAASECMQDFNTMFTNCYIYNKPTDDIVLMAQTLEKIFLQKVASMPQEEQELVVTIPKNSHKKGAKLAALQGSVTSAHQVPAVSSVSHTALYTPPPEIPTTVLNIPHPSVISSPLLKSLHSAGPPLLAVTAAPPAQPLAKKKGVKRKADTTTPTPTAILAPGSPASPPGSLEPKAARLPPMRRESGRPIKPPRKDLPDSQQQHQSSKKGKLSEQLKHCNGILKELLSKKHAAYAWPFYKPVDASALGLHDYHDIIKHPMDLSTVKRKMENRDYRDAQEFAADVRLMFSNCYKYNPPDHDVVAMARKLQDVFEFRYAKMPDEPLEPGPLPVSTAMPPGLAKSSSESSSEESSSESSSEEEEEEDEEDEEEEESESSDSEEERAHRLAELQEQLRAVHEQLAALSQGPISKPKRKREKKEKKKKRKAEKHRGRAGADEDDKGPRAPRPPQPKKSKKASGSGGGSAALGPSGFGPSGGSGT

SEQ ID NO: 42470 - DNA, 4907 bp, Artificial Sequence
  derived and/or modified sequence
ggactgcgggataggaagctggggatatggacaagcagcagcgttatagcgctctgggtttcgggacataggcctgggccatgcggcccccttggccccttggcgcgacccccaggaacgttcggaaagctggtcctcgtggctgggggaaaggcggggggtgggggggaagcgggcacgtgaccccggtcagccaatctgggtgctgctgacgtggccgcgcggccccgatgctctccccacccccccagcccgttcgggaagggaggggctgggggctacgccccctcccccagcacggcttcgttttctgggggggggttgacaccccggattacataccccgtaccaagccgagggcaactttggaggccccctggaaggctttaggatccagattcttcgctgctgctgccttaccgccgagaaccaccacccgccaggcgtcttgcggccacacccctggcgggttcaggcaggctacgcccacgcgacccctcccgtttccctgctttggccaatggaggagctacgaatggcacgacctgctcgagcttggcagtctccagttgggctgtgcatggaagcttgggaagactttgttggaaggggaggcggggagagagtgctggaggctctggggcgatggcttccgcacctcttccaaccaccctctttccctggagtcggcggaccacagctcagccaattggcttggagatgtggcgggttgccacttccctgtgggtctctgcggcactcttctgcctggtgactgacaccttggaaatgaagtttatgacgtcatcgttgcggctggccaatagaaaaagctcccgcggagaggtgttccttccccttcgactcagcttcttcacccgcgtgagcgagcgcgcgcgcgcggagggggtggggaaaagctcaagcagggtggcgcgcatgagcggcgaagctcctcctccccgcctatatataaagggctggcgcggggctcggcggcgccatttcgtgctggagtggagcagcctctagaacgagctggaggattctgcctaccgatacagagccttcgagtcgtccggggccgccattacaatccacctccatccgcttggaaatggccttcgtcccggcctatgactggtcccagcgggcagtacagaccccctagaagcccctggagctcccctttttcgggccccgcccaatcctcggagtctgtccaccccctctactccgccctcaagaggatttcaaagatggaggcggcggctccctaaaccacttttcgtgttcatccgcctccatccgagatcgaaacgggacctcgtcggccccgtaggggcccgacaagaagagggaatccctgcagaccaacagcgggctatattgacgacggtgtctgagatcggggaccgtcttttgaagagtcagtccctccttagttgcccgcctcagctgaggccgccgccattttcttgctgtccgccgtctgcagagcgcgccaagctgcccggagctctccgagaggccccaaagagactgctttcgtgccggccaggcagggggtttgtcgcctggaggcccaagaggaacggcctccccccaacttagcgggttatgctggaccgggcggtgaggggaaccgaggccacccggactttccgcggctgagggcagcgccggttccttgcggtcaagatgctgcaaaacgtgactccccacaataagctccctggggaagggaatgcagggttgctggggctgggcccagaagcagcagcaccagggaagaggattcgaaaaccctctctcttgtatgagggctttgagagccccacaatggcttcggtgcctgctttgcaacttacccctgccaacccaccacccccggaggtgtccaatcccaaaaagccaggacgagttaccaaccagctgcaatacctacacaaggtagtgatgaaggctctgtggaaacatcagttcgcatggccattccggcagcctgtggatgctgtcaaactgggtctaccggattatcacaaaattataaaacagcctatggacatgggtactattaagaggagacttgaaaacaattattattgggctgcttcagagtgtatgcaagattttaataccatgttcaccaactgttacatttacaacaagcccactgatgatattgtcctaatggcacaaacgctggaaaagatattcctacagaaggttgcatcaatgccacaagaagaacaagagctggtagtgaccatccctaagaacagccacaagaagggggccaagttggcagcgctccagggcagtgttaccagtgcccatcaggtgcctgccgtctcttctgtgtcacacacagccctgtatactcctccacctgagatacctaccactgtcctcaacattccccacccatcagtcatttcctctccacttctcaagtccttgcactctgctggacccccgctccttgctgttactgcagctcctccagcccagccccttgccaagaaaaaaggcgtaaagcggaaagcagatactaccacccctacacctacagccatcttggctcctggttctccagctagccctcctgggagtcttgagcctaaggcagcacggcttccccctatgcgtagagagagtggtcgccccatcaagcccccacgcaaagacttgcctgactctcagcaacaacaccagagctctaagaaaggaaagctttcagaacagttaaaacattgcaatggcattttgaaggagttactctctaagaagcatgctgcctatgcttggcctttctataaaccagtggatgcttctgcacttggcctgcatgactaccatgacatcattaagcaccccatggacctcagcactgtcaagcggaagatggagaaccgtgattaccgggatgcacaggagtttgctgctgatgtacggcttatgttctccaactgctataagtacaatcccccagatcacgatgttgtggcaatggcacgaaagctacaggatgtatttgagttccgttatgccaagatgccagatgaaccactagaaccagggcctttaccagtctctactgccatgccccctggcttggccaaatcgtcttcagagtcctccagtgaggaaagtagcagtgagagctcctctgaggaagaggaggaggaagatgaggaggacgaggaggaagaagagagtgaaagctcagactcagaggaagaaagggctcatcgcttagcagaactacaggaacagcttcgggcagtacatgaacaactggctgctctgtcccagggtccaatatccaagcccaagaggaaaagagagaaaaaagagaaaaagaagaaacggaaggcagagaagcatcgaggccgagctggggccgatgaagatgacaaggggcctagggcaccccgcccacctcaacctaagaagtccaagaaagcaagtggcagtgggggtggcagtgctgctttaggcccttctggctttggaccttctggaggaagtggcaccaagctccccaaaaaggccacaaagacagccccacctgccctgcctacaggttatgattcagaggaggaggaagagagcaggcccatgagttacgatgagaagcggcagctgagcctggacatcaacaaattacctggggagaagctgggccgagttgtgcatataatccaagccagggagccctctttacgtgattcaaacccagaagagattgagattgattttgaaacactcaagccatccacacttagagagcttgagcgctatgtcctttcctgcctacgtaagaaaccccggaagccctacaccattaagaagcctgtgggaaagacaaaggaggaactggctttggagaaaaagcgggaattagaaaagcggttacaagatgtcagcggacagctcaattctactaaaaagccccccaagaaagcgaatgagaaaacagagtcatcctctgcacagcaagtagcagtgtcacgccttagcgcttccagctccagctcagattccagctcctcctcttcctcgtcgtcgtcttcagacaccagtgattcagactcaggctaaggggtcaggccagatggggcaggaaggctccgcaggaccggacccctagaccaccctgccccacctgccccttccccctttgctgtgacacttcttcatctcacccccccccgcccccctctaggagagctggctctgcagtgggggagggatgcagggacatttactgaaggagggacatggacaaaacaacattgaattcccagccccattggggagtgatctcttggacacagagcccccattcaaaatggggcagggcaagggtgggagtgtgcaaagccctgatctggagttacctgaggccacagctgccctattcacttctaagggccctgttttgagattgtttgttctaatttattttaagctaggtaaggctggggggagggtggggccgtggtcccctcagcctccatggggagggaagaagggggagctctttttttacgttgatttttttttttctactctgttttccctttttccttccgctccatttggggccctgggggtttcagtcatctccccatttggtcccctggactgtctttgttgattctaacttgtaaataaagaaaatattattcaagttttgagttaccttaatatttgcttttgtagtgtttcaaaaggaacatcataagaattgtcttgataattttgagggaaatattactgcagtgagaaaaggcaatagctaacctataattggattgtcttaatttttaaaccagtaggcttttgctgtgtttttaataaagtaaatatgacttttgtaaattgaaaaaaaaaaaaaa

SEQ ID NO: 42471 - DNA, 2406 bp, Artificial Sequence
  derived and/or modified sequence
atgctacagaacgtgacccctcacaataaattgcccggcgaaggaaatgccgggctgcttggcctcggtccggaggctgccgcaccagggaaacgaatacgcaagccgtctctgttgtacgaggggttcgagagtccgaccatggcaagtgtgcctgccctgcagctgacacccgcgaacccgccgccgcctgaggtctcgaatccaaagaaacccgggagagttacgaatcagctgcagtatctccacaaggtcgttatgaaggccctgtggaagcaccagttcgcatggcctttcaggcaaccagttgacgcagtgaagttaggtctgcccgattaccacaagatcattaaacagcctatggacatggggaccatcaagcgcagactggagaacaattactactgggcggcctcagaatgcatgcaggattttaacacgatgttcactaactgctacatctacaataagcccaccgatgacatagtgctcatggcacagaccctcgagaaaattttcttgcagaaggtcgcttcaatgccccaggaggagcaggaactcgtagtgacaatcccaaaaaatagccacaagaagggagcgaagctggcagcactgcagggatctgtgacatcggcacatcaggtgcctgcagtgtcaagtgtcagtcacaccgcactgtatacccccccaccagaaatccctacaactgtgttgaacatcccccaccccagcgtcattagcagcccactgcttaagagtttgcatagcgcaggaccccctcttctcgccgtgactgccgctcctccagctcagcctctcgcgaaaaagaagggtgtgaagcggaaggcagacactacaacaccaactccgactgccatcctcgctccagggtctcctgcttcgccccctggaagcctggaacccaaagccgcccgcctgcctccaatgcgccgggaaagtggaagaccgatcaagcctccccgtaaggatctgcccgactcccagcaacaacaccagagctcaaagaagggcaagctaagtgaacagctcaagcactgtaacggtatcctgaaagagttgctgagcaagaagcacgccgcctacgcctggcccttttacaaacctgttgacgcctcagccctcggcctgcacgactatcatgacataatcaaacatcccatggatttatctaccgtaaaacgtaagatggaaaacagagattatcgcgatgctcaggaatttgctgccgacgttaggcttatgttcagcaactgctataagtacaaccctccagaccatgacgtagttgctatggctagaaagctccaggacgtgtttgagttcaggtacgcgaaaatgccggacgagccccttgagcctggacccctgcccgttagcacggcaatgccaccaggcctggctaagagctcttcggagtctagcagtgaggagtcaagctcagagtcatcaagcgaggaggaagaggaagaggatgaggaggatgaggaggaagaagagagcgagtcgagcgattctgaggaggaacgtgcccaccgattagctgaactgcaggagcagcttagggccgtacacgagcagctggccgccttatcccaagggcccatttccaagcccaagcgtaagcgagagaaaaaggagaaaaagaagaaacgtaaggctgagaagcacaggggcagagccggggctgacgaggatgacaaaggcccacgagcacccagaccaccccagccgaagaagtctaaaaaggctagtggtagcgggggggggtccgctgcattgggaccttctggctttgggccatctggaggctctggaaccaagctccctaagaaggccacaaagacggccccacccgccttgcctaccggctacgattccgaggaggaagaggagagcagacccatgtcttatgatgagaagagacaacttagcttagacatcaacaagctgcccggagagaaactcggccgcgtcgtgcacatcatccaggcacgggagccaagtctccgcgattccaatccggaggagatcgagattgattttgaaaccctgaaacccagcactctgcgcgagctcgagcggtacgtgctgtcttgcttaaggaagaaacccagaaaaccatatactatcaaaaagcctgttggcaagacaaaggaagagctagcgttagaaaagaaaagagagttagaaaaaagactgcaagatgttagcggtcagttgaatagtaccaagaagcctccgaaaaaggccaacgaaaagacagagtcctcctccgcacagcaggtcgctgtgtcaagattaagcgcttcctcgtcaagttcagacagcagctcatcatcaagttcaagttctagttctgacacctcagatagcgactcaggatag

SEQ ID NO: 42472 - DNA, 2406 bp, Artificial Sequence
  derived and/or modified sequence
atgctgcagaatgtgacgccccacaataaattacccggggaagggaatgctggactgctaggattgggccctgaggcggccgctcctggcaagcggattcgaaagccttctcttttgtacgagggctttgagtcccctactatggcctctgtccccgcgctgcaactgaccccagccaatcctccccctccagaagtgtcaaatccaaagaaacctggtcgggttacgaaccaacttcagtatctgcacaaggtggttatgaaagccttgtggaaacaccagttcgcctggccatttcggcagccagtcgatgcagtgaaactggggcttcccgattaccacaaaattatcaagcagcccatggacatggggacaattaaaaggcgacttgaaaataattactactgggctgcttcggagtgtatgcaggacttcaataccatgttcactaattgctacatttacaataagccaacagacgacatcgttctgatggcccaaaccctggagaagatattccttcaaaaggtggctagtatgcctcaggaggaacaagagctggtagtaaccatccctaagaactcccacaaaaagggggctaaactggccgctctccagggctcagtgaccagcgcccaccaagtgcctgccgtcagctctgtcagccataccgcgctgtataccccaccgcctgagattccgacgactgttttgaacatcccacatccatccgtcatttcaagcccactcctaaaatccctgcactccgccggacccccactgcttgccgtgactgctgccccaccagctcagccattagctaagaaaaagggcgtgaaacgcaaagctgacaccaccacacctacaccaacagcaatcctggcacccggatcccccgccagtcccccggggtctctcgagccgaaagccgcccgactcccacctatgaggagagagtcaggtcggcccataaaaccccctcgtaaggacctaccggactcacagcaacagcatcagtcaagtaagaaggggaagctctctgagcaattaaagcactgcaacgggatattaaaggaattattatccaaaaagcatgccgcatatgcatggcctttctataagcccgtggatgcctccgccctcggattacatgactaccatgacatcataaagcatcccatggatctgtctaccgtcaaaaggaaaatggagaatcgggactatcgagacgctcaggagttcgccgccgatgtacgtctgatgtttagcaactgctacaaatataatccccctgaccatgacgtcgtggccatggctaggaagctgcaggatgtgtttgagttcaggtacgccaaaatgcctgacgagcctctcgagcccggtcccttacctgtctcaacggccatgcctcccggtctggccaagagctcttcggagtctagtagcgaggaatcctctagcgaatcttcctctgaggaagaggaggaagaggacgaagaagatgaggaggaagaggaatcggaaagctctgatagtgaagaggaacgagctcatcgattggcagagctgcaggaacagttaagggctgtgcacgaacaattggctgccctttcacagggccctattagcaaacctaaaagaaagagagaaaagaaggagaaaaagaagaagagaaaggcagaaaagcacagggggcgcgccggcgctgacgaagatgataagggtccaagggctccccgacccccccagcctaagaagtcaaagaaagcctctggttccggcggcggatcagcagctctggggccttcgggcttcggcccttccggcgggtccggaaccaaactgccgaagaaggctacaaaaacagctccgcccgctctgccaacgggatatgacagcgaggaagaggaggaatctcgcccgatgagttatgacgagaagaggcaactgtcgctggatataaacaagctcccaggcgaaaagcttgggcgggtcgtgcacatcatccaggcacgcgagcccagccttagagacagcaatcctgaggagatagaaattgatttcgagactcttaagccatccacactgcgggagctcgagcggtacgtgctatcatgtctcagaaagaaacccaggaagccctacactataaagaagccagtgggcaaaactaaggaggaattggcactggagaagaaacgcgaactggagaagcgtctgcaggacgtaagcggtcagctgaattctaccaaaaagcccccgaaaaaggcaaatgaaaagactgaaagttcatcggcgcagcaagtcgcagtgagccgcttgtcagcgtcatccagttcctcagattcaagcagcagcagctcctccagtagcagcagcgatacatcagacagtgattctggctag

SEQ ID NO: 42473 - DNA, 2406 bp, Artificial Sequence
  derived and/or modified sequence
atgctgcagaacgtcacccctcacaacaagcttcccggcgaaggcaacgcagggcttctgggcctgggaccagaggccgctgcacccggcaagcgtattcgcaaaccctctctcctatacgagggcttcgaaagccctaccatggccagtgtgcccgcacttcagctgacgcctgccaacccaccacctccagaggtgagtaaccccaagaaaccagggagggttacaaatcagctccagtaccttcacaaagtcgtcatgaaggcgttgtggaagcaccaattcgcttggccattccgacaacctgttgacgcggtgaagttaggcctgccagactatcacaaaatcatcaaacagccaatggacatggggaccataaagcgacgcctggagaacaattattactgggctgcctcagagtgtatgcaggacttcaatacgatgttcaccaactgctatatatacaacaaaccaactgatgacattgtgctgatggcgcaaaccctggaaaaaatattcctacaaaaagtggcctcgatgcctcaggaggaacaggagctggtggtgactatccccaaaaactcccacaagaaaggcgccaagctggccgcgctgcagggctcagtcactagcgcacaccaagtgcccgccgtttcctccgtgtcccacactgcgctgtacactccacctccagagattccaactactgtacttaacatcccgcatccctccgtcattagctcaccactgctcaagtctctgcactccgcggggcctcccctcctagctgtcaccgcagcacctccggcccagcctctcgccaagaagaagggggttaaaaggaaagctgatacaactactcctacccccaccgccatcctcgcgcctggaagtcccgcaagccctcccggctcgctcgaacctaaagcagcaagactgcccccgatgagacgggaaagcgggcgacccatcaagcccccacggaaggaccttcctgattcccagcagcaacaccagagcagcaaaaagggcaagctcagtgaacagctgaagcattgtaacggaatcctcaaagagctattaagtaagaaacacgctgcctatgcctggccattctataaaccagtcgatgcatctgcattgggcctgcacgattatcacgatatcattaagcaccccatggacctctcaaccgtgaagagaaaaatggagaacagagactaccgggacgcacaagagttcgctgctgatgttcgactgatgttttccaattgctataaatataacccccctgaccatgacgttgtggcaatggccaggaagctgcaggatgtttttgaattccggtatgctaaaatgcctgatgagccacttgagcctggacctctgcctgtgagcacagctatgccaccaggactcgcgaagagctctagcgagagtagcagcgaagagagtagctcagagtccagctccgaggaggaagaggaggaagacgaagaggatgaggaagaggaggagtcagaaagctccgattccgaggaggagcgcgcgcaccgtctcgctgagctccaggagcaactccgcgccgtgcacgagcagttggccgccctctcccaaggcccaatctctaaacctaagcggaaacgcgagaagaaggagaaaaagaagaagcgtaaggccgagaaacaccgtggcagggccggcgccgacgaagatgataaagggcctagggcaccccggcctccgcagcccaagaaatcgaaaaaggcctccggatccggcggaggatccgcggctctaggaccctccggattcgggccaagtggaggctctggaacaaagttgccaaaaaaagccactaaaactgctccgcctgccctccccaccggctacgacagtgaggaggaggaggagtctagaccaatgagctatgatgagaaacgccagctttctctggacattaataagctgccgggtgagaagcttggacgggtcgtgcacatcatacaggctcgtgagcccagtttgcgggattccaatccggaggagattgaaattgatttcgaaacgctcaagccgtccacgcttagggaactggaaagatatgtgctctcttgcctacgaaaaaagcccaggaagccttatacaatcaagaaaccagtgggaaaaacaaaggaggaattggcgctggaaaagaaacgtgaactcgagaagcgcttacaggatgtgtcggggcagcttaactctacaaaaaagccacctaaaaaggcgaatgaaaagaccgagtctagtagcgcccagcaagtcgcagtcagcagactctctgcgtcttcctcgagcagcgatagcagctcatcctcgtcctcatccagcagctcagatacatccgattctgacagtgggtag

SEQ ID NO: 42474 - DNA, 2406 bp, Artificial Sequence
  derived and/or modified sequence
atgctgcagaacgtcactccgcataataaactccccggggagggaaacgctggtctgttggggctgggtccagaggcagctgcacccggaaagcgcataagaaagcccagcctgctgtacgagggcttcgaatcgccaaccatggcttccgtgcccgccctccagcttactccggctaaccctcctcctcctgaggtgtctaacccgaaaaagcccggtagggtaactaatcaacttcagtaccttcataaagtcgtgatgaaagccctatggaaacaccaatttgcttggccattcagacagcctgtggatgctgtgaagcttggcctacccgattaccataagattattaaacaacccatggatatgggaacaattaagaggcggttggagaacaattactactgggccgcgagcgagtgtatgcaggacttcaacactatgtttacgaactgctacatttacaacaaacccacagatgacatcgtgctgatggcacaaacgctggagaagattttcctccagaaggtcgcgagcatgccacaggaggaacaagagctcgtcgtaaccattccaaagaatagtcataagaaaggggcaaagctcgcagcccttcaaggtagtgtgacctccgctcaccaagtgcctgctgtgtcttcggtgagccacacggccctttatactccacctcccgagattcctaccactgtgctcaacattccccacccttccgttattagttcaccacttctgaaaagtttgcattcagcagggccccccctgcttgcagtaacagccgctccccctgctcagccactcgcaaagaaaaagggcgtaaagcgtaaagcagatactacaaccccgaccccgaccgccatcctggcacccggaagcccagcctcaccacctggaagcttggagcctaaggctgctaggctaccgccaatgcgaagggagagcggtcgccctattaagcctcctagaaaagacctgccagactctcagcagcagcaccagagtagcaaaaaagggaagctctccgaacaactgaaacactgtaacggaatcctaaaagaactcctgtccaaaaagcatgcagcctacgcctggccattttacaagcccgtggacgcttctgccctgggcctgcatgactatcacgacattataaagcaccctatggacctttctaccgtgaagaggaaaatggagaatagggactatagggacgcacaggagttcgccgcagatgtgaggttgatgttttctaattgttacaagtataaccctcccgaccatgatgttgtcgcaatggcaaggaagctgcaggatgtttttgaattccgatatgccaagatgcctgatgaacccctcgaaccaggtccactaccagtatcaacagcaatgccgccagggctagccaaatctagcagtgagagttccagtgaagagagttcttcagaatccagttccgaagaagaagaagaggaagacgaggaggatgaggaggaggaggagagcgaatcatcggattccgaggaagagagggcccacaggctggcagagctccaggaacagctgagggcagtccacgagcaactagctgccctgagccagggcccaatctctaagccgaaacggaagcgggagaagaaggaaaagaagaagaagcgtaaagccgaaaaacaccgcggaagggccggagctgatgaagacgacaagggcccacgggcaccgagacctccacagccgaagaaaagcaagaaggcttctggctctggcgggggcagcgccgccctgggcccttcgggatttggtccttccggagggagcggaacaaaactgcccaagaaggcgaccaagaccgccccccccgccctaccaaccggttacgatagcgaagaggaggaggaatcccgtcccatgagttatgacgaaaagcgccagctgtccttggatatcaataagttgccaggcgaaaagttgggacgggtcgtccacattatccaggcaagggagccatcactgcgcgacagcaatcctgaagagattgagattgacttcgaaacccttaagcccagcacactgcgggagctggagagatacgtattatcttgcctacgcaagaaacctaggaagccttataccatcaaaaaacccgttggtaagacaaaggaagagctcgcactagaaaagaagcgggaactcgagaagcgcctccaggacgtgtcaggtcagctgaacagcactaaaaagccaccaaagaaagccaatgagaaaacggagtcctcgtccgctcagcaagttgccgtgagccggctgagcgctagcagctcaagcagcgacagttcctctagttcttcttctagctccagcagtgatacttcggatagcgactctggttag

SEQ ID NO: 42475 - DNA, 2406 bp, Artificial Sequence
  derived and/or modified sequence
atgcttcagaacgtgacccctcacaacaagctccctggagaagggaacgcaggactgctgggattgggacctgaggcagctgctcctgggaagcgaatcagaaaaccaagcctcctgtacgagggttttgaatctcctacaatggccagtgtaccagccctccaactgacaccggccaacccacctccgcccgaagtctccaatcccaaaaaaccggggagggtgacgaatcagttgcagtacctgcataaggtggtaatgaaggccctgtggaaacatcagttcgcatggcctttcagacagccagttgacgccgtgaagttaggcctcccagactaccacaagatcattaagcagcctatggacatgggcaccatcaaaaggagactcgaaaacaattattattgggcagcctcagaatgcatgcaggattttaacaccatgttcacaaactgctatatctacaacaaaccaacagacgacattgtcctgatggcccagactcttgaaaagatctttctgcagaaagtggctagcatgccacaggaggagcaagagctcgttgtgactattccgaagaactctcacaaaaaaggggcgaagctcgccgctttacaggggagcgtcacctctgctcaccaggtgcctgccgttagttcagtgtcgcataccgctttatatactcccccccctgagatccctacgaccgtcctgaacatcccccaccccagcgtgatctcgagccccctgctcaagtctctacatagtgccgggccacctctgctcgccgtgacagccgcacctccggctcagcccctggcaaagaagaagggggtgaaaaggaaggcagataccacaacaccgacgccaaccgcaatacttgccccgggatctccggctagtcccccgggcagtctggagccaaaggctgctcggctgcctccgatgcgacgcgagtctggacggcctataaagccacctcggaaagacttgcctgatagccagcaacagcaccagagctctaagaaaggcaaattgtctgagcagctcaagcattgtaatgggatcttaaaggagctgctgagtaaaaaacacgccgcctatgcatggcccttctataagccagttgacgctagcgccttaggattacacgattaccatgatattatcaagcaccctatggacctcagtacagtcaagcggaagatggagaacagagattaccgggacgctcaagagttcgccgcagacgttaggttgatgttttctaactgttataagtacaatccgccagaccacgacgtggtggcaatggcacgaaagctccaggacgtgtttgagttccggtatgcgaagatgccggatgaacccctcgagcccgggcctttgccagtctctacagctatgcccccgggactggctaagagttcaagtgagtcgtcttctgaagaatcttctagcgagagcagcagcgaagaggaagaggaggaggacgaggaagatgaggaggaggaagagtccgaatcctctgatagtgaagaagaaagggctcacaggttggccgagcttcaggaacaacttagggctgtacatgagcagctggctgccctgtcccaaggccccatttcaaaacccaagaggaagagagagaagaaagagaaaaagaaaaaaagaaaggctgagaagcatcgtgggagagccggcgccgacgaagacgacaaggggccacgcgctcctcgaccgccacagcccaaaaagtcaaaaaaggcctccggtagtggaggaggcagtgcggccctcggcccttccggcttcggaccatcaggtggaagcgggactaagcttccaaaaaaggctaccaagactgcaccaccagctctaccaacaggctatgactcggaggaggaggaggaaagtcgaccaatgtcttacgacgaaaagagacagctttccctggacatcaacaaactccccggcgagaaactgggccgggtggtccatatcattcaggctcgggaacccagtctccgggactctaacccagaggaaatcgagatcgattttgagaccttaaaaccctccacacttcgggagctggagcgctatgtgttgtcctgtcttcggaagaagcctaggaagccctatacaattaagaagcctgtgggtaagacaaaggaagaattggcgctcgagaagaaacgcgaactggaaaagagacttcaagatgtttcaggccagcttaacagcactaagaagccacctaaaaaagccaacgaaaagactgagtcttcgagcgcgcagcaggtcgccgtttcccggctgtccgcctctagttcaagttctgacagctccagttcttctagcagttctagttctagcgacacctccgacagtgattcaggatag

SEQ ID NO: 42476 - DNA, 891 bp, Artificial Sequence
  derived and/or modified sequence
taacgaccccttggagttcagcaacctggcgctcgcctccccggcgagggcaacgccggccttttgggcctaggtcccgaagctgcggcaccgggcaagcgaatccgtaaaccttctttgctgtatgagggctttgaatcacccacaatggcctcagtcccagctttgcagctcactccagcaaatcccccaccacctgaagtctctaaccctaagaaaccaggtcgagtcaccaaccagcttcagtacctgcacaaggtggtcatgaaagccctttggaagcatcaatttgcctggccctttagacagcccgtggacgcagttaagctcggtttgcctgactatcacaagatcatcaagcagcctatggacatggggacaattaaaagaagactggaaaacaactattactgggccgccagcgagtgcatgcaagacttcaacaccatgtttacaaattgctatatttacaacaaaccaaccgatgatatcgtgctaatggcacagaccctggaaaagatttttcttcaaaaggtggcatctatgcctcaggaagagcaggaactcgtcgtgacaatcccgaagaattcccacaagaaaggcgctaagctggcagcacttcagggttcagtgacatcagcgcatcaggtgccggccgtgagttctgttagccacactgctctgtatacacctccaccagagatcccaaccacagtcctgaatatcccacatccttccgtgattagcagtcccctgctcaaaagcctgcatagcgctggaccacccctattggccgtaaccgccgcccctcccgctcagccactggcgaagaaaaaaggcgtgaaacgcaaggcggacaccactaccccaacacctaccgccatcctttag

SEQ ID NO: 42477 - DNA, 2406 bp, Artificial Sequence
  derived and/or modified sequence
atgttgcaaaacgtgacgcctcacaacaagctgcctggcgaaggaaatgccggcctgcttggattaggcccggaggccgctgctcctgggaaaagaatccgcaagccaagtctgttatatgaggggtttgaatctcccacgatggcctccgtgccggcgctgcaattgactcctgccaatcccccaccacctgaggttagcaaccctaaaaagcctggacgcgtgactaaccagctgcagtacctccataaggtcgttatgaaggcactgtggaagcatcagtttgcttggcccttccggcagccggtcgatgccgtcaagcttggcctcccggactatcataagattattaaacaaccaatggacatgggaactattaaaaggcgacttgaaaacaactattactgggccgcaagtgagtgcatgcaggactttaacacaatgtttacaaactgttacatatataataaaccaacagatgacatagttcttatggctcagacattggaaaaaatatttcttcaaaaggtcgcctctatgccccaggaagagcaagaactcgtcgtcactatccccaaaaacagccacaaaaaaggggccaaactggctgcattgcaggggtccgtgacgagcgcccatcaggtccccgccgtgtcaagtgtgtcacatacagcactgtacactccacctcctgaaatccctacaacagttttcaacattcctcatccaagtgttatctcgtcgcccttactgaaaagtttgcatagcgccggaccacctctgcttgcagtgacagcggccccccctgcacagccgttagcaaaaaaaaagggcgttaagcgcaaagctgacacaaccaccccaaccccaactgctatccttgccccgggaagccccgccagtccacccggttctctcgagcccaaagccgcccggcttcccccaatgagaagagagagtggtaggcctattaagccacctaggaaagacctccctgactctcaacagcagcatcagtcttctaagaaggggaaactctctgagcaactcaaacactgtaatgggatcttgaaggaactactcagcaagaaacacgcagcctatgcatggccattttacaaacctgtcgacgccagtgccctcgggcttcatgattaccacgacattattaaacatcctatggatctctcgaccgtgaaaaggaaaatggaaaacagagattatagagacgcgcaagagttcgcagccgacgtgcgccttatgttctccaattgttacaagtataatccacccgaccacgacgtggtggcaatggcccgcaaactgcaggacgtgttcgagtttagatacgctaagatgcccgacgaaccgcttgagccaggccccctccccgtgtccacagccatgccccccggcttggcaaagtctagttctgagagcagcagcgaggagagcagctcggaatcaagcagtgaagaggaggaggaagaggacgaggaggacgaagaggaggaagaatcagagtcctctgattctgaagaagagcgagcccaccgattggctgagctgcaggaacaactacgcgccgttcacgaacagctagcagcgctgagtcaggggccgatatccaagcccaagagaaaaagagaaaagaaggaaaaaaagaagaagcgaaaggctgagaaacaccgcggccgggccggcgctgatgaagacgataaggggccccgtgccccccgaccaccacagcccaagaagtccaagaaggcttctggatccgggggaggaagcgctgctctcggcccgtccggattcggaccttctggtggcagcggaacaaagttacctaagaaagcaacaaaaaccgcgcccccagccctaccaacaggctacgactccgaggaagaggaagagagtcggcccatgtcttacgatgaaaagcgccagctcagtttggatatcaacaagctgcccggggagaaactggggcgagtggtgcatatcatacaagccagggagccatcactgagggactcaaaccctgaggaaattgaaatcgattttgaaacattaaagccatcaaccctgcgagagctcgaaaggtatgtgctctcttgtctgcgaaaaaaaccccgcaagccgtatactatcaagaagcctgttggcaaaacaaaggaggagctcgctctggagaagaaacgcgaactggagaagcgtctccaggatgtgtctggccaactcaactctacaaagaagcctcctaagaaagctaacgagaagaccgagagctctagcgcccaacaggttgcagtctctcggctgtctgcatctagcagttcgtccgacagcagtagttcatcctcgagcagtagtagtagcgacacgagcgactcagatagcgggtag

SEQ ID NO: 42478 - DNA, 1842 bp, Artificial Sequence
  derived and/or modified sequence
atgctccaaaatgtgactccccataataaactccccggagagggcaacgccgggctgctgggattgggcccggaagccgctgcacccggcaaacgaattcgaaagccctccctactttatgagggtttcgagagtcctactatggccagcgtccctgctctgcagctcacaccggcaaatccgccccccccggaagtgagcaaccccaagaagcctggaagagttaccaaccaactgcagtacctgcacaaggtggtgatgaaggcgttgtggaagcaccagttcgcgtggccatttaggcagcctgtcgatgctgtgaaattgggtctccctgactatcacaaaatcattaagcagccgatggatatgggaaccatcaaacgccggctggagaataattactattgggccgcatccgagtgtatgcaggatttcaacacaatgttcacgaattgctatatctataataagcctacagatgatattgtgttgatggcccagactctcgagaagatcttcttacaaaaagtggcctccatgcctcaggaggaacaagagctcgttgtgaccatccccaaaaacagccataagaagggcgctaagttggctgctctgcagggcagtgtcacgtccgcacaccaggtcccggcagtgagttcagtgtctcacaccgcgttgtatacaccgcctcccgaaattccaacaacagtcctcaatattccacatccctccgtcattagctcaccactgctaaagtcactgcattctgccggccctcccctgctagcagtgacagccgcaccccccgcccagcccctcgccaaaaaaaagggcgtcaaacgcaaggcagacactacgacacctacacctaccgcaattttggctccggggagtcctgcatcccccccagggtccctcgagcccaaagccgccagactgccaccaatgaggagagagagcggaaggccaatcaaaccccccaggaaagatctgcccgatagtcagcagcagcaccagtcaagcaaaaaaggcaaattgagcgagcaactgaaacactgcaacggtatccttaaggagctcctttctaaaaagcacgccgcttacgcctggcccttctacaagcccgtggatgcctccgcacttggtctgcacgattatcacgacattatcaagcatccaatggacctctccaccgtgaagaggaaaatggagaatagggattatagagacgcccaggaatttgcagctgatgtgaggctgatgttctcaaactgttacaaatataaccccccagatcacgatgtggtggctatggcaaggaagcttcaggatgtcttcgaatttaggtacgccaagatgcccgatgagcctctggagcccggacctcttcccgttagtaccgcgatgcctcccgggctggctaagagttccagcgagtctagttccgaagaatcttcttcagaaagctcctccgaggaggaggaggaggaggacgaggaggatgaagaggaggaggaaagcgagtcaagtgacagcgaggaggagcgcgcccatcggctcgctgagttacaggagcaattacgcgcagtacacgaacaactagcggccctcagccaagggcccataagcaaaccgaagaggaaaagagaaaagaaggagaagaagaagaagagaaaagcagaaaaacaccgtgggcgcgccggagccgacgaggacgacaagggtccccgagcgcccagacccccccaacctaaaaaatctaagaaggctagcgggtcagggggtggctctgccgcacttggcccctcaggtttcggtcccagcggtggcagtgggacctag

SEQ ID NO: 42479 - DNA, 1842 bp, Artificial Sequence
  derived and/or modified sequence
atgctccagaatgtgactccccataataaactgccaggcgaaggcaacgcgggcctgcttggtcttgggccagaagccgccgctcccggaaaaaggatccgcaagccgtctctcctgtatgagggcttcgaatctcccacaatggctagcgtgcccgctttgcagctgacccctgcaaatccacctccaccagaggtgagcaaccctaaaaaaccgggaagagttaccaatcagctgcagtatctccacaaagtggtgatgaaggcactctggaagcaccagtttgcctggccctttagacagcctgtggatgctgtaaagttggggcttcccgactaccacaagattatcaagcaacctatggacatgggcacaatcaaaaggcgactggaaaataattactactgggcagcctctgaatgcatgcaagactttaataccatgtttaccaactgttatatttataacaagcctactgacgacattgtgctgatggctcaaaccctcgagaaaatttttcttcaaaaagtggcatctatgccgcaggaagagcaggaattggtggtgacaatcccaaagaactcgcataagaagggcgcgaagttggctgcactgcagggatcagtgacatctgcgcaccaggtgcccgctgtgtcatctgtgagccatactgcactgtacacaccacccccagagataccaaccacagtgctgaacattcctcacccatccgtgatttccagtccccttctcaagtctctccattcagcaggacccccgctgcttgcggtaacagcagccccccccgcccagcccctcgcgaaaaagaagggggtgaaacgcaaagccgacacgactactcctactccaaccgctatcttggcccctgggagccctgcctctcctccaggaagtctcgaaccaaaagcagcacggctgcctcctatgaggcgcgagtctggaaggcccattaaacctccgcgcaaagacctgccggactcccagcaacagcatcagtcttctaagaaaggaaagctcagcgagcagctgaagcactgtaatggaatcttgaaagaacttctaagtaagaaacatgctgcgtacgcttggccattctacaagcctgtggatgcgtcagcactcggactccacgactaccatgacataattaaacaccctatggacctgagcaccgtgaaaagaaaaatggagaatcgggattatcgcgacgctcaagaatttgctgccgatgtccgcctgatgttctccaattgctataagtacaatcctccggaccatgatgttgtggcaatggcccggaagctgcaagacgtgttcgagttccgctatgcaaaaatgcctgacgaacccctcgaacctgggccacttcctgtatccactgccatgccacccggcctggctaagagttcgagcgagtccagcagtgaggagtctagtagtgaatcttcatcagaggaagaagaagaggaggatgaagaggacgaagaggaggaggagtcagagtcgtcagactcagaagaagagcgagcacaccgactcgcggagctgcaagaacagctgcgggcagtacacgaacagctggctgctctctcccagggcccaattagcaagcccaaaagaaagagggaaaaaaaggagaagaaaaagaagcggaaggccgagaagcatcgcggacgggccggtgccgatgaagatgacaaggggccccgcgcccctaggcctccacagccaaaaaaaagcaaaaaggccagcgggtcaggcggaggctccgcagcactggggccctctgggttcggaccttccggaggatctggtacttag

SEQ ID NO: 42480 - DNA, 2424 bp, Artificial Sequence
  derived and/or modified sequence
taaaacggcggcggtggctccgccacagcccgcggtggagagtatcgtctccctggagaaggcaatgcagggcttctggggttaggaccggaggccgccgccccaggcaagcgaatccgcaagccatccctgctgtacgaaggcttcgagtcccctaccatggcatctgtgccggctctccaactcaccccggcaaacccccctcctccagaggtcagtaacccaaaaaagccgggtcgtgtaaccaaccaactccaatacttacataaggttgtcatgaaagctctctggaagcatcaatttgcctggccatttcggcagcccgtggacgccgtaaagctgggcttacccgattatcacaagatcatcaagcagccaatggacatggggacaattaagcgcaggctcgagaataattattactgggcagcgtccgagtgtatgcaggactttaacacaatgttcacaaactgctatatctacaacaagcccaccgacgatattgtcctgatggctcagactctggaaaagatttttctgcagaaggttgccagcatgccccaggaagaacaggaattggttgtgacgattccaaaaaactcccacaaaaagggcgccaaattggctgcactacagggaagcgtgacctccgcccaccaggtgcccgcagttagcagcgtatcacatactgccctgtatactccgcctccggaaattcctactaccgtatttaacatccctcacccttctgtgatttcttcccccctcttgaagtctttgcactctgctggcccccctctactggccgtaactgcagccccgccggctcaaccgttggctaaaaaaaaaggtgtgaaacgcaaagcagatacaaccaccccaacccccacggccatcctggctcccgggtcccctgcatcccctcccggttcactagagccaaaagctgcacgtctcccccccatgcgccgggagtctggtcgcccaatcaaacccccgaggaaagatctccccgattctcagcaacagcaccaatcctctaaaaaaggcaaactgagcgagcagttaaaacattgtaacgggatcttgaaggagttgttatctaagaagcacgccgcctatgcatggcctttctacaagcccgtggatgctagcgcactgggcctgcacgactaccacgacattatcaagcatccaatggacctctccacggttaagaggaaaatggaaaaccgtgattatcgcgacgcccaggagtttgccgctgatgtccgcctgatgttctctaattgttacaagtacaacccaccggatcacgacgtggttgccatggcccgtaagcttcaggacgtcttcgagtttcgctacgcaaagatgcctgacgagcccttggaacctggcccattgccagttagcactgcgatgcccccaggtcttgcgaagagctcatctgagtcctcctcagaggaatccagtagcgagagcagcagcgaggaggaagaagaagaggatgaggaggacgaggaagaagaagaaagcgaatcctcggattctgaggaagagcgggcccatcgtcttgccgagcttcaggagcagctgagggcagttcacgagcagcttgcagcactgtcacagggacccatctcgaaacctaagcgcaagcgagaaaagaaggagaagaaaaaaaaacgaaaagctgaaaagcatagaggacgcgccggcgccgacgaggacgacaaaggaccacgcgccccgagacccccccagccaaagaaatccaagaaagcctccgggagcgggggaggctcagctgcccttggtccatccggctttggaccatctggggggagtggaactaaattgccaaagaaagccaccaagactgcacctcccgcgctccctaccgggtatgatagtgaggaggaggaggagtcacgcccaatgagttacgacgagaagaggcagttgagtttggacatcaataagctccctggcgagaaactgggaagggtcgtgcatattattcaggccagagaaccttccctgcgcgattctaacccagaagagatagaaatcgatttcgaaacactcaaaccgagtaccctccgagagctcgaacggtatgttctctcctgcctgagaaaaaagcccaggaagccctataccatcaaaaagccggttgggaaaacaaaggaagaactggcactagagaaaaagcgggaactggaaaagagactgcaggatgtttctggacagctcaattcaacgaagaaaccaccgaagaaagctaatgaaaaaactgagtcctcatccgcgcagcaggtggctgtgtcccgcctgagcgcgtcttcatcaagctcggacagtagctctagcagcagctcatcatcttcatctgatacctcggatagtgattccggatag

SEQ ID NO: 42481 - DNA, 891 bp, Artificial Sequence
  derived and/or modified sequence
tgacggccccttggagtccagcagcctggcgcacgtttgccgggggaaggtaatgccggcctcctgggacttggtcccgaagcagccgcacctggaaagcgcattaggaagccttcactactgtacgaagggttcgagtccccaacaatggcctccgttccagcgctgcagctgacccccgctaaccccccacctccagaagtgtcaaacccaaagaaacccggtcgcgtaactaatcagctccaatatttgcacaaggtcgtcatgaaagccttgtggaagcaccagttcgcatggcccttccggcaacccgtggacgccgtgaagttgggcttgccggattatcacaaaattattaaacagccgatggacatggggactatcaagcgccgcctggaaaacaattattactgggcggcctccgaatgcatgcaggattttaataccatgttcaccaactgctacatctacaacaaaccgacagacgatatagttctcatggcacaaaccctggaaaagatcttccttcaaaaggttgcaagcatgccccaggaagaacaagaactggtggtgactatccccaagaatagccacaagaagggagcaaaattggccgctctgcagggatcggtgacttccgctcaccaagtacccgccgtctctagcgtctcgcataccgctttgtacaccccccctccagagataccaactactgttttcaatattccccatccgtcagtgatcagttccccactgctcaagtcattacacagcgccggaccacccctgctggcggttacagccgctccacctgctcagcccttagcgaagaaaaagggggtgaagcggaaagctgatactactacacccactcccactgctattttgtag

SEQ ID NO: 42482 - DNA, 2406 bp, Artificial Sequence
  derived and/or modified sequence
atgctgcaaaatgtcacacctcacaacaagctcccaggcgagggcaacgccgggctgctgggccttggtccagaagcggctgcacctggaaagcggatccgtaaaccctctctgctgtacgaaggctttgaatctccaacaatggcatcggtgcctgcactacagcttactcctgcaaacccccctcctcccgaggtctcgaatccaaagaagcccggccgcgtgaccaaccaactgcaatatctacacaaagttgttatgaaagctttatggaagcatcagtttgcgtggcctttccgccagccagtggatgcagtcaagctggggcttcctgactaccacaagatcatcaaacagcctatggatatgggaaccattaagcgacggctggaaaataactattattgggccgctagtgagtgcatgcaagactttaatactatgttcactaactgttacatttataacaagcccaccgatgatatagtgttgatggcccaaacgttagagaagatattcctccaaaaggttgctagtatgcctcaagaagaacaggagctggtagtcacaatcccaaagaactctcataagaaaggggccaaacttgcagccctgcagggatctgtgacgtccgcccaccaggttccggctgtgtcttccgtgagccatacagctctttataccccaccccccgagatccctaccaccgtactaaacattccccacccatccgtcattagctctcctctgctgaaaagccttcattctgccggtccccccctgctagccgtgactgcagcaccaccagctcagccattagccaaaaagaaaggggttaagaggaaggcagatactactacaccaactccaactgcgatcttggccccagggtcacctgcctccccaccaggttccctagaacccaaagccgcaagactgcctcccatgaggcgagaaagcgggaggcccatcaagccacccagaaaggatctgcctgacagtcagcagcagcatcagagctccaagaaaggcaaattgagtgagcagctcaagcactgtaatggtatcctcaaggagctgctatctaagaaacacgctgcgtacgcgtggcctttttataaaccagttgatgctagcgcgcttggacttcatgattaccatgacattataaagcaccctatggacctgtctacggtgaagcgcaagatggaaaatagggattaccgggacgctcaggagttcgccgcggatgtgcgcctgatgttctccaattgttataagtataacccgccagatcatgacgtggtggcgatggctagaaagcttcaagatgtgtttgaatttcggtacgccaagatgcccgatgaaccccttgaacccggaccactgccagtgtcaaccgcgatgcccccaggccttgcgaaatcaagcagcgagagcagtagcgaagaaagcagttcggaatcttcttcagaagaggaagaggaagaggacgaagaagacgaggaggaagaggagtctgagagttcggattccgaagaggaacgagcacaccgcctcgccgagcttcaggagcagttaagagctgtgcatgagcagctcgccgcgctttctcaaggacctattagcaagcccaaacgaaagcgggaaaaaaaggagaagaagaaaaaaaggaaggctgaaaagcatcgggggcgggcaggggcagacgaggacgacaagggtcctcgggctcctcggccgcctcagccaaaaaaatctaaaaaggcaagcggtagcggaggcggcagcgctgccctcggaccgtctgggtttggcccttccggtggcagcggcacaaaattaccaaagaaagctaccaagacagcgccacccgctttacccaccgggtatgactcagaggaggaggaagagagcaggcccatgtcctacgatgagaaaagacagctgagcctggacattaacaaattaccaggggagaagctagggcgggttgttcatataatccaggcacgtgaaccatctctgagagatagcaatcccgaggagatcgaaatcgactttgagaccctgaaaccaagtacactcagggaactggaacggtatgtgctctcatgtctgaggaagaagcccagaaagccttataccattaaaaaaccggtaggcaaaacaaaagaggaattagctctcgaaaagaagcgcgagctggagaagcgattgcaggatgtcagcggccaactgaactccactaaaaagcctcccaagaaggctaatgagaaaacagagagtagttccgcccagcaagtggccgtgtcacgattgtctgccagcagctctagctccgacagctccagctcatcaagctccagcagtagctcagacactagtgactctgactcgggctag

SEQ ID NO: 42483 - DNA, 2424 bp, Artificial Sequence
  derived and/or modified sequence
tgaaatggcgggggtggttcggctacagcgagaggcggagaatacaggctccccggagaaggaaacgccggcttacttggcctggggccggaagcggcggccccagggaagagaattcgaaaacccagcttgctctacgaaggctttgaatcaccaacgatggcctcggttcctgctctgcagcttaccccagcaaatcccccaccccccgaagtgtccaaccccaagaaacccggccgagttaccaaccagcttcaatatttacacaaggtggtgatgaaagcattatggaagcaccagttcgcatggccgttccgacaaccggtcgatgcagtgaagttggggttgcccgattaccacaagattatcaagcagcccatggatatggggaccattaagcggcggctcgagaataactattattgggctgcttctgaatgcatgcaagatttcaataccatgttcacaaactgctatatatataacaagcctaccgacgatattgtgcttatggcccagacactcgaaaaaatatttctgcagaaagtcgcgagcatgcctcaagaggaacaggaactggtggtgacgatccccaaaaatagtcacaagaaaggagccaaactggcagcacttcaggggtccgtgacgtctgctcatcaggtgcctgcggtctcctcagtgtctcacaccgccctctataccccgcctcccgagatccctacaacagtgcttaacattcctcatccaagtgtcatctcaagccctctgcttaaatctttgcattctgccggccctccactgctcgctgtgacggctgcccccccggcacagcctctggctaagaagaaaggcgttaagaggaaggccgataccacaacgccaactcccacagcaattctggcacctgggagtcccgctagcccgccagggtctttggagccgaaagcagcacgcctcccacccatgcgtcgggaatccggaagaccgataaagcctcccagaaaagaccttccagattcccagcagcaacatcaatcaagcaaaaagggcaaactgtctgagcagctgaaacactgcaacgggatcctgaaggagctgcttagtaaaaaacatgctgcttatgcgtggccgttctataagccagttgatgcatccgccttaggtttacatgactaccatgatattataaaacacccaatggacctgagcacagtaaagagaaagatggaaaatcgcgattatcgggatgctcaggagtttgccgcggacgtgaggctcatgttcagcaattgctacaagtataaccctcctgatcatgatgtagtcgccatggccagaaaactgcaggatgtgttcgagttccggtacgcgaagatgccggacgagcctctagaacctggacctttgccagtgtctacagcaatgccccccggcctggctaagtcttcatctgaatcatcaagtgaagagtctagctccgaatcgagcagtgaggaagaagaggaagaggacgaagaggacgaagaagaggaggaatccgaatcttcagattccgaagaggaaagggctcacagacttgccgaacttcaagagcaactaagggccgttcacgagcagctagcagccctgtctcagggacccattagtaaacccaagcgcaaacgggagaagaaggaaaagaaaaaaaagcggaaagccgagaagcacagggggagggccggagccgatgaggacgacaaagggcctcgcgcccctaggccacctcaaccgaagaagagcaaaaaggcctcaggttccggcggcggtagtgccgccttggggccctctggatttgggccatccgggggctctggaaccaaactccccaaaaaagctaccaaaactgctccacctgctctacctacgggttatgactccgaagaggaggaagagtcccgcccgatgagctatgatgagaagagacagctatctctcgatattaataaactccctggggagaagttaggccgcgtggtgcacattatccaggcaagggagcccagcttgcgcgattccaatcctgaggaaattgagatcgactttgaaacactaaaaccatcgacactcagggagctggagagatatgtcctgtcctgcctgcgtaagaagcctagaaagccctatactatcaaaaagccagttggaaagaccaaagaggagctggccctcgaaaagaaaagagaactcgagaaacgactgcaggatgtgtccggccaactcaacagcactaaaaagccgcctaagaaagccaacgagaaaactgagagcagttccgcccagcaggttgctgtgtccagactgtctgcttcctcctcgtcatccgattccagctcatcttcaagttcctctagctcctctgatacaagcgatagcgattccggctag

SEQ ID NO: 42484 - DNA, 2424 bp, Artificial Sequence
  derived and/or modified sequence
taaaacggaggagggggcagtgcgaccgcacgaggcggagaatatcggttgcctggtgaagggaacgctgggctcctgggcttgggtcccgaggccgccgcccctggcaagaggatacggaagcctagcctgctgtatgaggggtttgaaagccccactatggctagcgtccccgccctgcagctaactcctgctaaccctccccctccggaagtgagtaacccaaagaagcctggtcgggtgacaaaccaattgcaatatttgcacaaggtcgttatgaaggccctgtggaagcatcagtttgcttggcccttccggcaacctgtagacgccgtcaaactggggttgcccgactatcataaaattattaagcagccaatggacatggggaccataaagcgacgactggagaacaactattactgggcggcttcagaatgcatgcaagatttcaacaccatgttcacgaattgttatatctacaataagccaaccgatgatatcgttttgatggcacaaactttggagaagatttttctacagaaagtagcatccatgccgcaggaagaacaggagctggtggtaacaatccctaaaaactcacacaagaaaggagccaaactcgcagccctgcaggggtcagtgactagcgcccaccaggtgcccgctgtttcctcagtgtctcataccgcattgtatacaccaccccccgagatcccaaccacagtgctcaatattcctcatccttctgtgatctcaagccctctcctgaagagcctacattccgcgggccccccccttttagcagtgaccgccgccccgccggcacagccactggccaagaagaaaggagtgaaacgcaaggctgataccaccacgccaacacctactgcaatcctcgcacctggtagtcccgcctcaccaccagggagtctggagccgaaagctgccagacttcccccgatgaggcgggagtccggacgcccaatcaagcccccaagaaaggacctccccgactcacagcagcagcaccagagcagtaagaaaggtaagctctccgagcaactgaagcactgcaacggtattctgaaggagctcctgagcaaaaagcatgcagcatatgcctggcctttttataagcccgtagacgcctccgccttgggactccatgattaccatgacattattaaacaccccatggatctgagtactgtgaagcgcaagatggaaaatagagactaccgggatgcgcaagagtttgccgctgacgttaggttgatgttcagcaattgttataaatacaacccaccagaccacgacgtggtcgccatggcccgaaaactgcaggatgtattcgagttccgctatgccaagatgccggacgaacctctggaacctggacctctgcccgtatccactgctatgccacccggcctcgcaaagagttcaagtgagtcttccagcgaggagagctcgtctgagtcaagcagtgaggaagaggaggaggaagatgaggaggacgaggaggaggaggagtcagagtccagcgacagcgaagaggagcgcgcacatcgtctcgccgaactgcaggagcagttgcgagctgttcacgagcagctggctgcactgtcacaggggccaatctcaaagccgaaacggaaacgtgaaaaaaaagaaaaaaagaagaagcgtaaggctgaaaaacatagagggcgcgccggcgctgacgaagacgataaaggtcctcgggccccccgcccgcctcagcccaagaagtccaagaaggcttctggtagcggcgggggatcagccgctctggggcctagcggattcggcccctccggtggctctggaactaagctgcctaagaaggccacgaaaaccgctccccccgccctgccaacgggctacgatagcgaagaggaggaggagagtcgacctatgagctatgacgagaagcgccagttgagcctggatatcaataagctgcctggggagaaacttggacgagtcgttcacattatccaggctcgtgagccaagcctcagagacagtaacccagaagagattgaaattgactttgagactctgaaaccgagtactctgcgtgagctggagcggtatgttctctcatgtctgcgaaaaaaaccacgaaagccgtacacgattaaaaagcccgtgggaaagactaaagaagagctcgcactggaaaagaagcgtgaactggagaaacgactacaggatgtcagcgggcaactgaacagcacaaaaaaaccacccaaaaaagccaatgagaaaaccgaaagcagttcagcacagcaggtggccgtgagccgtctttctgcgagcagctcgagttcagactcatcatcctcttcctcttcctcctcttctagtgatacatctgattccgattctggatag

SEQ ID NO: 42485 - DNA, 2424 bp, Artificial Sequence
  derived and/or modified sequence
taaaacggagggggtggcagtgcgacggcccggggcggcgaatatcggctccccggcgaaggcaacgcaggtctgctcggtctcggaccagaggccgcagcaccaggaaaacggattaggaagccatcactgctctatgagggtttcgaaagcccaacgatggccagcgtccccgccctgcagctcactccggcgaacccacctcctcctgaagtatccaatcctaaaaaacctggaagggttaccaatcagttacagtatttgcacaaggtggtaatgaaagctctgtggaagcaccagtttgcctggcccttccggcagccagtggatgccgtgaaattgggacttcctgattatcacaaaattattaaacagcccatggacatggggaccattaaaaggcgactggaaaacaattattattgggcagctagcgagtgtatgcaagattttaacaccatgttcaccaactgctacatctacaacaaaccgacggacgacatagtgttgatggcacagactttggaaaagatttttttacagaaggtggcgtccatgccccaagaagaacaagagctggtggtgactatccctaagaattctcacaaaaagggagccaagttagccgccctgcaaggtagcgtaacgtccgcacaccaggtgcccgccgtgtcttccgtgagtcacaccgcgttgtacacaccaccaccagaaatccccactacggtcctgaatattccacatcccagcgtgatcagtagcccacttctgaaatctctgcacagcgctggcccccccctcttagcagtgactgctgcacctcctgcccaacctctagcgaagaaaaagggagtgaaacgtaaagccgataccaccacgccaactcccaccgccatcctggcccctggcagcccagctagccctcctgggagcctggagcctaaagctgctaggttaccacctatgaggcgtgagagcgggagacctatcaagcccccgcggaaggatcttcccgactcccagcaacagcatcagagtagcaaaaaaggtaaactgagtgaacagcttaagcactgcaacggcatcctgaaagaactgctgtctaagaagcatgccgcctacgcatggccattttataaaccagtcgacgccagtgcgctcggcctgcatgattatcatgatatcattaaacacccaatggacctgtcaactgtgaagaggaaaatggagaaccgcgattaccgcgacgcacaagaatttgccgcagacgtccgattgatgttctccaactgttataagtacaaccctcctgaccacgacgtggtcgctatggctcggaagctgcaggacgtgttcgaattccggtatgctaagatgcccgacgaaccactggaaccaggtccactacctgttagcacagcaatgccgcctgggctggccaagtcgtcttcggagagctcctcagaagagagtagctctgaatcatcatctgaggaggaggaagaagaggatgaggaagatgaggaagaggaggaaagcgagagctcggactctgaggaagaaagagctcatcgactcgcggagttgcaggaacagttacgtgctgtccatgaacaattggcagccctgagccaggggcccatttccaagcccaaacggaaaagggagaaaaaggagaagaaaaaaaagcggaaagcagagaagcaccgaggtcgcgccggagctgatgaggatgacaaggggccacgggcgcccagaccacctcagccaaaaaagagcaagaaggcctcaggcagcggtggtggttctgcggcactagggccaagcggatttggacctagcggcggtagcggcaccaaattgccaaaaaaggctaccaagactgctcccccagcgttacctacaggttatgactctgaggaggaagaagagtctaggcctatgagttatgacgagaaaagacagctgtccctggatatcaacaaacttcccggggaaaagctgggccgagtggttcatatcattcaagcacgggaaccaagtctgcgcgactccaaccccgaggagattgaaattgattttgagaccctgaaaccatctactctcagagaactcgaaaggtatgtgttaagctgtctccggaaaaaacctcggaagccttataccattaaaaagcctgtgggtaagactaaggaagagctggctctggagaaaaagcgcgaacttgagaaaaggctccaggacgtgagtggacaactcaactccacaaaaaagccacccaagaaggcaaacgagaaaacagaaagttccagtgcacaacaggtcgcagtgtcccgattaagtgcatccagtagttcctcagacagttcgagtagctccagctcttcttcatccagcgacacatctgactccgatagcgggtag

SEQ ID NO: 42486 - DNA, 2406 bp, Artificial Sequence
  derived and/or modified sequence
atgcttcaaaatgttacaccacataataagttaccaggggaggggaacgccggcctgctaggactgggacccgaggctgcggccccaggaaagcgaatccgcaaacctagtctgctgtatgagggttttgaatctccaaccatggcaagtgtgccagcactacaactgacaccagccaacccaccacctcctgaagtgtccaatccaaagaagccaggtcgtgtgactaaccagctccagtacctccacaaagtggtgatgaaggcactgtggaaacatcagttcgcctggccatttcggcaacccgtggacgctgtaaagctgggactccccgattatcacaagattattaaacagccgatggatatgggaacaatcaagcgcaggctcgaaaataactactattgggcagccagcgaatgcatgcaggatttcaacaccatgtttacaaattgctatatatataacaagcccaccgatgatatagtcttgatggcgcagaccctcgagaaaatctttctgcagaaggttgcatctatgccccaggaggaacaagaattagtcgtgacaatcccgaaaaattcccataaaaagggcgccaaactggccgcactccaggggtccgtgacctccgcacatcaggtgcctgctgtatcatcagtatcacacactgctttatacaccccacctcctgagatccccacaacggtatttaatatcccccatccaagtgtgatttcctctccccttctgaaaagcttgcacagtgccgggccgcccttactcgcagtaactgctgcccccccggctcagccactggccaaaaagaagggggtgaagagaaaggccgacactacgaccccaacaccaacagccatattggcccctggtagccctgcttcccctcccgggtctcttgaaccaaaggcagcccggctgccccccatgagaagagaaagtggtcggcctatcaagcctcccaggaaagacctccccgatagccaacagcaacatcagtcttctaaaaagggaaagctcagcgagcagttaaagcattgcaacggaatactcaaagagctattaagtaagaaacacgccgcctatgcctggccgttctacaaaccggttgatgcatcagccctaggcctgcatgactaccatgatatcataaagcacccaatggacctgagcaccgtgaagaggaagatggaaaatagggattaccgggacgcccaggaattcgcagccgacgtccggcttatgtttagtaattgttataagtacaacccacctgatcacgacgtggtggctatggctagaaagctgcaggacgtgtttgaatttagatacgccaagatgccagacgaaccacttgaacccggcccattacccgtgagcacggcaatgccccctggcttggcaaagagttcttctgaaagctcctcagaagaatcatcttccgagagtagctcagaagaggaggaagaggaggacgaagaagacgaggaggaggaggaaagcgagagttctgactcggaagaggagagggcccaccggctcgccgaactgcaagagcagttgcgtgctgtccatgagcagctggccgcgctgagtcaagggcctatatcaaaacctaaacggaagagagagaaaaaggagaaaaagaaaaagagaaaggccgagaaacatcggggtcgcgcaggcgctgatgaggacgataagggcccccgcgcaccgaggcctccacagcccaagaagtcaaagaaggcctctgggtccggagggggctctgccgcactgggcccatctgggttcggtccttctggaggcagcgggaccaaattgccaaagaaggccacgaaaactgcgcccccggcactgcccacgggttacgacagcgaagaggaggaggagagtcggcctatgtcttacgacgagaaaagacagctgtccttggatattaacaagctgccgggcgaaaaacttggacgagtggtgcatatcattcaggcccgagaaccatctttacgcgattctaaccccgaagagatcgagattgacttcgaaacactgaagccatcaaccctcagagagctggagaggtatgtgctgtcatgccttcgcaaaaaacctcgcaagccttatactatcaagaaacccgtgggaaaaaccaaagaagaactggccctagagaagaaaagagagctggagaaaaggctgcaggacgtcagcggacagctgaacagtactaaaaaacctccgaagaaagccaatgagaaaacggagtcctcatccgcccagcaggtcgccgttagccggctttctgcttcttcatctagctccgactcaagtagcagtagctcaagttcatcctcatcagacacctctgattctgactccggttag

SEQ ID NO: 42487 - DNA, 891 bp, Artificial Sequence
  derived and/or modified sequence
taaagacctttgggagtgcagcagcccggggctagactgccaggcgagggaaacgcggggttgttaggactgggtccagaggcagctgcccccggcaagcgaattcggaaaccttcattgttgtatgaggggttcgaaagccctacgatggcctccgtcccggctcttcagctcacccccgcaaatcccccacccccagaggtgtcaaaccctaagaaacctggccgcgtcaccaaccagttgcagtacctccacaaagtggtcatgaaggcactgtggaagcatcagttcgcgtggccgtttagacagcccgtcgacgctgtgaaattaggtctccctgactatcacaagattataaagcaacccatggatatggggacaataaaaagaagactcgagaacaactattattgggcggcctctgaatgtatgcaagatttcaatactatgttcactaactgctacatatacaacaaacctaccgacgacatcgtgctgatggcacagactctggaaaaaatttttttacagaaggttgcctccatgccccaggaggagcaggaactagtggtcactatccccaagaattctcacaaaaaaggcgctaaactggccgctcttcaaggcagcgttaccagcgctcatcaggtccccgccgtgagttcagtttctcacactgccctgtatacccctcccccagagatcccgacaactgtgctcaacatcccacatccaagcgtcatttccagccccctgctcaagtctctgcacagcgccggaccaccccttttggccgtgacggccgctccaccagctcaaccactcgcaaaaaaaaaaggggttaagcggaaggctgacactactactccaacccctacagccatcctgtag

SEQ ID NO: 42488 - DNA, 891 bp, Artificial Sequence
  derived and/or modified sequence
tgaagaccgctgggtgttcagcagcctggggccagactgcctggtgaaggcaatgccggcttgctgggcctggggcccgaagccgcagcacccggcaagagaattaggaaacccagtctgttgtatgaagggttcgagagccccactatggcctccgttcctgccttgcagctgactcccgccaaccctcctccccctgaagtgtctaatcccaagaagcccggacgggtgacaaaccagctccagtatctgcacaaagtcgtgatgaaggccctgtggaagcaccagttcgcatggccatttcgacaaccagtcgatgcagtgaagctgggacttcctgactatcacaagatcattaagcaacccatggacatgggcactataaaacgaagactggaaaataattattactgggcagcctcagagtgcatgcaggacttcaacaccatgttcaccaactgttacatatataacaagcctactgatgacattgtgttaatggctcaaacattggagaaaattttccttcaaaaggtggcttccatgccgcaggaagaacaggaacttgttgtgaccatacccaaaaattcgcataagaaaggggccaaactggcagcactgcaaggatctgtaaccagcgcgcaccaggtgcccgcagtgagctccgtgtctcacaccgcattgtacacaccacctcctgagataccaaccactgtgctgaacatcccacatcctagcgtcattagtagtcccttgttgaaaagtttacattccgcgggcccaccattgctggcagtgactgcagcccccccggcacagccattagcaaaaaagaaaggtgtaaagagaaaggcagacaccacaaccccaacccccacagccattctctag

SEQ ID NO: 42489 - DNA, 891 bp, Artificial Sequence
  derived and/or modified sequence
tgacgccctttaggcgtccagcagccgggagctcgcttgccgggagagggtaacgccggcctcctcggcctaggccctgaggccgccgctccaggcaaaaggattcgcaagccaagcctcctttatgaggggttcgagagccccaccatggcaagtgtgccagcactgcagctgacacctgcgaatccacccccgccagaggtatcaaacccaaaaaaacccgggagggtcacgaaccagctccagtatcttcacaaggttgtgatgaaagctctgtggaaacaccagtttgcatggcccttccggcaaccggttgatgctgttaagcttggcctacccgattatcacaagatcatcaaacagcctatggatatgggaactattaaacggcgcctggagaacaattattattgggctgcaagcgagtgtatgcaggactttaacactatgttcacaaactgttacatttataataagcccactgatgatatcgtgctgatggcccagacactagaaaagatcttcctgcagaaggtggcatctatgccccaggaggaacaggagttagtggttacaataccaaaaaattcccacaagaagggcgccaagctggctgccctccagggatcagtcacaagcgcgcaccaagtccccgcagtcagctccgtgtcccacactgctctgtacaccccacctcccgagatccccaccactgtgctgaatatcccccacccatctgtgatcagttcacccctattaaagtctttgcactcggcaggcccgcctctgctggctgtaaccgccgcgccgccagcccagccactggctaagaaaaaaggggtgaagaggaaggccgataccacgacccctaccccaactgccatactatag

SEQ ID NO: 42490 - DNA, 1860 bp, Artificial Sequence
  derived and/or modified sequence
tgaaatgggggtggaggtagtgctaccgcccgcggaggggagtaccgcctgcccggcgaagggaatgctgggctgcttggtttgggccccgaggctgcagcacccggcaagcggatcaggaagccatccctcctgtacgaaggtttcgaaagtccaactatggcttccgtgccagcgctgcagctgacccccgcgaaccccccaccccccgaggttagcaaccccaagaagccgggtagagttaccaaccaactccagtacctccacaaggtagtcatgaaggctctatggaaacatcagttcgcatggccgttcaggcagcccgttgatgctgtgaagttgggtttaccagactaccacaagatcatcaaacaaccaatggatatgggtacaatcaaaaggagactcgagaacaactattattgggccgcgtcggagtgtatgcaggacttcaacactatgttcactaactgctacatctataacaagccaaccgatgacatcgtccttatggcccaaacgctggaaaagatcttcctgcagaaggttgcctcaatgcctcaggaggaacaggaactggtggtaaccatcccaaaaaactctcacaaaaagggggcaaaacttgctgcattgcaaggctctgtgacatcagcacaccaggtccctgccgtgtcctccgtctctcacaccgcgctgtatacacctcccccagaaatcccgaccaccgtcttaaatatccctcatccatccgtcatcagtagtccgctcctgaaatctctacatagcgccggcccacccttgctggctgtgaccgcggcaccgccagcccaaccactggccaagaaaaagggggtgaagagaaaggcggatactacaacccctacgcccaccgctatcctcgcgcccggctcccctgcgtcaccgcctggctctctggagccaaaggcggcacgactccccccaatgaggagggaatctgggagacccatcaagccaccccggaaagatctgcccgattcccagcagcagcaccagagttccaagaagggcaagttgtctgagcagttgaaacactgtaatggaatcctgaaagagctccttagcaaaaagcacgcggcctacgcttggccattctacaagccagtggacgcgagcgccctaggtcttcacgattatcatgacattattaaacatcccatggatctcagcaccgtcaaacggaaaatggagaacagggactatcgagacgcacaggaattcgctgctgatgtgaggctgatgttttccaactgctataaatacaacccccccgatcacgacgttgtcgcaatggctagaaagctgcaggatgtgttcgaatttcggtacgcgaaaatgcctgacgagccactcgaacccggacctcttcccgtatcaaccgccatgcctcccgggctggctaagtcatcatcagagagcagtagtgaggagagcagctcagagtcaagctctgaggaggaggaggaggaggatgaggaagatgaggaggaagaagagtctgagtcaagcgactctgaggaagagagggcacataggctcgccgagttacaggagcagctccgggcagtccatgaacagctcgctgcacttagccagggacctatcagcaaaccaaagagaaagcgggagaagaaagagaagaagaagaagcgtaaggcagaaaagcatagagggcgggctggcgcggatgaagatgacaaggggcctagagctccgagaccccctcagccgaaaaagagcaaaaaggcctccgggagcggcggaggatcggctgctctggggccctccggattcgggccaagcggcggaagcggcacctag

SEQ ID NO: 42491 - DNA, 2406 bp, Artificial Sequence
  derived and/or modified sequence
atgttacagaatgtgactccccataataaactaccgggtgagggtaacgccgggttgttgggactcggccccgaagccgccgctcccgggaaaagaatcaggaagccttctttactttacgaaggatttgaaagtccaacaatggcctccgttcccgccctccagctcacccccgcgaaccctcctccccctgaagttagcaatcccaagaaaccaggccgagtcaccaaccaactacagtatctgcataaagtggtaatgaaggcactgtggaagcaccaattcgcgtggccttttcgccaacccgttgatgcagtcaagctgggactgcccgattaccacaaaataattaaacagcccatggacatgggtacgatcaagcggcggctcgagaacaactactattgggccgcatcagagtgtatgcaagattttaacacaatgtttacaaattgctacatttacaacaagcctactgacgacatcgtgctcatggcccagacactcgagaaaattttcctgcaaaaagtggccagcatgccccaagaggagcaagagcttgtggtgacaatcccaaaaaatagccataagaagggcgcaaaactggctgcactgcaagggagtgtcacaagtgctcaccaggtacctgcagtgtcttcagtgagccataccgccctgtatactcccccacctgagattcccacaacagttctgaacattcctcatcccagcgtgatcagctcccccctcctgaagtctctgcactccgcaggcccgcccctgttggcagttacagctgcgccgcccgcccagcccctggccaagaagaaaggcgtgaagaggaaggccgacaccaccactcccacgcctacggccatattagctcctggctctccggcttccccccctggctcgctggagcctaaagccgctcggttgccaccaatgcgaagggagagtggacggccaattaagccgcccaggaaagaccttccagatagccaacagcagcaccagtccagtaagaagggtaaactgagcgaacaattaaaacactgcaatggtatcctcaaggagctactgtctaaaaagcacgccgcatacgcctggcctttctacaaacccgtcgatgcatctgctctaggtctgcatgactatcacgatattattaaacacccaatggacttgtccacagtcaagcggaaaatggagaatcgggactatcgagacgcacaggagttcgctgcagacgtgagactgatgttttcgaactgttataagtacaacccgccagatcatgatgtggtcgctatggcaaggaagttacaagacgtgttcgagttccgttacgccaagatgccggacgagcctctggaacccggccctctccctgtttctaccgctatgccacctggacttgcaaagagtagcagcgagtctagttcggaagaaagctcctccgagtcatctagtgaggaggaagaagaagaggatgaggaggacgaagaagaagaggagtctgagtctagcgactcagaggaggagcgggcgcaccgccttgccgaactacaagagcagctgagggcagtacacgaacagctcgctgccttgtcccaaggaccgatcagcaaacccaaaaggaaaagagaaaaaaaagaaaagaagaaaaagcgaaaggctgagaagcaccgaggaagagctggggccgacgaggatgataagggcccacgcgcccccagacccccccagcctaaaaagagcaaaaaggcctctggttcaggcggggggagcgccgcgctgggccctagcggcttcggtccatcagggggctcagggaccaagctccctaagaaggcaaccaagactgcccctcctgctctgcccacagggtacgactcagaagaggaagaagaatccaggcctatgtcttacgatgaaaaacggcaactctccctggacatcaacaaactcccaggggagaagctggggcgggtggtgcatattatccaggcacgagagccctcgctgagggactctaacccagaggagatcgaaatcgactttgaaacattgaagccttcgactttgcgggagctcgaacggtacgtgttaagttgtctcagaaagaagccaagaaagccatacactatcaagaagcccgtgggtaaaaccaaggaggagctggccttagagaagaagcgagagctcgaaaaacggctgcaggacgtgagcggccagctcaattctaccaaaaagcctcctaaaaaagccaatgaaaaaacagagtctagcagtgcccaacaggtggcagtgtctcgattatcggcctccagcagtagctcggattcatcatcgagctcatcctcttcgtcctcttctgacaccagcgattctgactctgggtag

SEQ ID NO: 42492 - DNA, 2406 bp, Artificial Sequence
  derived and/or modified sequence
atgctgcagaatgtgaccccccacaacaagctgcccggggagggcaatgccggcctgctgggcctgggccctgaggccgccgcccctgggaagaggatcaggaagcccagcctgctgtatgagggctttgagagccccaccatggcctctgtgcctgccctgcagctgaccccagccaaccccccacctcctgaggtgagcaaccccaagaagccaggccgggtgaccaaccagctgcagtacctgcacaaggtggtgatgaaggccctgtggaagcaccagtttgcctggcccttccggcagcctgtggatgctgtgaagctgggcctgcctgactaccacaagatcatcaagcagcccatggacatgggcaccatcaagaggcggctggagaacaactactactgggccgccagcgagtgcatgcaggacttcaacaccatgttcaccaactgctacatctacaacaagcccacagatgacatcgtgctgatggcccagaccctggagaagatcttcctgcagaaggtggcctccatgccccaggaggagcaggagctggtggtgaccatccccaagaacagccacaagaagggggccaagctggccgccctgcagggctctgtgaccagcgcccaccaggtgcctgctgtgtcctctgtgagccacacagccctgtacaccccacctcctgagatccccaccaccgtgctgaacatcccccaccccagcgtcatcagcagccccctgctgaagagcctgcacagcgctggcccccccctgctggccgtgacagctgcccccccagcccagcccctggccaagaagaagggcgtgaagaggaaggctgacaccaccacccccacccccacagccatcctggcccctggcagccctgccagccccccaggcagcctggagcccaaggccgcccggctgccccccatgagaagagagagcggccggcccatcaagccacccaggaaggacctgcctgacagccagcagcagcaccagagcagcaagaagggcaagctgtctgagcagctgaagcactgcaatggcatcctgaaggagctgctgagcaagaagcacgccgcctatgcctggcccttctacaagcctgtggatgccagcgccctgggcctgcatgactaccatgacatcatcaagcaccccatggacctgagcacagtgaagaggaagatggagaacagagactacagagatgcccaggagtttgctgctgatgtgcggctgatgttcagcaactgctacaagtacaaccccccagaccatgatgtggtggccatggccaggaagctgcaggatgtgtttgagttccgctatgccaagatgccagatgagcccctggagcccggccccctgcctgtgtccacagccatgcctcctggcctggccaagagcagcagcgagagcagcagcgaggagagcagcagcgagagcagcagcgaggaggaggaggaggaggatgaggaggatgaggaggaggaggagagcgagagcagtgacagcgaggaggagcgggcccaccggctggccgagctgcaggagcagctgcgggctgtgcatgagcagctggccgccctgagccagggccccatcagcaagcccaagaggaagcgggagaagaaggagaagaagaagaagaggaaggccgagaagcaccggggccgggccggggctgatgaagatgacaagggcccccgggcccccaggcctccccagcccaagaagagcaagaaggccagcggcagcggcggcggcagcgctgccctgggccccagcggcttcggccccagcggcggcagcggcaccaagctgcccaagaaggccaccaagacagcccccccagccctgcccaccggctatgattctgaggaggaggaggagagccggcccatgtcctatgatgagaagaggcagctgagcctggacatcaacaagctgcccggggagaagctgggccgggtggtgcacatcatccaggcccgggagcccagcctgcgggacagcaaccctgaggagattgaaattgactttgagaccctgaagcccagcaccctgcgggagctggagcgctacgtgctgagctgcctgaggaagaagcccaggaagccctacaccatcaagaagcctgtgggcaagaccaaggaggagctggccctggagaagaagcgggagctggagaagaggctgcaggatgtgtctggccagctgaacagcaccaagaagccacccaagaaggccaatgagaagacagagagcagcagcgcccagcaggtggccgtgtcccggctgagcgccagcagcagcagcagtgacagcagcagcagcagcagcagcagcagcagcagtgacaccagtgacagcgacagcggctag

SEQ ID NO: 42493 - DNA, 891 bp, Artificial Sequence
  derived and/or modified sequence
tgaagacccctgggcgtgcagcagcccggggcccggctgcccggggagggcaatgccggcctgctgggcctgggccctgaggccgccgcccctgggaagaggatcaggaagcccagcctgctgtatgagggctttgagagccccaccatggcctctgtgcctgccctgcagctgaccccagccaaccccccacctcctgaggtgagcaaccccaagaagccaggccgggtgaccaaccagctgcagtacctgcacaaggtggtgatgaaggccctgtggaagcaccagtttgcctggcccttccggcagcctgtggatgctgtgaagctgggcctgcctgactaccacaagatcatcaagcagcccatggacatgggcaccatcaagaggcggctggagaacaactactactgggccgccagcgagtgcatgcaggacttcaacaccatgttcaccaactgctacatctacaacaagcccacagatgacatcgtgctgatggcccagaccctggagaagatcttcctgcagaaggtggcctccatgccccaggaggagcaggagctggtggtgaccatccccaagaacagccacaagaagggggccaagctggccgccctgcagggctctgtgaccagcgcccaccaggtgcctgctgtgtcctctgtgagccacacagccctgtacaccccacctcctgagatccccaccaccgtgctgaacatcccccaccccagcgtcatcagcagccccctgctgaagagcctgcacagcgctggcccccccctgctggccgtgacagctgcccccccagcccagcccctggccaagaagaagggcgtgaagaggaaggctgacaccaccacccccacccccacagccatcctgtag

SEQ ID NO: 42494 - DNA, 2406 bp, Artificial Sequence
  derived and/or modified sequence
atgctgcagaatgtgaccccccacaacaagctgcccggggagggcaatgccggcctgctgggcctgggccctgaggccgccgcccctgggaagaggatcaggaagcccagcctgctgtatgagggctttgagagccccaccatggcctctgtgcctgccctgcagctgaccccagccaaccccccacctcctgaggtgagcaaccccaagaagccaggccgggtgaccaaccagctgcagtacctgcacaaggtggtgatgaaggccctgtggaagcaccagtttgcctggcccttccggcagcctgtggatgctgtgaagctgggcctgcctgactaccacaagatcatcaagcagcccatggacatgggcaccatcaagaggcggctggagaacaactactactgggccgccagcgagtgcatgcaggacttcaacaccatgttcaccaactgctacatctacaacaagcccacagatgacatcgtgctgatggcccagaccctggagaagatcttcctgcagaaggtggcctccatgccccaggaggagcaggagctggtggtgaccatccccaagaacagccacaagaagggggccaagctggccgccctgcagggctctgtgaccagcgcccaccaggtgcctgctgtgtcctctgtgagccacacagccctgtacaccccacctcctgagatccccaccaccgtcttcaacatcccccaccccagcgtcatcagcagccccctgctgaagagcctgcacagcgctggcccccccctgctggccgtgacagctgcccccccagcccagcccctggccaagaagaagggcgtgaagaggaaggctgacaccaccacccccacccccacagccatcctggcccctggcagccctgccagccccccaggcagcctggagcccaaggccgcccggctgccccccatgagaagagagagcggccggcccatcaagccacccaggaaggacctgcctgacagccagcagcagcaccagagcagcaagaagggcaagctgtctgagcagctgaagcactgcaatggcatcctgaaggagctgctgagcaagaagcacgccgcctatgcctggcccttctacaagcctgtggatgccagcgccctgggcctgcatgactaccatgacatcatcaagcaccccatggacctgagcacagtgaagaggaagatggagaacagagactacagagatgcccaggagtttgctgctgatgtgcggctgatgttcagcaactgctacaagtacaaccccccagaccatgatgtggtggccatggccaggaagctgcaggatgtgtttgagttccgctatgccaagatgccagatgagcccctggagcccggccccctgcctgtgtccacagccatgcctcctggcctggccaagagcagcagcgagagcagcagcgaggagagcagcagcgagagcagcagcgaggaggaggaggaggaggatgaggaggatgaggaggaggaggagagcgagagcagtgacagcgaggaggagcgggcccaccggctggccgagctgcaggagcagctgcgggctgtgcatgagcagctggccgccctgagccagggccccatcagcaagcccaagaggaagcgggagaagaaggagaagaagaagaagaggaaggccgagaagcaccggggccgggccggggctgatgaagatgacaagggcccccgggcccccaggcctccccagcccaagaagagcaagaaggccagcggcagcggcggcggcagcgctgccctgggccccagcggcttcggccccagcggcggcagcggcaccaagctgcccaagaaggccaccaagacagcccccccagccctgcccaccggctatgattctgaggaggaggaggagagccggcccatgtcctatgatgagaagaggcagctgagcctggacatcaacaagctgcccggggagaagctgggccgggtggtgcacatcatccaggcccgggagcccagcctgcgggacagcaaccctgaggagattgaaattgactttgagaccctgaagcccagcaccctgcgggagctggagcgctacgtgctgagctgcctgaggaagaagcccaggaagccctacaccatcaagaagcctgtgggcaagaccaaggaggagctggccctggagaagaagcgggagctggagaagaggctgcaggatgtgtctggccagctgaacagcaccaagaagccacccaagaaggccaatgagaagacagagagcagcagcgcccagcaggtggccgtgtcccggctgagcgccagcagcagcagcagtgacagcagcagcagcagcagcagcagcagcagcagtgacaccagtgacagcgacagcggctag

SEQ ID NO: 42495 - DNA, 1842 bp, Artificial Sequence
  derived and/or modified sequence
atgctgcagaatgtgaccccccacaacaagctgcccggggagggcaatgccggcctgctgggcctgggccctgaggccgccgcccctgggaagaggatcaggaagcccagcctgctgtatgagggctttgagagccccaccatggcctctgtgcctgccctgcagctgaccccagccaaccccccacctcctgaggtgagcaaccccaagaagccaggccgggtgaccaaccagctgcagtacctgcacaaggtggtgatgaaggccctgtggaagcaccagtttgcctggcccttccggcagcctgtggatgctgtgaagctgggcctgcctgactaccacaagatcatcaagcagcccatggacatgggcaccatcaagaggcggctggagaacaactactactgggccgccagcgagtgcatgcaggacttcaacaccatgttcaccaactgctacatctacaacaagcccacagatgacatcgtgctgatggcccagaccctggagaagatcttcctgcagaaggtggcctccatgccccaggaggagcaggagctggtggtgaccatccccaagaacagccacaagaagggggccaagctggccgccctgcagggctctgtgaccagcgcccaccaggtgcctgctgtgtcctctgtgagccacacagccctgtacaccccacctcctgagatccccaccaccgtgctgaacatcccccaccccagcgtcatcagcagccccctgctgaagagcctgcacagcgctggcccccccctgctggccgtgacagctgcccccccagcccagcccctggccaagaagaagggcgtgaagaggaaggctgacaccaccacccccacccccacagccatcctggcccctggcagccctgccagccccccaggcagcctggagcccaaggccgcccggctgccccccatgagaagagagagcggccggcccatcaagccacccaggaaggacctgcctgacagccagcagcagcaccagagcagcaagaagggcaagctgtctgagcagctgaagcactgcaatggcatcctgaaggagctgctgagcaagaagcacgccgcctatgcctggcccttctacaagcctgtggatgccagcgccctgggcctgcatgactaccatgacatcatcaagcaccccatggacctgagcacagtgaagaggaagatggagaacagagactacagagatgcccaggagtttgctgctgatgtgcggctgatgttcagcaactgctacaagtacaaccccccagaccatgatgtggtggccatggccaggaagctgcaggatgtgtttgagttccgctatgccaagatgccagatgagcccctggagcccggccccctgcctgtgtccacagccatgcctcctggcctggccaagagcagcagcgagagcagcagcgaggagagcagcagcgagagcagcagcgaggaggaggaggaggaggatgaggaggatgaggaggaggaggagagcgagagcagtgacagcgaggaggagcgggcccaccggctggccgagctgcaggagcagctgcgggctgtgcatgagcagctggccgccctgagccagggccccatcagcaagcccaagaggaagcgggagaagaaggagaagaagaagaagaggaaggccgagaagcaccggggccgggccggggctgatgaagatgacaagggcccccgggcccccaggcctccccagcccaagaagagcaagaaggccagcggcagcggcggcggcagcgctgccctgggccccagcggcttcggccccagcggcggcagcggcacctag

SEQ ID NO: 42496 - DNA, 2424 bp, Artificial Sequence
  derived and/or modified sequence
tgaaatggaggcggcggcagcgccacagcccggggcggggagtaccgcctgcccggggagggcaatgccggcctgctgggcctgggccctgaggccgccgcccctgggaagaggatcaggaagcccagcctgctgtatgagggctttgagagccccaccatggcctctgtgcctgccctgcagctgaccccagccaaccccccacctcctgaggtgagcaaccccaagaagccaggccgggtgaccaaccagctgcagtacctgcacaaggtggtgatgaaggccctgtggaagcaccagtttgcctggcccttccggcagcctgtggatgctgtgaagctgggcctgcctgactaccacaagatcatcaagcagcccatggacatgggcaccatcaagaggcggctggagaacaactactactgggccgccagcgagtgcatgcaggacttcaacaccatgttcaccaactgctacatctacaacaagcccacagatgacatcgtgctgatggcccagaccctggagaagatcttcctgcagaaggtggcctccatgccccaggaggagcaggagctggtggtgaccatccccaagaacagccacaagaagggggccaagctggccgccctgcagggctctgtgaccagcgcccaccaggtgcctgctgtgtcctctgtgagccacacagccctgtacaccccacctcctgagatccccaccaccgtcttcaacatcccccaccccagcgtcatcagcagccccctgctgaagagcctgcacagcgctggcccccccctgctggccgtgacagctgcccccccagcccagcccctggccaagaagaagggcgtgaagaggaaggctgacaccaccacccccacccccacagccatcctggcccctggcagccctgccagccccccaggcagcctggagcccaaggccgcccggctgccccccatgagaagagagagcggccggcccatcaagccacccaggaaggacctgcctgacagccagcagcagcaccagagcagcaagaagggcaagctgtctgagcagctgaagcactgcaatggcatcctgaaggagctgctgagcaagaagcacgccgcctatgcctggcccttctacaagcctgtggatgccagcgccctgggcctgcatgactaccatgacatcatcaagcaccccatggacctgagcacagtgaagaggaagatggagaacagagactacagagatgcccaggagtttgctgctgatgtgcggctgatgttcagcaactgctacaagtacaaccccccagaccatgatgtggtggccatggccaggaagctgcaggatgtgtttgagttccgctatgccaagatgccagatgagcccctggagcccggccccctgcctgtgtccacagccatgcctcctggcctggccaagagcagcagcgagagcagcagcgaggagagcagcagcgagagcagcagcgaggaggaggaggaggaggatgaggaggatgaggaggaggaggagagcgagagcagtgacagcgaggaggagcgggcccaccggctggccgagctgcaggagcagctgcgggctgtgcatgagcagctggccgccctgagccagggccccatcagcaagcccaagaggaagcgggagaagaaggagaagaagaagaagaggaaggccgagaagcaccggggccgggccggggctgatgaagatgacaagggcccccgggcccccaggcctccccagcccaagaagagcaagaaggccagcggcagcggcggcggcagcgctgccctgggccccagcggcttcggccccagcggcggcagcggcaccaagctgcccaagaaggccaccaagacagcccccccagccctgcccaccggctatgattctgaggaggaggaggagagccggcccatgtcctatgatgagaagaggcagctgagcctggacatcaacaagctgcccggggagaagctgggccgggtggtgcacatcatccaggcccgggagcccagcctgcgggacagcaaccctgaggagattgaaattgactttgagaccctgaagcccagcaccctgcgggagctggagcgctacgtgctgagctgcctgaggaagaagcccaggaagccctacaccatcaagaagcctgtgggcaagaccaaggaggagctggccctggagaagaagcgggagctggagaagaggctgcaggatgtgtctggccagctgaacagcaccaagaagccacccaagaaggccaatgagaagacagagagcagcagcgcccagcaggtggccgtgtcccggctgagcgccagcagcagcagcagtgacagcagcagcagcagcagcagcagcagcagcagtgacaccagtgacagcgacagcggctag

SEQ ID NO: 42497 - DNA, 891 bp, Artificial Sequence
  derived and/or modified sequence
tgaagacccctgggcgtgcagcagcccggggcccggctgcccggggagggcaatgccggcctgctgggcctgggccctgaggccgccgcccctgggaagaggatcaggaagcccagcctgctgtatgagggctttgagagccccaccatggcctctgtgcctgccctgcagctgaccccagccaaccccccacctcctgaggtgagcaaccccaagaagccaggccgggtgaccaaccagctgcagtacctgcacaaggtggtgatgaaggccctgtggaagcaccagtttgcctggcccttccggcagcctgtggatgctgtgaagctgggcctgcctgactaccacaagatcatcaagcagcccatggacatgggcaccatcaagaggcggctggagaacaactactactgggccgccagcgagtgcatgcaggacttcaacaccatgttcaccaactgctacatctacaacaagcccacagatgacatcgtgctgatggcccagaccctggagaagatcttcctgcagaaggtggcctccatgccccaggaggagcaggagctggtggtgaccatccccaagaacagccacaagaagggggccaagctggccgccctgcagggctctgtgaccagcgcccaccaggtgcctgctgtgtcctctgtgagccacacagccctgtacaccccacctcctgagatccccaccaccgtcttcaacatcccccaccccagcgtcatcagcagccccctgctgaagagcctgcacagcgctggcccccccctgctggccgtgacagctgcccccccagcccagcccctggccaagaagaagggcgtgaagaggaaggctgacaccaccacccccacccccacagccatcctgtag

SEQ ID NO: 42498 - DNA, 2424 bp, Artificial Sequence
  derived and/or modified sequence
tgaaatggaggcggcggcagcgccacagcccggggcggggagtaccgcctgcccggggagggcaatgccggcctgctgggcctgggccctgaggccgccgcccctgggaagaggatcaggaagcccagcctgctgtatgagggctttgagagccccaccatggcctctgtgcctgccctgcagctgaccccagccaaccccccacctcctgaggtgagcaaccccaagaagccaggccgggtgaccaaccagctgcagtacctgcacaaggtggtgatgaaggccctgtggaagcaccagtttgcctggcccttccggcagcctgtggatgctgtgaagctgggcctgcctgactaccacaagatcatcaagcagcccatggacatgggcaccatcaagaggcggctggagaacaactactactgggccgccagcgagtgcatgcaggacttcaacaccatgttcaccaactgctacatctacaacaagcccacagatgacatcgtgctgatggcccagaccctggagaagatcttcctgcagaaggtggcctccatgccccaggaggagcaggagctggtggtgaccatccccaagaacagccacaagaagggggccaagctggccgccctgcagggctctgtgaccagcgcccaccaggtgcctgctgtgtcctctgtgagccacacagccctgtacaccccacctcctgagatccccaccaccgtgctgaacatcccccaccccagcgtcatcagcagccccctgctgaagagcctgcacagcgctggcccccccctgctggccgtgacagctgcccccccagcccagcccctggccaagaagaagggcgtgaagaggaaggctgacaccaccacccccacccccacagccatcctggcccctggcagccctgccagccccccaggcagcctggagcccaaggccgcccggctgccccccatgagaagagagagcggccggcccatcaagccacccaggaaggacctgcctgacagccagcagcagcaccagagcagcaagaagggcaagctgtctgagcagctgaagcactgcaatggcatcctgaaggagctgctgagcaagaagcacgccgcctatgcctggcccttctacaagcctgtggatgccagcgccctgggcctgcatgactaccatgacatcatcaagcaccccatggacctgagcacagtgaagaggaagatggagaacagagactacagagatgcccaggagtttgctgctgatgtgcggctgatgttcagcaactgctacaagtacaaccccccagaccatgatgtggtggccatggccaggaagctgcaggatgtgtttgagttccgctatgccaagatgccagatgagcccctggagcccggccccctgcctgtgtccacagccatgcctcctggcctggccaagagcagcagcgagagcagcagcgaggagagcagcagcgagagcagcagcgaggaggaggaggaggaggatgaggaggatgaggaggaggaggagagcgagagcagtgacagcgaggaggagcgggcccaccggctggccgagctgcaggagcagctgcgggctgtgcatgagcagctggccgccctgagccagggccccatcagcaagcccaagaggaagcgggagaagaaggagaagaagaagaagaggaaggccgagaagcaccggggccgggccggggctgatgaagatgacaagggcccccgggcccccaggcctccccagcccaagaagagcaagaaggccagcggcagcggcggcggcagcgctgccctgggccccagcggcttcggccccagcggcggcagcggcaccaagctgcccaagaaggccaccaagacagcccccccagccctgcccaccggctatgattctgaggaggaggaggagagccggcccatgtcctatgatgagaagaggcagctgagcctggacatcaacaagctgcccggggagaagctgggccgggtggtgcacatcatccaggcccgggagcccagcctgcgggacagcaaccctgaggagattgaaattgactttgagaccctgaagcccagcaccctgcgggagctggagcgctacgtgctgagctgcctgaggaagaagcccaggaagccctacaccatcaagaagcctgtgggcaagaccaaggaggagctggccctggagaagaagcgggagctggagaagaggctgcaggatgtgtctggccagctgaacagcaccaagaagccacccaagaaggccaatgagaagacagagagcagcagcgcccagcaggtggccgtgtcccggctgagcgccagcagcagcagcagtgacagcagcagcagcagcagcagcagcagcagcagtgacaccagtgacagcgacagcggctag

SEQ ID NO: 42499 - DNA, 1860 bp, Artificial Sequence
  derived and/or modified sequence
tgaaatggaggcggcggcagcgccacagcccggggcggggagtaccgcctgcccggggagggcaatgccggcctgctgggcctgggccctgaggccgccgcccctgggaagaggatcaggaagcccagcctgctgtatgagggctttgagagccccaccatggcctctgtgcctgccctgcagctgaccccagccaaccccccacctcctgaggtgagcaaccccaagaagccaggccgggtgaccaaccagctgcagtacctgcacaaggtggtgatgaaggccctgtggaagcaccagtttgcctggcccttccggcagcctgtggatgctgtgaagctgggcctgcctgactaccacaagatcatcaagcagcccatggacatgggcaccatcaagaggcggctggagaacaactactactgggccgccagcgagtgcatgcaggacttcaacaccatgttcaccaactgctacatctacaacaagcccacagatgacatcgtgctgatggcccagaccctggagaagatcttcctgcagaaggtggcctccatgccccaggaggagcaggagctggtggtgaccatccccaagaacagccacaagaagggggccaagctggccgccctgcagggctctgtgaccagcgcccaccaggtgcctgctgtgtcctctgtgagccacacagccctgtacaccccacctcctgagatccccaccaccgtgctgaacatcccccaccccagcgtcatcagcagccccctgctgaagagcctgcacagcgctggcccccccctgctggccgtgacagctgcccccccagcccagcccctggccaagaagaagggcgtgaagaggaaggctgacaccaccacccccacccccacagccatcctggcccctggcagccctgccagccccccaggcagcctggagcccaaggccgcccggctgccccccatgagaagagagagcggccggcccatcaagccacccaggaaggacctgcctgacagccagcagcagcaccagagcagcaagaagggcaagctgtctgagcagctgaagcactgcaatggcatcctgaaggagctgctgagcaagaagcacgccgcctatgcctggcccttctacaagcctgtggatgccagcgccctgggcctgcatgactaccatgacatcatcaagcaccccatggacctgagcacagtgaagaggaagatggagaacagagactacagagatgcccaggagtttgctgctgatgtgcggctgatgttcagcaactgctacaagtacaaccccccagaccatgatgtggtggccatggccaggaagctgcaggatgtgtttgagttccgctatgccaagatgccagatgagcccctggagcccggccccctgcctgtgtccacagccatgcctcctggcctggccaagagcagcagcgagagcagcagcgaggagagcagcagcgagagcagcagcgaggaggaggaggaggaggatgaggaggatgaggaggaggaggagagcgagagcagtgacagcgaggaggagcgggcccaccggctggccgagctgcaggagcagctgcgggctgtgcatgagcagctggccgccctgagccagggccccatcagcaagcccaagaggaagcgggagaagaaggagaagaagaagaagaggaaggccgagaagcaccggggccgggccggggctgatgaagatgacaagggcccccgggcccccaggcctccccagcccaagaagagcaagaaggccagcggcagcggcggcggcagcgctgccctgggccccagcggcttcggccccagcggcggcagcggcacctag

SEQ ID NO: 42500 - DNA, 2406 bp, Artificial Sequence
  derived and/or modified sequence
atgctgcagaacgtgaccccccacaacaagctgcccggcgagggcaatgctggcctgctgggattgggccccgaagccgctgctccagggaagcgtattcgcaagccttctctcctctacgaaggattcgaatccccaactatggcctctgttcccgccttgcagctgacgcccgcaaatcctcccccgcccgaggtgagcaaccctaagaagcccggacgggtgaccaaccagctccagtatctgcacaaagtggttatgaaagccctctggaagcaccaattcgcatggccgtttcgtcagcctgtggacgccgtgaagctgggacttccagattatcacaaaatcatcaaacagcccatggacatgggaacgatcaagcggagactcgagaacaactattattgggcagccagcgagtgtatgcaggacttcaacaccatgttcacaaactgctacatctacaataagcccaccgacgacatagtgcttatggctcagaccctggaaaagatcttcctgcaaaaggtggcctctatgccccaggaggagcaagaattagttgtgactatccccaagaattcacacaagaaaggagcaaaattggcggccctccagggatcggtcacatctgcccaccaggttcctgctgtgagctccgtttctcacacagcactatacaccccaccacccgagattccgacaaccgtactgaacataccgcacccttctgtgatttcctcaccactgctgaaatcactccactccgccggacccccgcttctagccgtaactgcagccccacctgctcaacctcttgcaaagaaaaagggtgtgaaacgcaaagcagacacaactacaccaacaccaaccgcaattctcgcgccaggctccccagcgtcaccacctggcagcctcgagccgaaggcagctagactcccccctatgcggcgcgaatctggcaggcccattaagccaccgcgcaaggacctgcccgattcacagcagcaacaccaatcaagcaaaaaggggaagttaagcgagcagttaaagcactgtaacggtatccttaaggagttgttgtctaagaaacatgcagcttacgcatggccgttttacaagcccgtagatgcctctgcactgggtttgcatgactaccacgatataatcaagcatccaatggacctctccaccgtgaaacggaaaatggagaatcgcgattaccgggatgcgcaggaattcgcagcagacgtgaggttgatgttcagtaattgttacaaatacaatccaccggatcacgatgtagtagccatggcccggaaattacaggacgttttcgagttccgctacgccaagatgcccgacgaacctctcgaaccaggccctttacccgtttccaccgccatgcctcccgggctcgccaagagttcctctgaatcctcatctgaggagagctcatccgaatcctcctccgaggaggaagaggaggaggatgaagaagatgaagaagaagaggagtcagagtcgtctgacagcgaagaggaaagggcccaccggctagccgaactacaggaacagctgcgggctgtgcatgagcagttagcggctctgtcacagggaccaattagtaaaccaaagcgtaagagagagaagaaggagaagaaaaagaaaagaaaggccgagaagcacaggggaagggctggcgcagacgaggacgataaaggacctcgggctccccgccccccacagcccaaaaagagcaaaaaagcaagcggcagcggtggaggttccgcggccctgggtcccagcgggttcggtccaagtggtggatctggcactaagctaccgaaaaaagcaacaaagactgctccccctgcgctgcctactggatatgacagtgaagaggaagaagagagccgaccgatgagctacgatgaaaaacgtcagctgagtctggatattaacaagctgccaggcgaaaagctgggaagagtggtgcatattatccaggcccgagagccaagtctgcgggacagcaatcccgaagaaatagagattgattttgaaacactaaaaccctccacgctacgcgaactggaacgctacgtgctctcctgcctacggaagaagccaagaaagccatataccatcaagaagccagtgggaaagacaaaagaagaactggccctggagaaaaagcgggaattagaaaagcgcctccaggatgtgtccggacaactgaactcgaccaaaaaacccccgaagaaggcaaacgagaaaaccgaatcttcctccgcacagcaggtggccgtgtcacgactcagcgcgtcaagttccagctcagatagttcctcgagctcctcctcgtcttcatcaagcgatacaagtgactcagattccggctag

SEQ ID NO: 42501 - DNA, 2406 bp, Artificial Sequence
  derived and/or modified sequence
atgctgcagaacgtgaccccccacaacaagctgcccggcgagggcaatgccggactgctcggactcggtcctgaggctgctgcccccggcaaacgcattcgaaagccgagcctcctttacgagggcttcgagtcaccgaccatggcctctgtgcctgctcttcagctaactccagctaatcctcctccacccgaagtgtcgaacccgaagaagccggggagggtgaccaatcagctccagtatctacacaaagtggtgatgaaggccctgtggaagcatcagttcgcctggccattccgacagccagtggacgcggttaaactggggctgcctgactaccacaaaattatcaagcaaccgatggatatgggcacaataaagcggcggctcgaaaacaattattactgggccgcctcagagtgtatgcaggacttcaacaccatgtttaccaattgctacatttacaataagccaactgatgacattgtgctcatggcccagacattagagaagatctttcttcagaaagttgccagcatgcctcaggaggaacaggagttagtggtgacgatcccaaaaaactctcataaaaaaggcgccaagctggccgccttgcagggaagcgtgacatccgcccaccaagtacctgctgtgtcctccgtaagtcataccgccttgtatactccaccccctgagattcctaccactgtcttaaacatccctcacccttccgtgattagcagtcctcttttaaagagccttcactccgctggtccccccctcctagctgtgactgctgctccaccagcccagccccttgccaagaagaagggtgtgaagcggaaagctgacaccactactccgacacctaccgctatactggcccccggctctccagctagccccccgggaagcctggagccaaaggcagccaggctccctcctatgcggcgggagagcggccggcccataaagccaccacgaaaagacctgccagattctcagcagcaacaccagagtagcaaaaagggaaagttgtccgaacagctaaagcattgcaatgggatcctaaaggaactgctgagtaaaaagcacgctgcatacgcttggccattctataagccagtggacgcaagcgccctcgggctacacgactatcatgacataatcaaacatcccatggacctgtcaacagtgaaacgaaagatggaaaaccgtgattaccgcgacgcccaggagttcgcagctgatgtacggttaatgttctccaactgctacaaatataacccaccggatcacgacgtcgtcgcgatggcccgcaagctgcaggacgtgttcgagtttagatacgcgaagatgccggacgagccgctagagcctggacccctgcccgtctccactgctatgcctccaggattggccaaaagctcatcagagtcgtcttctgaggaatcttcttctgaaagtagcagcgaggaggaagaagaggaggatgaggaggacgaagaagaggaggagagtgagtcttcagactctgaggaggagcgcgcccacagactcgccgaactgcaggagcagcttcgagctgtacatgagcaactggcagcactgagtcagggtcccatctccaagccgaagcgcaaacgggaaaagaaagaaaagaaaaagaaacgcaaagccgagaagcatcgcgggagagctggtgccgacgaagatgataaaggcccaagggcccccagaccaccccagcccaagaaaagtaaaaaggccagtggcagcggtgggggaagcgctgcactgggaccttctggttttggtccctcgggcggctcagggaccaagcttcctaagaaggccaccaaaaccgctccgccagccctccctacaggctatgacagcgaagaagaagaagaaagccgcccaatgtcctatgatgaaaagaggcaactgtcactggacatcaacaagttaccaggagaaaaactggggagagtggtccatatcattcaggcccgcgagccatccctccgtgatagcaatcccgaagaaatagagattgatttcgagaccctgaagccctcaaccttgcgtgaactggaacgctatgtgctgtcctgtcttcgtaagaaacctcgtaaaccctacaccattaaaaagccagtgggtaagacaaaggaagaactcgctttagagaagaaaagagaactggagaagcgccttcaggacgtttctggtcagctcaactccaccaaaaaacctcctaagaaagctaacgagaaaactgaaagcagcagcgcccaacaggtggcggtgtctcggttgagtgccagcagcagcagttccgattcctcaagcagttcctcttcgtctagcagctccgacacctctgattctgatagcggctag

SEQ ID NO: 42502 - DNA, 2406 bp, Artificial Sequence
  derived and/or modified sequence
atgctgcagaacgtgaccccccacaacaagctgcccggcgagggcaacgcaggcctgctgggcttaggcccagaggcagccgctcctggcaagcgcattaggaagccatccctcctgtatgaagggtttgagagccccaccatggcctcagttcccgccctccagctgacccccgcgaatcctcccccacctgaggtatcaaaccccaagaaacctggacgggtgacgaatcaacttcagtacttgcataaggttgtcatgaaagcactgtggaagcaccagttcgcatggcccttcaggcagccagtggatgccgtgaaactgggtttgccggactatcacaaaataattaagcagcccatggacatgggtaccattaaacgtcgcctggagaacaattactattgggccgctagcgaatgtatgcaagatttcaataccatgtttacaaattgctacatctacaacaagcccaccgacgatatcgttctcatggcacagacgttggaaaagatctttttgcagaaggtcgcgagcatgccccaggaggagcaggagctggtcgtgaccattcccaaaaattcccataaaaagggggccaagttagccgcactgcaaggctccgtaacctcggcccaccaggtgccggccgtgagcagtgtgagtcacacagctctgtataccccaccccccgagatccccacgaccgttctgaacatcccgcacccctccgtcatctcatccccacttcttaaatccctgcattcggccggccccccgctgctagccgttaccgcagctccgcccgcccagcccctggcaaaaaagaagggggtcaagaggaaggccgacacaacgaccccaactcctacagctatactagccccgggcagccctgcctccccacctgggagtctggagccaaaagctgctagattgccaccgatgcgtcgcgagtccggcaggccgattaagcccccccggaaagatttacccgattctcaacagcagcaccagtcatcaaagaaaggaaagctgagcgaacagctaaagcactgtaacggaatcctcaaagagctgctatccaagaagcatgccgcatacgcatggcctttttacaagccagtcgacgctagcgctctgggcctgcacgattatcacgacatcataaaacacccgatggatttgagtactgtcaagagaaagatggagaaccgagattatcgcgacgctcaggaattcgctgctgacgtaaggctcatgttctctaactgctacaagtataatccccctgaccacgacgtagtggctatggcccggaagctgcaggatgtctttgaattcagatatgcaaaaatgcccgatgaaccactcgagccagggcctctgcctgtgagcacggccatgccacccggtctcgcaaagtccagcagcgaaagctcaagcgaagaatcttccagcgagtcctcatctgaagaagaagaggaagaagacgaggaagatgaggaagaggaggagtccgagtcctcggacagcgaagaagaacgggcccatcggcttgcggaactgcaggagcagcttagggccgtgcacgagcaattggccgccctgagccagggcccaatcagcaaacctaaacggaaaagggaaaaaaaggagaaaaagaaaaaacgcaaggcagaaaaacacaggggaagagccggtgccgatgaggatgacaaaggtccgagagctcctcggccaccacagcctaaaaaatcaaagaaggccagcggcagcggcggaggatctgcggcactggggccgagtggatttgggccctccggcggctcaggcacgaagctccctaagaaggctaccaagacagctccccctgcattgccaaccggatatgacagcgaggaggaagaagagagccggccaatgtcctacgatgagaagcggcagctctcactagacattaataaacttcccggggaaaagctgggaagagtggtccatataattcaagcgagagagccatcactccgggacagcaatcctgaagaaattgagatcgactttgaaaccctgaaaccttcaacattgagagagctcgagcggtacgtactcagttgccttaggaagaagccccgcaagccctatacgatcaagaaacccgtggggaaaactaaggaagaactggctctggaaaaaaagcgggagttggagaagcgtttacaagatgtgtccggccagctcaactctaccaaaaagcctccaaagaaggccaacgaaaaaaccgagtcatctagcgcgcagcaggttgcagtgtctaggttgtcggcatcaagttcttcatcagattccagcagttctagttcctcgtccagctcatcagacacctccgattccgatagtggatag

SEQ ID NO: 42503 - DNA, 2406 bp, Artificial Sequence
  derived and/or modified sequence
atgctgcagaacgtgaccccccacaacaagctgcccggcgagggcaatgcgggcttactgggcctcggtcctgaagccgcagcccctggaaagcggattaggaagcccagtctgctgtacgaaggctttgaatccccaaccatggcaagtgtcccggctcttcagctaaccccagctaacccccccccccctgaagttagtaaccctaagaagcccgggagagtcactaaccagttacaatacctgcacaaggtggtaatgaaggcactgtggaaacatcagttcgcgtggccattcagacaacccgttgatgccgttaagctgggtctcccagactatcataagattatcaagcagcccatggacatgggcactattaaacggcgtcttgaaaataactattactgggcagcatctgagtgcatgcaggactttaacaccatgttcaccaactgctatatctataataagcctacagacgacattgtgctgatggcccaaaccttggaaaaaatattcttgcagaaagtggccagtatgccacaggaagagcaagagttggtggtcactatccccaagaattcacataagaagggggcaaaactcgccgcattacaaggcagcgtcaccagcgcccaccaggttcctgccgtttccagcgtgtctcacacggcactgtatactcctcctcccgagatccccactaccgttctgaacatcccacacccgtctgtgatatcctcccccctactgaagtcccttcatagcgcggggccacctctgctcgctgtaaccgctgccccacccgcacagcctctggccaagaagaagggggttaagcggaaggctgacactaccacccctacccccacagccattctcgcccctgggtccccagccagccctcctggatcgctagaaccaaaggcagcaaggctacctccgatgcggagagagagcggaagaccaatcaagccgccacgcaaggatcttccggacagccagcagcaacaccagtccagcaaaaagggcaaactgagcgagcagctgaagcactgtaatggcatcctgaaagaacttctgtccaaaaaacacgccgcatatgcctggcccttctacaaacctgtggatgcctcagctttgggcctccacgactaccacgacataattaaacatcctatggatctaagtactgtaaaaagaaaaatggagaatcgagactaccgcgacgcccaagaatttgctgccgacgtgcgccttatgttctccaattgttacaagtacaatccacctgaccacgacgtggtcgcaatggctcggaagctgcaggacgtgttcgaatttcgctacgccaagatgcccgatgagcccctggagcctggcccgttgcctgttagtacagccatgcctcctggcttagccaagagctctagcgaatcctcttccgaagaaagctctagtgagtctagctccgaggaagaagaggaagaagatgaggaagacgaggaggaagaggagtcagagtcttcggacagcgaagaagaaagggcacaccgactggccgagctgcaggaacaactgagggccgttcacgaacagttggctgcactctctcagggcccgatctcaaaaccaaagcgcaagagggaaaaaaaggagaagaagaagaagagaaaagctgaaaaacatagagggcgcgcaggggccgacgaagacgataaggggcctagagctcctcgccctccacaacctaaaaagagcaaaaaagcctctggaagcggtggcgggagcgcagccctgggtcccagcggctttggaccctcaggtgggtctggcaccaagcttcctaagaaggcaactaagaccgccccccctgcgctccctaccggttatgattcagaggaagaggaagagtctcgacctatgtcctacgacgagaagcggcaattgtccctggatatcaacaagctgccaggggaaaaactgggtagggtggtgcacatcatacaggcccgcgaacctagcctgcgggactctaatccagaggaaatcgagattgattttgaaacactgaagcccagcactctgagggagttggaaagatatgtactgtcgtgcttacggaagaagccgagaaaaccctacaccatcaagaaaccggttggcaagactaaggaagagctcgccctggagaagaaaagggaactggaaaaacggctgcaggatgtgtccggccagctcaattcaacaaagaaaccacctaagaaggccaatgagaaaacagagagctcgtcagcccagcaggtggctgtctcccgactgtctgcaagttcctcctccagcgactcatcttcgtcaagctccagtagttcgtctagtgatacatccgactccgactccggctag

SEQ ID NO: 42504 - DNA, 2406 bp, Artificial Sequence
  derived and/or modified sequence
atgctgcagaacgtgaccccccacaacaagctgcccggcgagggcaatgcagggcttcttggactcggtcctgaggccgccgctcccggcaaaaggatacgcaagccatctctactgtatgaaggtttcgagagtcccacaatggcatcggtaccagcattgcagttgacgccagccaacccgccccctccggaggtgtcaaaccctaagaaacccgggagagtcacaaatcagttgcagtacctgcacaaggtcgttatgaaagcattatggaagcatcaatttgcttggccgtttcgccaacctgtggacgcagtgaaactcgggttacccgattaccacaaaatcatcaaacaacctatggatatgggcaccattaaacgaagattggaaaacaattactattgggccgccagtgagtgtatgcaggatttcaacaccatgttcacgaactgttacatctacaacaagccaacagacgacatcgtactgatggcccagactctggaaaaaattttcctccaaaaggtggcttcgatgcctcaggaagagcaggaattggttgttacaattcccaaaaacagtcataaaaagggagccaaactcgccgctctccagggcagcgttacctcagcacatcaagtgccggctgtgagtagtgtgtctcacaccgcactgtacactccccctcctgaaattccaacaacagttctgaacatccctcacccctccgttatctcctcacctcttctaaagtccctgcacagcgccggacctcctttattggctgttacagctgcgcctccagctcagccgttagcaaagaagaagggggtgaagagaaaggccgatactacaacgcctactcccactgccattctcgcacccggcagtcctgcgtcccctcctggcagcttagaacctaaggccgctaggctgccacccatgcgccgggagagtgggcgtccaatcaagccaccgaggaaagatctacccgatagccagcagcagcaccagagcagcaagaaaggaaagttgtccgagcagttaaagcactgtaatggcattctgaaagaactgttgtcgaagaaacacgctgcctacgcctggcccttctacaagcccgtggatgcctccgctctgggactgcacgattaccacgacatcattaaacaccccatggacctctccactgtgaaaaggaagatggagaaccgagactaccgggacgcgcaagagtttgctgcagatgtgagactcatgttctctaattgctacaaatacaatcccccagaccatgacgtagtggccatggcccgcaagcttcaagacgtgtttgaattcaggtacgctaagatgcccgatgaaccactcgaacccggccccctacccgttagtactgcaatgccacctggccttgcaaagagcagtagcgagagttcgagcgaggagtcaagtagtgaatcttcttcggaagaagaggaggaggaggacgaggaggacgaggaggaggaggaatctgagtcatctgattctgaggaagaacgcgctcaccgcctggccgaactacaggagcagctgagggcggtgcatgagcagctcgccgccctgagccaggggccgatctccaagccaaaacgcaagcgtgagaagaaagaaaagaagaagaaacgaaaggccgagaagcacagaggcagagcaggagcggatgaggacgacaaaggccctcgggcaccaagacccccacaacctaagaaatctaaaaaggcctcaggcagtggagggggctcggctgctttaggccccagtggattcggcccctccgggggcagtggtaccaaattgccaaaaaaggctacaaagacagcccctcccgcactgcccacaggttatgatagcgaggaagaggaggagtctcgcccgatgtcatatgacgagaaaagacaactgtccctcgacattaataaactgccgggagagaaactgggccgcgtggtccacatcattcaggcgcgggaaccctcactgcgggattcaaatcctgaggaaatagagattgacttcgaaactctcaagccaagcactctcagagaactcgaaagatacgtgctgagctgtctcagaaaaaaacccagaaaaccatataccattaaaaagccggtcgggaaaacaaaggaggaattggcccttgagaaaaagagggagctagagaagcgtctacaggacgtgtccggccagctgaattctactaagaagccacctaaaaaggctaatgagaagacagagagtagttctgcgcagcaagtggccgtttcacgtctcagtgcttcttcatcttcctcggacagcagttcaagctcctcctcctctagctcttcagatactagcgattctgactccggctag

SEQ ID NO: 42505 - DNA, 891 bp, Artificial Sequence
  derived and/or modified sequence
tgacggcccctgggcgtgcagcagcccggcgcccggctgcccggcgaaggcaacgcaggcctgctgggcctaggtcccgaagcagccgctcctgggaagcgaatacggaaaccctccctgttgtacgagggttttgagagtcctaccatggcaagcgtgcctgctctgcagttaacacccgcgaaccctccaccaccagaggtgtccaaccccaaaaagcccgggagggtcactaatcagctgcagtacctccataaggtggtcatgaaagctctttggaagcaccagtttgcatggccgttcagacagccggtcgacgccgtgaagctcggtctgcctgattaccacaagattatcaaacaacccatggacatgggcacaattaaacgacggctggaaaataactactactgggccgcttccgaatgtatgcaggatttcaatacaatgttcaccaactgctatatctacaataagcccactgatgatatcgtgcttatggcacagacacttgaaaaaatcttcttgcagaaagtggcttcaatgccacaggaggaacaggagctggttgttactatcccaaagaattcccacaaaaagggcgccaaactcgctgcactccaggggagcgtgacttccgcccaccaggttcctgccgtctcgtccgtgtctcacaccgctctgtatacacctccaccagagatccccacaactgtactcaatatcccgcatccttcagtgatcagttctcccctgctgaagtctctccacagcgccggacctccccttctcgccgtgacagcggcccctccagcccagccattagccaaaaaaaaaggcgttaaacggaaggcagataccacaacccctactccaaccgcgattctatag

SEQ ID NO: 42506 - DNA, 2406 bp, Artificial Sequence
  derived and/or modified sequence
atgctgcagaacgtgaccccccacaacaagctgcccggcgagggcaacgccggactgctgggactaggcccagaagctgcagcgccaggtaagcgcatcaggaagccttccctgctgtacgaagggtttgagagccccaccatggcttccgtgcctgccctgcagttgacccccgcaaatccgccgccccctgaggtctctaaccctaagaagccaggcagagtgactaatcagttacagtatctccacaaagtggtgatgaaagcactgtggaagcaccagtttgcttggccgttcagacaaccggtggatgcagttaaactggggctccccgactaccataaaataattaagcagccaatggatatgggtaccattaaacggaggctggagaacaactattactgggccgcaagtgagtgcatgcaagatttcaataccatgtttaccaactgttacatctacaataagcccactgacgacattgtgctcatggctcagaccctagaaaagatcttcctgcagaaagtggcgtcaatgccccaggaggaacaggagttggtggtgacaattccgaaaaactctcataaaaagggggctaagctggccgctcttcagggttctgttacctcagcccaccaggtacccgctgttagttcagttagtcacacggcactctacaccccgcctccggagatacccaccacagtctttaatattccacacccctcagtgatcagcagtcctctcctgaagtccttacactcagccggccctcccttgctcgcagtgactgcagctccccctgcccaacctctggccaagaaaaagggggtgaaaagaaaagccgacaccacaactccgactcctaccgccatcctcgctcctgggtccccagccagtcccccaggctcattggagcccaaagccgctaggctgccgcctatgcgccgggaaagcggaaggccaattaagccccctagaaaagacctaccagattcacagcaacagcaccagagttcaaaaaagggaaaattgagcgaacagctgaagcactgtaacggaattctgaaagaattgttgtctaaaaaacacgcagcctatgcctggccattctacaagccagtggatgccagtgcactgggcttgcacgattatcatgatattattaagcatccgatggacctgtccacagtaaaacggaagatggagaatcgggattatcgtgacgcgcaggaattcgctgccgatgtgcgcctgatgttttcaaactgttataaatacaatcctccagaccatgacgtcgtcgcaatggcaagaaaattgcaagacgtctttgagttcaggtatgctaagatgcccgatgagccactggagccggggcctttgccagtgtctactgccatgcccccgggccttgccaagagcagttctgaaagcagctctgaggaatcaagcagcgagtcaagcagcgaggaagaggaggaggaggacgaagaggacgaagaagaagaggagtcagagagctctgacagtgaagaggaacgcgcacaccgactggctgagctgcaggaacagctgcgggccgtccacgaacagctcgcagctctttcccaaggacccataagcaagcccaagcggaagagggaaaagaaggagaaaaagaagaaacggaaagcggagaaacatagagggcgtgcaggggccgacgaagatgacaagggaccacgcgcgcctcgacccccccagcctaaaaagagtaaaaaggcctcagggtccggggggggatctgctgccctgggccccagcggtttcggaccatctggtggctctggaacgaagctccctaagaaggctactaaaaccgcaccaccagccttaccaacagggtacgactccgaggaagaggaagagtcaaggccgatgtcttatgacgagaagcgtcagctgtctctcgatatcaataaacttccaggggagaagctgggcagggtggtgcacatcatccaggcaagggagccatccctgcgtgatagcaatccagaagaaattgagattgattttgaaaccttaaaacctagcacactcagagaactcgagcggtacgtgctatcgtgcctgcgaaaaaagcccagaaagccctacaccatcaagaagccagtggggaaaactaaggaagaattagctttggaaaagaaaagggagctggagaagaggctgcaggatgtctccggacagttaaactcaaccaagaaaccccccaaaaaagcaaacgagaaaactgagagcagttccgctcagcaagttgccgtgagccggctcagcgcgagcagtagcagctccgacagtagctcctcaagcagtagtagttcctcctccgatactagtgactccgattcaggatag

SEQ ID NO: 42507 - DNA, 1842 bp, Artificial Sequence
  derived and/or modified sequence
atgctgcagaacgtgaccccccacaacaagctgcccggcgagggcaacgctggtttactggggctggggccagaggctgctgcccccgggaagagaatacggaagccaagcctgctgtatgagggttttgagtccccgactatggccagcgttccggcactccaactaacccccgccaatcctcctccgcccgaagtctcaaacccaaagaaaccaggacgggtcacaaatcagctgcagtacttgcataaggtagtgatgaaggctctctggaagcatcagtttgcatggccgtttcggcaaccagtggacgccgtgaagcttggtctgcccgactatcataaaattatcaagcagccaatggatatgggcactataaaacgccgactcgaaaataactactactgggcagcctcagagtgtatgcaggattttaataccatgttcaccaactgttatatttacaacaagcccacagacgatatcgtgctgatggcccaaactctcgagaagatttttctgcagaaagtggcctcaatgcctcaagaggagcaagaactggttgtgacgattcctaagaattctcataagaagggtgcaaaattggccgcccttcaaggttcggtgacctctgcccaccaggtccccgcagtatctagtgtgagccacaccgccctgtatacacctccgcccgagatacccaccacagtgctgaatattccccatcccagcgtgatcagctcacctctgctgaaatctttgcattcagccggaccccctttgttagccgtgaccgcagccccacctgcccagcccctggctaaaaagaaaggagtgaaacggaaggccgataccactacccccactccgaccgccatcctggccccaggctcaccagcctctccgcctggatcactggaacccaaggccgctcgactcccaccgatgcggcgagaaagtgggaggccaatcaaaccaccaagaaaggacctaccagattcgcaacagcagcatcagagctcaaagaagggtaagctgagtgagcagctgaagcattgtaacggtatcctcaaagaactgctctcgaagaagcacgccgcctatgcatggcccttttataagcccgtagatgcgagcgccctgggcctccatgactaccacgatattattaagcaccccatggatctcagcacagtgaagagaaaaatggagaatagagattaccgcgacgcgcaggagttcgccgctgacgtcagattgatgttctccaattgctacaaatataatcctccagatcacgatgtggtcgccatggctcgcaaactacaagatgtcttcgaattccggtacgctaaaatgcctgatgaacccctggaaccaggaccactgcccgtgtcaactgcaatgccacctggcctggctaaatcttcttctgaaagtagttctgaagaatccagctctgagagcagttccgaagaggaagaggaggaggacgaggaggacgaggaggaagaagagtcagagagctctgattcagaagaagaacgagcccacagactggccgagctgcaggagcaactgcgagcagttcacgaacagttagccgcccttagccagggtcccattagcaagccgaaaagaaagagggagaagaaagagaagaaaaaaaagcggaaagctgagaagcatcgtggtcgggctggcgctgatgaagacgacaaggggcctagagcccccagacccccacaaccgaagaaaagtaagaaggcaagcgggagtgggggaggctctgccgctctaggtccgagtgggtttggtccaagcggggggtccgggacgtag

SEQ ID NO: 42508 - DNA, 1842 bp, Artificial Sequence
  derived and/or modified sequence
atgctgcagaacgtgaccccccacaacaagctgcccggcgagggcaacgctgggctgctcggcctcgggcctgaagccgccgcccccggaaagcggattcgaaaaccctccctgctttacgagggctttgagtcacccactatggcttcagtccccgctctacagctcactcctgcgaatcctcctccacctgaggtctctaacccaaaaaaacccgggcgggtgactaatcaactgcagtaccttcataaggtagtaatgaaggccctgtggaaacatcaattcgcgtggcctttccgacagccagtggacgccgtaaagctgggactgccagactatcacaaaattattaagcagcccatggatatgggaactatcaagaggagactcgaaaataactactactgggcggcgagcgaatgcatgcaagactttaacaccatgttcacaaattgctacatatacaataaacctacagatgacatcgtcctgatggcacagactctggagaaaattttcttacaaaaggtggctagtatgccacaagaagaacaggagctggtggttactattcccaaaaactcccataagaaaggagcaaagttagcagctttgcagggatctgtcacaagtgcccaccaggtccccgccgtgtcaagcgtcagccataccgctctgtacaccccacctcccgaaattcctactactgtcctgaatattccccatccttctgtcatctcaagtcctttacttaaatccctgcatagcgcaggcccgcccctgttggccgtcacagccgcccctccagctcagcctctggcaaagaaaaaaggcgtgaagcgcaaggcagacactaccaccccaaccccaacagcaattctcgcacccggttcccccgcctctccgccaggctcactcgagccaaaagccgcccgcctgcccccaatgagacgcgaaagcggtcggccaatcaaacctcctaggaaagacctgcctgattctcagcaacagcaccagtcgagtaaaaaggggaagctgagtgaacagctcaagcactgcaatggcattctaaaggaactgctgagtaaaaaacacgctgcctacgcttggcctttctacaagccagtggacgcctccgctttgggcttgcacgactaccacgacattattaaacaccccatggacctgagcaccgtgaagaggaagatggaaaacagagactatagagatgcccaggagttcgctgccgatgtgcggctgatgtttagtaactgctacaaatataatccccctgaccacgacgtcgtggctatggcgaggaagctccaagacgtgtttgagtttcgctatgctaagatgcccgatgagccattagagcctgggcctctgccggtgtcaactgctatgcctcctggtttggccaagtcatcaagtgagagctcaagcgaggaatcgagttccgaaagctcctcagaagaagaggaagaggaggatgaagaggacgaagaggaggaggaaagtgaatctagcgactccgaagaagaaagggcacacagattggccgaactccaggagcagcttcgtgccgttcacgaacagctcgccgcactttcgcagggacccatcagcaaaccgaaaagaaaaagagagaaaaaggagaagaagaagaagcgcaaagccgaaaaacacagagggcgtgccggtgcggacgaggacgataaagggcccagagcaccccggccacctcagccaaagaagtcaaaaaaggcctctggcagtggaggcggcagcgccgcgctgggcccttccggcttcggcccatcagggggctccggaacctag

SEQ ID NO: 42509 - DNA, 2424 bp, Artificial Sequence
  derived and/or modified sequence
tgaaacggcggcggcggcagcgccaccgcccggggcggcgagtaccggcttccaggtgaaggtaacgctggactcttgggactcggtccagaagccgcggccccaggcaaacggattcgcaagccatcactgctatacgaggggttcgagagtcccaccatggccagtgtacctgccttgcagctgaccccagccaacccgccaccccccgaagtgagcaaccctaaaaagcctggccgtgtgacaaatcagttacagtacttgcacaaggtggtgatgaaggcattatggaagcaccagttcgcttggccattcagacagcccgtggacgcggtgaagctggggctgcccgattaccacaaaatcataaagcaaccaatggacatgggcaccattaagagaagattggagaataattactattgggccgcgagtgaatgtatgcaggactttaatacaatgttcacaaactgttacatttataataagccaacagatgacattgtcctcatggctcagacattagaaaagattttcctgcaaaaggtggcatcaatgcctcaggaagagcaggaactggtggtgacgatcccgaagaattctcacaagaagggtgctaagctagcggcgctgcaggggtccgtaacgtcagcgcatcaagtcccggccgtaagctcagtcagccatactgccctgtatacacctcccccagagatacctacgacggtcttcaatataccacaccctagtgtcattagttcgccactcttgaaaagtttgcatagtgccggaccccccttgctggctgtcaccgccgcccctcctgcccaaccattggctaaaaaaaaaggcgtcaaacggaaggccgatactacaacaccaacacctactgcaatcctggctcccggttctcccgcatcccctccaggaagcctggagcctaaggccgcccgcttgcctccgatgagacgcgagagtggccggcccatcaagcctcctaggaaggatctccctgattcacaacaacagcaccaatcatctaagaagggtaagctctcagagcaactaaagcattgcaatgggattcttaaggaacttttgtccaagaaacatgccgcttatgcgtggcccttctacaagccagtggatgcctccgcattagggttgcacgactatcacgatatcatcaagcaccctatggacctgagtacagtgaagcgcaagatggaaaaccgcgactatagggacgctcaggagtttgctgcagacgtgcgcctcatgtttagcaattgctacaagtataacccccccgaccatgatgtcgtggccatggcccgcaagctgcaagatgtgttcgaattccgctacgcaaagatgcccgacgagcccttggaacccgggcccctaccagtgtcaacggccatgccccccggtctggccaaaagctcatctgaatcctcgagcgaagaatcaagtagcgagagctcctcggaggaagaggaagaagaagatgaggaggacgaagaggaggaagagtccgagagctctgacagcgaagaggaacgagctcaccgactggcggaactgcaggagcagttgcgggcagtccatgaacagctggccgcactcagccaaggacctattagcaagcctaaaaggaaacgggagaagaaggagaagaaaaaaaagcgaaaggcggaaaaacacagagggagggccggcgctgatgaagacgacaagggccccagggcacccagaccccctcagcctaaaaagtctaaaaaggctagtggctcaggcggaggatcggctgccttaggaccaagtgggttcggcccgtctggcggatctggaacaaaattacctaaaaaggcgacgaagactgccccccctgccttacctactggctatgactccgaggaggaggaagagagccgcccaatgtcttacgacgaaaagcgtcaactatctctggacatcaacaagctccccggcgaaaaattgggcagggtcgtgcacataatccaagctcgtgagcctagtctgcgtgattctaatcctgaggaaatagagatagattttgagactctcaagccaagtaccctccgtgaactcgaacggtacgtgctgtcctgcttgaggaagaagcctcgcaaaccctacacaatcaagaagcccgtgggcaagactaaggaggagctcgcattagagaagaagcgggaattggagaagagactgcaggatgtgagcggccagctgaacagtaccaagaaaccacccaagaaggctaatgaaaagactgagtccagtagcgcacagcaggtggctgtgtcaaggttgtccgcctcctcttccagctccgatagtagctcttcatcatcttcaagttcatctagtgatactagcgattctgattctgggtag

SEQ ID NO: 42510 - DNA, 891 bp, Artificial Sequence
  derived and/or modified sequence
tgacggcccctgggcgtgcagcagcccggcgcccggctgcccggcgaagggaatgcgggactcctgggacttggtccggaggcagccgctcctggaaaaaggataaggaagcccagcctgctgtacgaagggtttgagtcacccaccatggcctctgttccggccctacagctcacaccggccaacccccccccccctgaagtatccaacccaaaaaagcccggtcgagtgacaaaccagctgcaatacctgcataaagtcgtcatgaaagccctgtggaaacatcagtttgcttggccgtttagacagcctgttgacgctgtcaaactaggtcttcctgattaccacaaaataatcaagcagcccatggatatgggcaccatcaaaaggcgactcgagaataactattattgggctgccagcgagtgtatgcaggatttcaacacaatgtttaccaattgctatatatataataagcctactgatgacatcgtccttatggcacaaactctcgagaaaattttcttgcagaaggtcgcttccatgcctcaagaggaacaagagctggtcgtcaccattccaaagaacagtcacaaaaagggtgcaaaattggctgccctccagggctcagtgacgagcgcacaccaggtgccagctgtttcctcggtgagccacacagctttgtatacccctccacccgagatccccactacagtcttcaatatcccacacccgagcgtgatctcatcacccctgctgaaaagcttgcactcagcgggtcccccgctgctcgcagtgactgcagccccacctgcacagccactggccaaaaaaaagggagtgaaacgcaaagctgacaccaccacgccaactcctactgccatcctgtag

SEQ ID NO: 42511 - DNA, 2406 bp, Artificial Sequence
  derived and/or modified sequence
atgctgcagaacgtgaccccccacaacaagctgcccggcgagggcaatgccggtctgctcggactgggtccggaggcagctgcacccggaaagcgcatcaggaaacccagccttttgtacgaagggtttgaatctccaacaatggccagcgtgccagctctgcagttgactcccgcaaacccaccacctcctgaggtcagcaacccaaaaaagcctggccgagttacaaaccaactgcaataccttcataaggtggtaatgaaagcgctatggaagcaccagttcgcttggcctttcagacagcccgttgacgccgtcaaacttggactgcccgactatcataagatcatcaagcagccaatggatatggggacgataaagcgccgtctcgagaacaattactactgggcagcgagtgaatgcatgcaagattttaacactatgttcacaaattgttacatttataataaacccaccgatgatatcgtgctgatggctcagacactggaaaagattttcctccagaaggtggcctccatgcctcaggaagaacaggagctggtggtgaccatccccaaaaacagccataagaaaggtgcaaagctcgccgctctgcaaggcagtgtgaccagtgcccatcaagtgcccgccgtatcaagtgtgtcccataccgcgctttacacgccaccacctgagatccccacaaccgtcttgaatattcctcatccttcagtaatcagttccccgctgctcaaaagccttcactccgccggcccaccactgctggccgtgaccgccgccccaccagcccagccattagccaagaaaaagggcgtgaagcgaaaagctgacacaacaacacctacccctaccgcgatattagccccaggctcaccagctagccctcccggctccctggaaccaaaggctgcaagactgccacccatgaggagagagagcggaagacccataaagccccccaggaaggacttgccggatagccagcagcagcatcagtcatctaaaaagggcaagctgtctgaacaactcaaacactgtaatgggattctcaaggagcttctgtctaagaagcatgcagcatacgcctggcccttttacaagccagtggacgcctctgctcttggactccatgactaccacgacatcattaagcaccccatggacctttcaacagtgaagagaaaaatggagaatcgcgattatcgggacgctcaggagttcgcagctgacgtgaggttaatgttctctaattgctataagtataatccacctgaccacgacgtggtggcgatggctcgaaaactgcaagacgtgttcgagtttaggtacgccaagatgcctgatgaacccttagagccaggccctctgcccgtgtccacagctatgccccctgggctggctaagagctccagcgaatcaagctctgaggaaagctccagtgaatcaagctctgaagaggaagaagaagaggatgaggaggacgaagaggaggaggagagcgaaagttctgattcggaggaggagagggctcaccgtctcgcggagctgcaagagcagttaagggctgtccacgaacagctggcagcgctttcccaggggccgatttcaaagccaaagagaaagagggaaaaaaaggagaagaagaaaaagcggaaagccgagaagcatcgtggacgtgctggggccgacgaggacgacaaaggacctcgggccccacgaccgccccaacctaagaaatccaagaaagcgtccgggtccggcggtggtagtgccgccttgggaccttcgggctttggtcccagtggagggagcggcacgaaacttcccaagaaagctaccaaaacagcaccacccgcattgccgacagggtatgactccgaggaggaagaggagagccgacctatgtcttatgatgaaaagcggcagcttagcctcgatatcaataagctgccgggcgagaagctgggtagggtcgttcatatcatccaggcacgcgagccaagcctgcgtgattcgaatcccgaggaaattgaaatcgatttcgagacgctgaaaccgagcaccctcagagaactagaacgttatgtattatcttgccttagaaaaaagccacgtaagccttataccatcaaaaaacctgtcggcaaaaccaaggaggaattggctttggagaagaaacgcgaacttgaaaagcgcctgcaggacgttagcgggcagttaaatagcactaaaaaacctcccaagaaggccaatgaaaagactgagtcttctagcgcacagcaggttgccgtcagccgcctgagcgcgagctcaagcagttctgactcctcatctagtagttccagttctagcagctccgacacctccgacagcgattcaggatag

SEQ ID NO: 42512 - DNA, 2424 bp, Artificial Sequence
  derived and/or modified sequence
tgaaacggcggcggcggcagcgccaccgcccggggcggcgagtacagactgccaggtgaaggcaacgctggactgcttggcctgggccctgaggccgctgctcctggcaagaggatccgcaagccgtctctgctttacgagggctttgagtcgccaacaatggcctccgtgcctgctctacaactgacaccggctaaccccccaccaccggaggtttccaacccaaagaaaccgggaagggtcactaatcaactgcagtaccttcacaaggtcgtgatgaaagccctgtggaaacaccaatttgcttggcctttcagacagcccgtggatgctgtgaaactggggctgcctgattaccacaagattattaaacagcccatggatatgggaaccataaagagaaggttagaaaataactactactgggccgccagtgagtgcatgcaggattttaatacgatgttcacgaattgctacatctataacaagcccacagacgacattgtgctgatggcacagactcttgaaaagatattcttgcaaaaagtagcgagcatgccacaggaagagcaggaattagtagtgacaatacccaagaactcccacaagaagggcgctaagctggcagctctccagggtagcgtgacatcagctcaccaggtgcccgccgtgtcatccgtgtcacacactgcactgtatacacccccaccagaaattcccactacagtcttgaacatcccacaccctagcgttatcagcagtccactccttaaaagcctccatagcgctggtcctcctctattggccgtcactgctgctcctccggcccagcccttagcgaagaagaagggagtgaagcggaaggcagataccacaacgcctactccgaccgcaatactcgcaccagggagcccggcttccccaccggggagcttggagcctaaagccgcccgtctccctccaatgagaagagaaagcggtagaccaattaagcctcccaggaaagatcttccagattcccaacagcagcatcagagcagtaagaaggggaagttgagcgagcagctcaagcactgcaatggcatcctgaaggaactgctttcgaagaagcacgctgcctatgcatggcctttctacaagccagtggatgcttccgctctggggctgcatgactaccatgacataataaaacatccaatggacctgtctacggtcaaacggaagatggagaatcgagactacagggatgctcaagaattcgccgctgatgttcgcctgatgttctccaactgctacaagtataatccacctgaccacgacgtcgtcgccatggccaggaaattgcaagacgtgttcgaatttcgatacgcaaagatgcccgatgaacccctggagcccggcccactccctgtgtccacggccatgcccccaggcctggccaagtcatcttcggagtcttcaagtgaagagtccagcagcgagagctcttctgaagaagaggaagaagaggacgaagaggacgaggaagaagaggagtccgaatctagcgattctgaagaggagagagctcatcggctcgctgagctgcaggaacagctgcgggccgtgcacgaacagttagccgctctgtcgcaggggccgatcagcaagcctaagcggaaacgcgaaaaaaaggaaaaaaagaaaaaacgaaaagctgagaaacacaggggacgcgccggagctgatgaggacgacaagggacctagagcacctagaccccctcaacccaagaaaagcaagaaagccagtgggtcaggaggaggatccgctgccctgggacctagcggctttgggccttctggcggcagtggcacaaagttgccaaagaaggcaactaaaactgcaccacccgcccttcccaccgggtatgacagcgaagaagaggaggagtcgcgtcctatgtcctatgacgagaagcggcagttgagcctcgacattaataaactcccaggagagaaactagggagagtggtccacattatccaggctcgagaaccttccttacgggacagcaaccccgaagaaatagaaatagacttcgagaccctgaagccgtctaccttacgcgaactggagcgctatgtgttgagttgccttaggaagaagccccggaaaccatatactattaaaaaacctgttggaaaaacaaaggaggaacttgcacttgagaagaaaagagaactggagaagcgactgcaggacgtgtcgggccagctgaattccaccaagaaaccccctaaaaaagccaacgagaagactgagagttcgtctgcacagcaggtggcagtgagcaggctgtcggccagctcatcttcatctgactcgagttccagctcgtctagtagctcttcctccgatacaagtgactctgacagcgggtag

SEQ ID NO: 42513 - DNA, 2424 bp, Artificial Sequence
  derived and/or modified sequence
tgaaacggcggcggcggcagcgccaccgcccggggcggcgagtacagactgcccggggagggcaacgcagggctgttgggcttggggcctgaggccgccgccccagggaaaagaatccgtaagcctagtctcctctacgagggctttgagtcacccaccatggcctccgtccctgcgctccagttgacgcctgccaatccacctccacctgaagtgtccaacccaaaaaaacctggccgcgtaacaaaccaacttcagtacttacacaaggtcgtgatgaaggcactatggaaacatcagttcgcctggccatttcgacaaccagtggatgccgtgaaacttggactgcctgactatcacaagatcataaaacagccaatggatatgggcactatcaagcggagactggagaataattactattgggcagcctctgagtgcatgcaggacttcaataccatgttcacgaattgttacatctataataagcccaccgatgacatagttcttatggcgcagacactggaaaaaatttttctgcaaaaggtggccagtatgccacaggaagaacaggagctcgtggtcaccatccccaagaattcccataaaaagggggcgaaactggccgccttgcaggggtccgttacaagcgcccaccaggtcccagccgtgagtagtgtcagccataccgcactgtataccccccctccagagatacctaccaccgttctgaacattccccacccctctgtgatctccagtcccctcttgaaaagtctccacagcgccggtccacctctcctggcagtcacggctgcacctcccgcacaacctctggccaagaaaaaaggcgttaaaaggaaggccgacaccacgacccccactccaaccgccattctggcaccaggctctcctgcatcccccccagggtccttagaacctaaggcggcacggctgccgcccatgcgcagagaaagcggtcgccccataaaaccccctcgaaaggatctgcccgacagtcaacagcagcaccaaagttctaaaaagggcaagctgtctgaacaattgaaacactgtaatgggatactgaaagaattactcagtaaaaagcatgcagcttacgcctggccattttataaacctgtggatgcctccgcccttgggttgcacgactaccacgatattatcaaacaccccatggaccttagcaccgttaagcgtaaaatggaaaacagggactaccgcgacgcccaggagtttgccgcagacgtgcgcctgatgttctccaattgctacaagtacaatcctcccgatcacgatgtagtagctatggctaggaaactccaggacgtctttgaatttaggtatgccaagatgcccgacgagcccctggagccaggccctctgccggtctctacggctatgcctcctgggctggcaaaatcatcatctgagtcctcaagcgaggaatcttcttccgaaagttctagtgaggaggaagaggaggaggacgaggaggatgaagaggaggaagagagcgaatctagcgactcagaggaggagagagcccatcgccttgccgagttacaggagcagttgcgtgccgttcatgagcagctcgccgcactgtcccagggtcccatcagcaagccgaagaggaagcgcgagaaaaaagaaaagaagaaaaaaagaaaagcagagaagcacaggggccgagccggggccgacgaagatgataaaggtcctagagctccacggccaccacagcccaagaaaagtaaaaaggcctcaggatccggaggtgggagtgccgctttgggaccaagtgggtttgggccaagtggaggatccggaacaaaattgcccaaaaaagctaccaagacagctccccccgccctgccgaccggttatgatagcgaggaggaagaagagagcagacctatgtcttacgatgaaaagcgtcagctgtctcttgatattaataaacttcctggggaaaaattggggagggtcgtgcacattatccaggcacgtgaaccttccctgcgagacagtaacccggaagagatcgagatagactttgagacgttaaagccttctactctccgagagttggagcggtacgttttgagctgtctcagaaagaagcccaggaagccctatactatcaaaaaaccagtcggcaagacaaaggaagaactcgcccttgagaaaaagcgtgagctcgagaagcggttgcaggatgtgtcagggcagctcaacagtacaaagaaaccccccaagaaggccaacgaaaagactgagtcgagttcggctcagcaggtggctgtgtcccgactttctgcttcttcgtccagtagtgattcatcttcatccagcagcagttctagctcttccgatacaagtgactccgacagtgggtag

SEQ ID NO: 42514 - DNA, 2424 bp, Artificial Sequence
  derived and/or modified sequence
tgaaacggcggcggcggcagcgccaccgcccggggcggcgagtacaggttgcccggagagggtaacgcaggactgctgggcctcggacccgaggctgccgcaccagggaagcgaattaggaaaccatctttgctctatgaagggtttgagagcccaaccatggccagcgtgcctgccctgcagctgactcctgctaaccctcccccgccagaagtcagcaaccccaagaaaccaggcagggtgactaaccaactgcagtatctgcataaggttgtgatgaaagctctatggaaacaccagttcgcctggccgttccggcagcccgttgacgcagtgaagctgggacttcccgattatcacaaaataataaaacagccaatggacatggggacaatcaaacgaagacttgaaaataattattactgggctgcatctgaatgtatgcaggacttcaatacaatgttcacgaactgttacatttataacaagccgacagatgacatcgtgctgatggcacagactctcgagaagatattcctgcagaaggttgccagcatgccgcaggaggagcaggagcttgtcgtgaccataccgaaaaattcacataagaagggcgctaaactggctgcgcttcagggatctgtcacgtctgcccaccaagtgcccgctgtgtcctctgtgagccacaccgccctgtacacacctcctcccgagatccctacgacggttctgaacatcccacatccctctgtgattagttcccccttactgaaaagtctccactcagccggcccccctttgctcgcagtgacggctgcccctcctgcccaacccttggctaaaaagaaaggggttaaacgcaaggctgatacaacgaccccaacacccacggcaatcctggcccctgggtctcctgccagtccaccaggaagccttgaacctaaggcagcccgtcttccgccaatgagaagggagagcgggcggccaattaagcccccacgcaaagacttgcccgactcccagcaacagcatcagtcatcaaagaagggcaaactgtctgagcagctgaaacattgtaacggaattctgaaggaactgcttagtaaaaagcacgccgcctacgcctggccattctacaagcccgtggacgcatccgctctaggactgcacgactatcatgatattatcaagcaccccatggatctttctacagtaaaaagaaaaatggaaaacagggactatcgagacgcccaagagttcgcagccgatgtcagactgatgttcagcaattgttacaagtacaatccgcccgaccacgacgtcgtggccatggctcgcaaactgcaggacgtgttcgaattcagatacgctaagatgccagacgagcctctcgagccaggccccctgcctgtctcaactgccatgccacccggcctagccaagagttcatcggagagtagctccgaagaatcatcctctgaatctagttcagaagaggaagaggaagaggacgaggaagatgaagaagaagaggagtcagaaagttctgatagtgaagaggaacgggcccatcgattagcagagctgcaggaacagctgagggcggtgcatgagcagctcgcagcattaagccaggggccaatcagcaaacctaaacgaaaaagagagaagaaggaaaagaaaaaaaagcgcaaagccgaaaaacatcgcggtcgcgccggcgctgacgaagacgataaggggcccagggcgcctcgcccaccgcagccgaagaagtctaagaaggcttctggctctggtggtgggtccgccgcattgggcccatctggatttgggccgagcgggggtagcggtactaaacttccaaagaaggccactaagacagcccctcctgctctgcccacagggtacgacagcgaagaggaagaagagtcgaggcctatgtcttatgatgaaaagcggcagctgtctttggatattaacaaactgcctggggaaaagctgggtcgggttgtgcatattattcaggcacgagagccgtctttaagagatagcaacccggaagagattgagattgatttcgaaacattgaagccaagtacgctgagagagctggaacgctatgttctgtcttgtttgagaaagaagcctcgcaagccctatactatcaagaaacctgtcggtaagactaaagaggagttggccctggaaaagaagcgcgaactggaaaagaggctccaggacgttagcggacagcttaactcaaccaagaaaccccccaagaaggccaacgagaaaactgagtcgtcatccgctcagcaggttgctgtgtccagattgtccgcttcctcttcctctagcgattcatcttctagttcgtcctccagctcgtctagtgacacatcggatagtgattccgggtag

SEQ ID NO: 42515 - DNA, 2406 bp, Artificial Sequence
  derived and/or modified sequence
atgctgcagaacgtgaccccccacaacaagctgcccggcgagggcaacgcggggcttctgggactaggaccagaagcagcagcaccaggcaaaaggatcaggaagccctcactgctgtatgagggattcgagagtcccacgatggccagcgttccggccctgcagctgacccccgccaacccacctcccccagaagtgtcaaaccctaagaaacctggcagggtgacaaatcagctgcagtacctacacaaggtggtcatgaaggctttatggaaacaccagtttgcctggcctttcagacagccagtggacgccgtcaaactaggcctgccagactaccataagataatcaagcagcctatggacatgggcactattaaacgtcggctggaaaacaactactattgggcagcatccgagtgcatgcaggacttcaacaccatgtttacaaactgttacatatacaataaacctactgacgatattgtccttatggcccagacactagagaagatttttttacagaaggttgcttctatgcctcaggaagagcaggaactcgtcgtgaccattccaaaaaattctcataagaagggagcaaagttagccgctcttcagggatctgtgacttctgcgcatcaggtgccggccgtgtcaagtgtctcccacaccgcactgtatactcctcctccggaaataccgactaccgtgttcaacatcccacatccgtctgtcatttcatccccgctgttaaagtcacttcactccgccgggcctccattgcttgcagtcactgctgccccccctgcacagcctcttgccaagaaaaagggtgtgaaacggaaggcggacacaactacacccaccccaacggctattctggcccccggaagcccagcaagccctccaggatctctcgaacctaaagcggccagactgccccctatgcgcagagagtctggcagacccatcaaacctcctaggaaggacctgcctgattcccagcaacaacaccagtccagtaagaagggaaagctctcagagcaattgaagcattgcaatgggatcctaaaggagcttttgagtaagaagcacgccgcctatgcctggcctttttacaaacccgtagacgcctccgcattgggtctgcatgactaccatgatatcataaagcatccaatggacttgagcacagtgaagaggaaaatggaaaacagggattacagggacgcccaggagttcgctgctgacgttaggctcatgttcagtaattgctacaagtacaacccgcctgatcatgacgtggtagccatggctcgcaaactccaagacgtgtttgaatttcggtacgcaaaaatgccagacgagcccttggagcctggccctctgccagtaagtacagctatgccccccgggttggctaagtctagctccgaaagctcttccgaggagtcttccagcgagtcttctagcgaggaggaggaggaggaggacgaggaggacgaggaagaagaggagtctgaaagttccgattcagaggaggagagggcgcatcgattggcagaactgcaggaacagctgcgcgctgtccatgagcagttggcagctctctcccaaggaccgatctcaaaacccaagaggaagcgggagaaaaaggagaagaaaaagaagagaaaagccgaaaagcatcgggggcgcgcaggcgccgatgaagacgataaggggccgagagccccgaggccgccccaaccaaagaagtctaagaaagcctcaggcagtggcggagggtctgcagccctcggtcctagtggattcggaccatccggaggttcgggcacaaaactgcccaagaaagctacgaaaacagccccgcctgctctgcctacaggttacgatagcgaggaagaagaggagagcaggcctatgtcctacgacgagaaacgccagctttctctggatattaacaaacttcctggcgagaagttgggccgcgtggtgcacattatccaggctagggagccaagcttgcgagatagcaacccggaggagatcgaaattgacttcgaaaccctgaaaccaagcaccctcagagaattggaacgatatgtgttgtcctgtctaagaaaaaaaccgcgcaagccgtatacgattaaaaaacccgtggggaagaccaaggaggagcttgctctggagaagaagcgagagctggaaaaaagacttcaagacgtgtctggccagctgaactccacaaagaaaccccctaagaaagcgaacgagaaaaccgagagctccagcgcacagcaagtcgctgtgtctcggctctcagcttcatctagctcttctgacagctcttcaagtagcagcagctcctcttcttccgacaccagcgattctgattcgggatag

SEQ ID NO: 42516 - DNA, 891 bp, Artificial Sequence
  derived and/or modified sequence
tgacggcccctgggcgtgcagcagcccggcgcccggctgcccggcgagggaaatgccggactcctgggcctgggacctgaagcggctgcccctggcaagaggatcaggaagccaagcctcctgtatgaagggttcgagtcacccactatggcatccgtcccagcattacagctcacacctgccaatccccctcccccggaggtgtcaaatcctaagaaacccggtcgggttactaaccagctacagtacctgcataaggtagtgatgaaagccctttggaaacatcagttcgcttggcccttcagacagcctgtggatgcggttaagcttggactgcctgactaccacaaaatcattaagcagcccatggatatggggaccattaagaggcggctggagaataactattattgggcggcttccgagtgcatgcaggacttcaataccatgtttacgaattgctatatttacaataagccaaccgacgacatcgtactgatggcacagacactggagaagatttttctccagaaagtggccagcatgccccaagaggagcaggaacttgtcgtcactattccgaaaaactcacataagaagggcgccaaactggccgcactccagggaagcgtcacaagcgcacatcaggtccctgccgtttcatctgtaagccatactgctctctataccccgccacctgagatcccaactaccgtactcaatattccacacccaagcgtgatttcctccccactgctcaagagcctccattcagcaggaccccctcttctggccgttacggccgctcctccggcacaacccctggcaaagaagaagggggtgaagagaaaagccgatacgactacaccaacacccacagctatcttatag

SEQ ID NO: 42517 - DNA, 891 bp, Artificial Sequence
  derived and/or modified sequence
tgacggcccctgggcgtgcagcagcccggcgcccggctgcccggcgaaggaaatgccggtctcctcggcctcgggcctgaagcggctgcccccggcaaaaggattagaaagccaagtttgctctatgagggatttgagagtcccaccatggcgtctgtgcctgcacttcagctgactcctgccaacccccctccgcccgaagtgagcaatccgaagaagcccggacgggtaacaaatcagctccagtatctgcataaggtcgttatgaaggctctgtggaagcatcaatttgcttggccatttcgccagccggtggatgccgtcaagttgggcctcccagactatcacaagatcatcaagcagcccatggacatggggactatcaagagacgactggaaaacaactattattgggccgcctccgagtgtatgcaagactttaacaccatgttcacaaactgctacatttacaacaaacccacggacgatattgttcttatggcgcagaccttggaaaagatcttccttcaaaaggtggctagtatgccacaggaagaacaggagctggtcgtgacaattcccaagaactcccacaaaaaaggggctaagctggccgctctgcaaggatccgtgaccagcgcacatcaggtcccagcggtcagcagcgtgagccacaccgcactatacacaccaccccccgaaattcccactactgtcctgaatatccctcatccctcagtgatctcgtcgcccctgttgaagtccctgcacagcgctggtccacccttgttggcagttactgcagccccccctgcacagccgttagccaagaagaaaggggtgaagcggaaggccgacacaacaactcccaccccaactgctatcctttag

SEQ ID NO: 42518 - DNA, 891 bp, Artificial Sequence
  derived and/or modified sequence
tgacggcccctgggcgtgcagcagcccggcgcccggctgcccggcgagggaaacgcaggcctcctgggccttggacctgaggccgccgctccaggaaagcggattagaaagccctccctgctgtatgaggggtttgagagccccaccatggcttctgtgcctgctctgcaacttacaccggctaatccaccccctcctgaggtttccaaccccaagaaaccgggtagggtgacaaatcagctccaatacctgcataaagtcgtcatgaaggctctttggaagcaccagtttgcctggccctttcggcaacccgtggatgctgtcaagctgggtctccccgactatcacaagatcatcaagcagcctatggacatggggaccatcaaaagaaggctggaaaacaattactattgggccgctagcgagtgtatgcaggatttcaatactatgttcaccaactgttacatctataacaagcctaccgacgacatcgtgctgatggctcaaacactggagaaaatcttcttacagaaagttgcatctatgccacaggaagagcaggaacttgtggttactataccaaaaaattcccataaaaaaggcgccaagctggcagctctgcaggggtctgtgaccagtgcccaccaggtgcctgctgtctcatcagtctctcacacagctctctataccccacccccggagattccaaccactgtgctgaacatacctcaccctagcgtcatctccagcccgctgttgaaaagcctgcacagcgccggcccacctctcctggcagtgactgccgcgccaccagcccagcccctggccaaaaagaagggcgttaaacgaaaggccgacacaactacacccacaccaacagctatcctttag

SEQ ID NO: 42519 - DNA, 1860 bp, Artificial Sequence
  derived and/or modified sequence
tgaaacggcggcggcggcagcgccaccgcccggggcggcgagtacaggctgccgggagaagggaacgcgggcctgttgggtttaggtcccgaggcggcggcaccaggtaaacgcatcagaaagccgagcctcctgtacgaagggtttgagagtcctaccatggcttctgtgcctgccctgcagcttacgccagcgaatccgcctcctccggaggtgtctaatcctaaaaagcccggccgggtcaccaaccagctacagtacctgcataaggtcgtcatgaaagccttatggaaacatcaatttgcctggcctttccggcagcccgtggacgcggtgaagcttggactgccagattaccacaaaataatcaaacagccaatggacatgggaaccatcaaaagacgccttgagaacaattattactgggctgccagcgaatgtatgcaagactttaacaccatgtttacaaattgctatatctataataagcctacagacgacatagtgttgatggctcagactctagaaaagatttttctgcaaaaggtcgcttcgatgccccaagaggaacaggaactggtggtcaccattcccaagaattcccacaaaaagggcgctaagctagccgccttgcagggcagcgtgacatccgcgcaccaggtgcccgccgtctcatctgtgtcgcataccgcattatacacccccccgccggagattcctacgaccgttctaaatatccctcatccctcggtcattagttctcctcttctcaaaagcctgcatagcgccggcccccctttattggcagtaaccgccgcacccccggcacagccccttgcgaaaaaaaagggggtaaagcgcaaggcagacactacaactcctacccccactgcaattctggcccccggttctcccgcatctcctcccggctcccttgagccaaaggctgctagattgcctcctatgaggcgtgagtccgggcgcccaattaaacctcctcgcaaagaccttcccgatagccagcagcagcatcagtcttcaaagaagggtaaattaagtgagcagctgaaacactgcaatggtatcctaaaggagctattgtccaagaaacacgctgcttacgcctggcctttctataagccagtcgatgcttcggccctgggcttacatgactatcacgacattatcaagcacccgatggatctgagcactgttaagcgtaagatggaaaatcgagactatcgggacgcgcaagaatttgccgccgacgtgcgccttatgttttccaactgttataaatataaccccccagaccatgatgtggttgcgatggctcgaaagctccaggacgtgttcgaattcaggtatgctaaaatgccggacgagcctctcgaacctggccctctgccagtgtccaccgccatgcctcccggactggccaaatcgagctccgagagctcaagcgaggaaagtagctcagaaagttcctccgaggaggaggaggaggaggacgaggaggacgaggaagaagaagagagcgagtcctctgactcagaggaagagcgggctcaccggctcgccgagctgcaggagcagcttcgcgccgtgcacgagcagctggcggctctcagccaggggccgatctcgaagccgaagagaaagagagaaaaaaaggagaaaaagaagaagcggaaggcagagaagcacagggggagggcaggagctgatgaagacgacaagggcccccgcgctcccagacctccacagccgaagaagtctaagaaggcctctggctctgggggaggatcagcggcactgggcccctcaggctttgggcctagcggaggatcgggaacctag

SEQ ID NO: 42520 - DNA, 2406 bp, Artificial Sequence
  derived and/or modified sequence
atgctgcagaacgtgaccccccacaacaagctgcccggcgagggcaatgcaggcctcctgggtctgggccccgaagccgcagcccccggcaagagaatccgaaagccgagtctcctgtacgagggcttcgagtcgcccaccatggcctcagtgcctgctctgcagctgacgccagcgaatccaccaccacccgaagttagtaaccccaaaaagcctggccgggttacaaaccagcttcagtatctccataaggtagtcatgaaagccttgtggaagcatcaatttgcttggccctttaggcaacctgtagacgccgtcaagctgggtctaccggattaccataagatcataaagcagcccatggacatgggaaccataaaacggaggctggagaataactactattgggccgcttccgaatgcatgcaggatttcaataccatgttcaccaactgttacatctataacaaaccaaccgacgacatagtcctcatggctcaaactctagagaaaatattccttcagaaggttgcttctatgccacaggaggagcaggagctggtagttaccattccaaagaattcacataagaagggagccaaattggccgcgctgcaaggtagtgtgactagtgcccaccaggttcctgctgtgagctccgtttcccatacagcactctacactccccctccggagattccaacaacagtgcttaacattccccatcctagtgtgatcagcagtcctctgttgaagagcctacactccgctggacctccccttctcgcagttactgcagctccccccgctcagcccctggctaaaaaaaaaggagtgaagcggaaggctgacacaacaacccccacccccaccgcaatactggcgccgggttctcctgcatcgccaccgggtagtctggaacccaaagcagcccgcttgccccctatgcgaagggaatccgggcgaccaatcaagccacctagaaaagatctgcctgactcgcaacagcagcaccagtctagcaagaagggcaagctgtcagaacaattaaagcattgcaacggcatcctgaaggagcttttgtcaaagaagcacgcagcatacgcttggccattctacaagcccgtcgacgccagtgctttaggacttcacgattatcatgacatcattaaacatccaatggacctatccacagtgaaaagaaagatggaaaatcgggattacagggacgcacaagagtttgccgcagacgtgagactcatgttttcaaattgttacaaatataacccaccagaccacgatgtggttgctatggctagaaaactgcaagacgtgttcgaattcagatatgctaaaatgccagatgagcccctggaaccaggtcccctgccagtgtctacggctatgccgcctggacttgcaaagagctcgagtgaatccagcagcgaggagtcttcttcagagtctagtagcgaagaagaggaggaggaggatgaggaggacgaggaggaagaggaatccgaatcatcggatagcgaggaagagcgcgctcaccggctcgccgaactgcaggaacaactacgagctgtgcatgagcaactggcagcactatctcagggacccatttcaaagccaaagcggaagcgagagaagaaggaaaagaaaaaaaagcgaaaggcagaaaaacataggggccgtgcgggagcggatgaagacgataaaggccccagagcaccccggcccccacagccaaaaaaaagtaagaaagcgtctggctccgggggcggatctgctgctctgggaccctctggattcgggccctcgggaggttccggaaccaagttacccaaaaaagccacgaagaccgctccccctgctcttccaacaggctatgattctgaagaagaggaggagagtcgaccaatgagctatgacgagaagcgccagctgtctctagatatcaataagttgcctggagaaaaactcgggagagtcgtccatatcatccaggcgagagagccttctttgagagattctaaccctgaagagatcgaaatcgatttcgagacgctgaagccatctaccctgagggaactcgaacgctacgtgctgtcgtgcttgcgcaagaaaccacggaaaccttatactatcaagaagcctgtcggtaaaactaaggaggagttggcgttggagaagaagcgggaattggagaagaggttgcaggacgtctccggacagctcaacagtactaagaaacctccgaaaaaggcgaacgagaagacagaaagctccagcgcacagcaggtggcagtgagcagactgagtgcctcaagcagcagctctgactccagctcaagctcatcttcctcctcctcttccgacacctctgattctgatagcggttag

SEQ ID NO: 42521 - DNA, 2406 bp, Artificial Sequence
  derived and/or modified sequence
atgcttcagaacgttactccgcacaacaagttgcctggtgaagggaacgcgggtctgctcggcttgggacccgaagcagcagcaccaggaaaacggatccggaagcccagcctactgtacgagggttttgaatcgcctaccatggcttcggtaccagcactccagcttacgccagctaatccgcctcctcctgaggtgtccaatcctaagaaacccggaagagtgaccaatcagcttcagtatcttcacaaggtcgtcatgaaggccttatggaagcaccaattcgcatggccatttcgtcagcccgtggatgcagtgaaactaggtttgcccgattatcataagatcataaaacagcctatggatatggggacgataaagaggaggcttgagaacaattattattgggccgcatctgaatgtatgcaagacttcaatacaatgttcaccaactgctacatctacaataagcctactgacgacatagtgctcatggctcagaccctggaaaagattttcctccagaaggtagcttccatgcctcaggaagagcaagagctcgtcgtgaccatccccaagaactcacacaagaaaggcgctaaactcgcggcactgcaaggatcggtgacaagcgcgcaccaggtaccagcggtaagctctgtgtctcatacagcactctacacaccccctcccgaaattcctacaaccgtactgaatataccacatccgtcggtgatcagttcaccgctgcttaagtcgttgcacagcgctgggcctcccctccttgctgttaccgccgcaccaccagcccaacccctggccaaaaagaaaggtgtgaaacgtaaggcggatacaacaactcctactcccaccgccatcctcgcgccaggtagccccgcaagccctcctgggtctctggagcccaaagccgcaagactcccccctatgcgaagagaatccgggagaccgatcaaaccccctcgcaaagacctacccgactcgcagcagcagcatcagagtagcaagaaagggaagctctctgaacaactcaagcactgtaacgggatcttgaaagagctactgtccaaaaaacacgcggcttacgcctggcccttctataaacccgtagatgccagtgcgctagggctacatgattatcatgatatcatcaagcaccccatggacttgtccactgtaaagaggaaaatggagaaccgggattatagagacgcgcaagagttcgccgctgatgtcaggttgatgttcagcaactgctacaagtacaatccgcctgatcatgacgttgtggctatggcgaggaagttgcaggatgtgttcgagtttcgatacgccaagatgcctgacgagcccctcgaacctggtcctttacccgtgtcgactgctatgccacctggcctcgccaagagttcaagtgagtcctcatccgaggaatcaagctctgagtccagtagcgaggaagaagaggaagaagatgaggaagacgaagaggaagaggaaagcgagagtagtgatagcgaggaagaacgggcacaccggctagccgagctgcaggagcagctgagagccgttcacgagcagcttgctgctctgtcccagggcccaatcagtaagccaaagcggaagcgtgaaaagaaagagaaaaagaagaagcggaaagctgaaaagcacagaggacgcgcaggtgccgatgaggatgacaaagggccacgggcaccccgacctcctcagccaaagaagtccaaaaaggccagtggtagcggaggaggctctgccgctttgggaccatcggggttcggaccaagtggcggtagcgggacaaagctcccaaagaaggccacgaaaacagcacctcctgcgctaccaactggctacgacagtgaggaggaggaggaaagtcggcctatgagttacgatgagaagagacaattatctttagacatcaataagttgcccggtgaaaagcttggccgtgtggtgcatatcattcaggctcgggagccatctcttagagacagtaacccggaggagatcgaaatcgattttgaaacgctcaaaccaagcacattaagagaactcgaacgttacgtgcttagctgcctgagaaaaaaacccaggaagccatatacgattaagaagcccgtaggaaaaaccaaggaggagttggcactggaaaaaaaaagggagctcgagaagcgactgcaggatgtgagcgggcagctaaattccacaaagaagccgccaaagaaggcaaatgaaaaaactgagtcttcttcggcgcaacaggttgccgtgagcaggctgtctgcctcaagctccagtagcgattcttcatcgtctagctcctcctcctcaagtagcgacacatccgacagcgattctgggtag

SEQ ID NO: 42522 - DNA, 2406 bp, Artificial Sequence
  derived and/or modified sequence
atgctgcaaaacgtgactccccacaacaagctgcctggagaaggaaatgctgggttgttagggctgggtccggaggccgcagctcctggtaagcggatacggaaacctagcttgctgtacgagggctttgaatccccgactatggcatcagtgcctgccttgcagctgacacccgctaatccaccccctccagaggtgtcgaaccccaagaagcctggcagggtgacaaatcagcttcaatacctgcacaaagtcgttatgaaagccctctggaagcaccagtttgcctggccattccgacagccagttgatgccgtcaagctcggcctcccggactaccataaaattattaaacagccgatggatatgggcaccattaaacgacggctggaaaacaactattattgggccgcatcagagtgcatgcaggacttcaatacaatgtttactaattgttatatctacaataaacccactgatgacatcgttctgatggcccagactctagaaaagatcttcctccagaaggttgcatctatgccacaggaagagcaggaattggtcgtaacaatccctaagaactcacacaagaaaggcgctaagctggctgctctgcagggctccgttacatcagcccatcaggtgccagccgtgtcttctgtaagtcacaccgctctttataccccccctcccgaaatcccgactactgtcctcaatataccacatccaagcgttatctcttcgccactactcaagtccctgcacagtgccggaccccctctgctagccgtgaccgccgctccacctgcacagcctttagctaagaagaaaggggtcaagagaaaagccgacacaaccacacctacccctactgctatcctggcaccagggtctcccgcaagtcccccaggcagcttagagccaaaggccgcaagactgccaccaatgagacgggaatccggcagacccataaaaccaccaagaaaggatctcccagattcccagcagcaacaccagtcctctaagaaaggcaaactctcagagcagctgaagcactgtaatggtattcttaaagaactcctgtctaaaaagcatgctgcatacgcgtggcccttctacaagccagtggatgccagcgccctgggactgcacgactatcatgacattatcaagcatccgatggacctttcaactgtgaagaggaaaatggagaaccgcgattaccgcgacgcccaagagtttgcagccgacgtgaggctgatgttttccaactgctacaagtacaatcccccagatcacgacgttgtggcaatggcgcgtaagctccaggacgttttcgaatttaggtacgccaagatgcctgacgagcctctcgaacctggtccgctgccggttagcacggccatgcctcctggactggctaagtcttcctcagagagttcatccgaggagtcttcaagcgaaagttcttccgaagaggaagaagaagaggacgaggaagacgaggaggaggaggagtcagagtcgagcgatagcgaagaagagcgggctcaccgactcgccgaattacaagagcaactgcgcgcagtgcacgaacaacttgctgcgctttcccagggcccaatttccaaacccaagcgaaagagggagaaaaaggagaagaaaaaaaaaaggaaggccgagaaacatcgagggcgagctggcgcagacgaggatgacaaaggaccacgggctcctcggcctccacagcccaagaagtcaaagaaagcctctggctccggcggaggatctgccgctctggggccaagtggattcggaccttccggtggaagcggcacgaaactgcctaaaaaggcaactaagactgcgcctccagctcttccgactgggtatgattctgaagaagaagaggagagtaggccaatgtcctacgacgaaaagagacagctgagtctcgacattaataaactccctggcgaaaagctaggaagggtggttcacattatacaagccagggagccctcactgcgtgactcaaaccctgaggaaatagaaattgacttcgagactctgaagccttccaccctccgagaattggaaagatacgtgctcagctgcctcagaaagaaaccaagaaaaccatataccatcaagaaacccgtcggcaagacgaaggaggagctcgccctagagaaaaaacgagaattggagaaacggctgcaggacgtgtcagggcagctgaattccacaaagaagccgcctaagaaagccaatgagaaaacagaatcatcttctgcacaacaagtcgctgtatcccggttgtctgctagcagctcatcctccgactcctcctcctccagtagcagtagcagcagcagcgatacctccgattcagattccggttag

SEQ ID NO: 42523 - DNA, 2406 bp, Artificial Sequence
  derived and/or modified sequence
atgctgcaaaacgtcacgccccataataagctccccggtgaagggaatgccggacttctgggacttggcccagaagctgctgctccaggcaaaaggataaggaaaccttccctactctatgaaggattcgagagcccaactatggccagtgttcctgctctacaactcactcccgctaatccacctccgcctgaagtgtcaaaccccaaaaaaccgggaagggttactaaccaactccagtacctgcacaaagtggtaatgaaggctctgtggaaacatcagttcgcttggccgtttcgacagccagtggacgcggtcaaactggggctgcccgactaccataaaataattaagcaacctatggacatgggaacaattaagaggaggctagaaaacaattattactgggccgcatccgagtgcatgcaggattttaatacaatgttcacaaactgttatatttacaacaaaccaaccgacgacattgtgttgatggcccagacactagagaaaattttcctccagaaagtagctagcatgccacaggaggaacaggagctggtagtcactataccgaaaaatagtcataagaaaggtgccaaattagctgcactccagggttccgtaacatccgcacatcaagtgccagctgtgtcctccgtctctcataccgccctgtacaccccacctccagaaataccaactacagtccttaacatcccacacccgtcagtgatctcctcacctctcctgaagtctctccactccgctggacctcctttgttggctgtgaccgctgcccctcccgctcaacctctggcaaagaagaaaggcgtgaaacgcaaagcggatacaactacgcccacaccgaccgccatactggccccagggtctccggcttctcccccaggatcattggagccgaaggctgccagattaccacctatgaggagggagtctggccgacccatcaagccaccaagaaaggacctgcccgattcacagcagcagcaccaatcctctaagaaggggaagcttagcgaacaacttaagcactgtaacggcatcttgaaagagttactttccaaaaagcacgccgcatacgcatggcctttttacaagcccgtcgatgcatctgctctcggactccacgattatcacgatattatcaaacacccaatggacttatcaacagtgaagaggaaaatggaaaatagggattacagagacgctcaggaattcgccgctgacgtgcggctcatgttttccaactgctataaatataacccgcctgaccatgatgtcgtggcaatggcacgcaagctgcaggatgtattcgaatttcgttatgccaagatgcctgacgagcccctcgaacctggtcctctccccgtgtccaccgctatgccacccggtttggcaaaatcctcctctgagtccagttcagaggagtcctctagtgagtcaagcagtgaggaggaagaggaagaagacgaggaggacgaggaggaggaggaaagcgaaagtagcgactctgaagaagaacgtgcacaccggctggccgaactgcaggaacagctcagggcagttcatgagcagttagccgctctgtctcagggccctatctccaagccgaagcggaagagagaaaagaaggaaaaaaagaagaaacggaaggccgaaaagcacaggggacgcgctggggctgatgaagacgataagggtcctcgtgcccctcggcctccacagcccaaaaagagtaaaaaagcttccggctccggaggaggcagcgcagccttggggccttcagggtttggtccctccggcggatctggcaccaaattacctaagaaggccacgaaaaccgcgccaccagccctgcccactggatacgacagcgaagaagaagaagaaagtaggcccatgtcttacgacgagaaaagacaactgagcctggatataaacaaactgccaggggaaaaactggggcgtgtcgtacatataatacaagccagagaaccatccctccgcgactccaacccagaggaaattgagatcgactttgaaactctgaaacctagcacactgagagaactggagcgctatgtgctcagctgcctgcggaaaaagccaaggaagccttacaccatcaagaaacccgttggcaaaaccaaagaggagttggcgctcgagaagaaaagagagctagagaaaagacttcaggatgtgtctggccagttgaacagtaccaagaagccccctaaaaaggcaaatgaaaagactgaatcaagtagtgctcaacaggtagccgtgagcaggctgagcgcctcttcttcatcctctgactcttccagttccagcagctcttcttcaagttctgatacatcagattccgactccggatag

SEQ ID NO: 42524 - DNA, 2406 bp, Artificial Sequence
  derived and/or modified sequence
atgctgcagaacgttacaccacataacaaactgcccggagagggcaatgccggtctgctcggtctaggccctgaggccgctgctcctgggaagcgcattcgcaaaccttccctgttgtacgagggtttcgaaagtcctaccatggccagtgttcctgcgttacagctgactccagccaatccgccaccaccagaagtatccaatcccaaaaaacctggccgtgttaccaaccaactccagtatttgcataaagtggtgatgaaggcactctggaagcaccaatttgcctggcccttccggcagcccgttgatgccgttaagctgggcttacctgactatcacaaaatcatcaagcagcctatggacatgggcactattaaaagacgactggagaataattactactgggccgcaagtgagtgcatgcaagactttaatactatgttcaccaactgctatatttacaacaaacccaccgacgatatagttctaatggcgcagaccctggagaaaattttccttcagaaggtggcatcaatgcctcaagaggagcaagagcttgtggtaacgattccgaagaacagtcataagaagggcgctaagctagcggctcttcagggctcggttacatctgcacatcaggtcccagcggtgagcagcgtgtctcacaccgcactgtacaccccaccccctgaaattccaactacagttctgaacataccacacccgtcagtcatcagcagtcccctcctgaagagccttcactctgcgggtcctcccctcctggccgttacagcagcaccacccgcacaacctctggccaagaagaagggcgtgaaaaggaaggcagacactacaaccccaaccccaactgccattcttgctccgggtagccctgcctcccctcccggtagcctagagcccaaggccgctaggctgccccctatgaggagagagagtggcaggcctatcaagcccccaagaaaggatttaccggactctcaacagcagcaccagtctagcaagaaaggcaaattgtctgaacagcttaagcattgcaatggaatcctgaaggagttgttgagcaagaagcacgcggcatatgcctggcctttctacaaacccgtggacgccagcgcactagggttacatgactatcatgacattatcaagcatcccatggatcttagtactgtgaaaaggaaaatggagaaccgcgattacagagacgcacaggagtttgccgcagatgtcaggctgatgttctctaattgttacaagtacaacccccctgaccacgatgtcgtcgcaatggcccgaaagttgcaagacgtgttcgagtttcgctatgcaaagatgccggatgagccgctagagcccggtcctctgccagtctccaccgcaatgcccccaggcctggctaagagcagctccgagtctagttccgaggaatcttcatcagagtcctcttccgaagaggaggaggaggaggatgaagaggacgaggaggaagaggagtccgagtccagcgactccgaagaggaacgtgcacaccgtctggcggaactccaggaacaactgagggccgttcacgagcagctggcagcgttatctcagggacctatcagtaagcccaagaggaaacgggagaaaaaggaaaagaagaaaaagaggaaggcagaaaagcaccgagggagagctggcgcagatgaggacgataaaggaccaagggcccctcggcctcctcagcctaagaaatccaaaaaagcgtcgggctccggaggcggaagcgcagcgcttggcccaagtggattcggtcccagcggcggttccgggaccaagttacctaagaaagcaacaaagacagcacccccagctctgcctacggggtacgactcggaggaggaggaggaatccagacccatgagctatgacgagaagagacaactgagtctggatattaataagctgcccggagagaagctgggcagggtcgtgcacataatccaggcccgtgagccatcccttagagacagcaatccggaggaaatagagatagacttcgagactttaaaaccaagcaccctccgggagttagagagatacgtgctgagctgcctgagaaagaagccccgaaagccgtataccatcaagaaaccagtgggcaagaccaaagaagagctggccctggaaaaaaagagggagctggagaaacgccttcaggatgtgagcggacagctcaactctacgaagaagcctcctaaaaaagcgaatgaaaagactgaaagctcctcagcccaacaggttgctgtgtcacgcttgtctgcctcgtcctcctcttccgactccagctcaagtagctcttcctccagttcctccgatacttccgattccgactcaggatag

SEQ ID NO: 42525 - DNA, 2406 bp, Artificial Sequence
  derived and/or modified sequence
atgctgcaaaacgtgacgccccataataaactgcccggtgaggggaacgctggccttttagggcttgggccagaggccgcagctcccggtaagcgcataaggaagccctctcttctctatgaaggtttcgagtcacccaccatggcttcagtgcctgcgttgcagctgactcccgctaacccgccaccaccagaagtttccaatccaaagaagcctggccgagtcaccaatcagttgcagtatctccacaaggtggtgatgaaggccctctggaaacatcagtttgcctggccatttagacagcctgtcgatgccgtgaaattaggattgcccgactaccataagatcattaaacaacctatggacatgggaacaattaagcggaggctcgagaacaattactattgggccgcttccgagtgcatgcaggactttaatactatgtttaccaactgttatatttataacaagcccacagatgacattgtcttaatggctcagacattagagaaaatcttcctacagaaggtggcctccatgcctcaggaagaacaggagctggtcgtcactatcccaaaaaactctcacaagaagggcgctaaattggccgctttacaaggctcagtgactagtgcccatcaggtaccagccgtgtcctccgtcagccacacagctctgtataccccaccccctgagatcccgacaactgtgctgaatatcccccatccctctgtaatctcttctccgctgctgaagtctctgcattcagccggaccacctctcctggccgtgacggccgcaccccctgcacagccattagcgaagaagaagggcgtcaagagaaaagctgacacgactacacctacaccaaccgctattctggcaccaggaagtccagctagccctccaggatctctagagcccaaggccgcacggctgcctccaatgcggagggagagcggccgacctatcaaacctccacgcaaagacttaccggactctcagcagcagcatcaatcctcgaagaaaggcaagctgtccgaacaactcaagcactgtaacggtattctgaaagagctcctttctaaaaagcacgcagcctacgcctggcccttctataaaccagtcgatgcatctgcactcgggcttcacgattatcacgatattataaaacacccaatggatttgtccactgtaaaacgcaaaatggagaacagagactaccgggacgcgcaggagttcgcagccgacgttcgcctgatgttttccaactgttacaaatacaacccccctgatcacgacgtggtggctatggctaggaagttgcaagatgttttcgagttccggtatgccaaaatgccagacgaaccccttgagcctggcccactgccggtaagcaccgccatgccgcctggcctagccaagagcagcagtgagagttcttcggaggagtcatccagcgagtctagtagcgaggaggaggaagaggaagacgaggaggatgaggaggaagaggagtccgagtcctcggattcagaagaggagcgggctcaccggctggccgaacttcaagaacagctcagagctgttcatgaacaactcgccgcactgtctcaggggccaatctccaagcccaaaaggaagcgggagaagaaagagaaaaagaagaaacgcaaagccgagaagcatagaggacgcgcaggagcggacgaggatgataaggggccacgcgctccacgtcctccccagcctaaaaagtctaaaaaggcgtcaggaagcggcggtgggtctgcagccctggggccaagtggctttggtcccagtggagggtccggcacaaaacttcctaagaaggccacaaaaaccgctcctcccgcacttcccacagggtacgactccgaggaagaggaggaaagtcgtccaatgtcatatgatgagaagagacaactgtcgctggatattaataagttgccaggcgaaaaactggggagggtcgtgcacatcattcaggccagggagccgagtctgcgagactccaatccggaggagatcgaaattgactttgagaccttgaaaccgtctaccctgagggagcttgagaggtacgtcctgtcttgtttacgcaaaaagccgagaaagccatacaccatcaaaaaaccagtggggaaaactaaggaagaactagctctagagaagaagagagagctagaaaagcgcctacaagatgtgtccggacaacttaacagcactaaaaaacctccaaagaaagctaacgaaaagaccgagagctcaagtgctcaacaagtcgccgtaagtcggttatccgcctcgtcctcttcgtccgacagctccagctcttcgtctagttcatcctcaagcgataccagtgattcagattcggggtag

SEQ ID NO: 42526 - DNA, 891 bp, Artificial Sequence
  derived and/or modified sequence
tagcgacccctgggagtgcagcagcccggtgccagacttcccggagaagggaatgcagggctgcttggtcttgggcctgaagctgcagcacccggaaagcgcataagaaagccaagcctgctatacgagggctttgaaagccctactatggcaagtgtgcccgctcttcagttgaccccagcaaatccaccccctcccgaagtatctaaccccaagaagccagggagggtgaccaatcagttgcaatacttacataaagtagtgatgaaagcattatggaagcaccagtttgcgtggcccttccgccagcccgtcgatgcagtcaagctgggtttgcccgactaccataaaatcattaagcaacccatggacatgggtactatcaaacgaagactagagaacaactattactgggctgcaagcgagtgcatgcaagacttcaacacaatgttcaccaactgttacatttataataaacctaccgacgatatcgtgctgatggcacagaccctagagaagatttttctacagaaggtggcctcaatgcctcaggaggagcaggaattggtggttactatcccaaaaaatagccacaaaaagggagcaaaactagccgcactacagggtagcgttactagcgctcaccaagtgcccgctgtttcatctgtgtcacatacggcgttatatacccctccacctgagatccctactaccgtgctcaatatccctcacccatccgtgatctcctcccccctattgaagtccctgcactctgctggaccaccactgctagcggtgacagccgctcccccagcccagcccttggccaaaaaaaagggcgtgaagcgtaaagcagacacaacaaccccaacacccactgccatactttag

SEQ ID NO: 42527 - DNA, 2406 bp, Artificial Sequence
  derived and/or modified sequence
atgttgcagaacgtcacaccccacaacaaactgccgggagaagggaacgctggcctgctggggctgggcccagaggctgctgctcccggaaagagaattcgtaagcccagtctactgtacgaaggtttcgagtctccaaccatggcctccgtaccggcactgcaacttacaccagcaaaccctcctccccctgaagtctcaaaccctaagaagcctggtcgagtaactaaccagctccagtacctccacaaagtggtaatgaaagcgctgtggaagcaccagttcgcctggccttttcggcagccggttgacgctgttaagctggggctccccgattaccataagatcatcaaacagcccatggacatgggtacaatcaagaggagactggaaaataactattactgggccgcatctgaatgtatgcaggacttcaacacaatgtttacgaattgctacatttataacaaacccaccgacgacatagtcctgatggcgcagaccttagagaagattttcttacaaaaagttgccagcatgcctcaggaggaacaggaactcgtcgtgactatccctaaaaacagccataagaaaggagccaagttggccgcactccaggggagtgttacatctgcccaccaggtccctgccgtttcatctgtaagccacaccgccttgtacacccctccacccgagattcctaccactgtattcaacattcctcatccttcagtgatttcctctcccctcctgaagtcgctacacagtgctggacctccactgttggcggtcaccgcagccccaccggcacaaccgttggctaagaaaaaaggtgtaaagcgaaaggcagacacgacgacccccacccccactgccatcctggctcccggaagccccgctagtccgcctgggagtctcgagcccaaagctgctcgcttgccaccaatgcggagagaatccgggcgaccaatcaaaccacccagaaaggatcttcctgattctcaacaacagcaccaaagctcgaaaaagggcaagctgtctgagcagctgaagcactgcaatggcatattaaaagagctactgagcaagaagcacgcagcctatgcctggcctttttataaaccggttgacgcctccgccctcggtctgcacgattatcatgatatcattaagcaccctatggacctttctactgtgaaacgcaagatggagaatagagattatcgtgacgcacaggagtttgcagccgatgttcggctaatgtttagtaactgctataagtataaccctcccgaccacgacgttgtcgccatggccagaaagctacaagacgttttcgaatttcgatatgccaaaatgccagatgaacccctggaacccggtcccctgccagtgagcactgctatgcccccagggctcgccaagtcctcctctgagtcaagtagcgaggagtcttcgtcagagagtagctccgaggaagaagaggaggaggatgaggaggatgaagaggaggaggagagcgaaagctccgacagcgaggaggagcgggctcacagactagcggagttacaggaacagctaagggcagtgcacgagcagttggcagctttgagccaggggcctatcagcaagcccaagaggaagagagagaagaaggaaaagaaaaaaaaaaggaaggccgagaaacatcgcggacgtgccggtgccgatgaggacgacaaaggcccaagggcacccaggccgccacaacccaaaaaatcaaaaaaggccagcggttccgggggaggctcagcagctctgggaccatccggcttcggccctagcgggggtagtggaacgaaattaccaaagaaggccactaaaacagccccaccagccttgccgacaggctacgacagcgaggaagaggaagagtcacggccaatgagctacgacgaaaagcggcagctctccttggacatcaataagttacctggggaaaaactcggccgagtagtccacattatccaagcaagagagccatccctgagagactccaatcctgaggagattgagattgacttcgaaactttaaagccatccacgctcagggaactggaacggtacgtgctttcatgcctcaggaagaagccccgaaagccttataccatcaaaaagccagtgggcaaaaccaaggaagagctcgcactcgaaaaaaagcgggaactcgagaagaggctgcaggatgtgagtggccagctgaattcaacgaaaaagccccctaagaaggccaatgagaaaacagagagctcatctgcgcagcaggtggctgtatcgcggctctctgctagctccagcagttccgatagtagttcctctagttcctctagttctagcagcgacacgagcgatagtgattcaggttag

SEQ ID NO: 42528 - DNA, 1842 bp, Artificial Sequence
  derived and/or modified sequence
atgctgcagaacgtcaccccgcacaacaaattacccggagagggcaatgccggattactgggtctgggacccgaggccgctgcaccgggtaaaaggattagaaagccaagcctgctgtatgaggggttcgagtcacccactatggcttccgttcctgcattgcagctgaccccagcaaacccgccacctccggaggttagcaatccgaagaagccaggaagagtcaccaatcagttgcagtacctgcacaaggtcgtcatgaaggccctgtggaagcatcagttcgcatggcccttccggcaacctgtcgatgccgtgaagctcggcctgcccgactaccacaagataattaagcagccaatggacatgggcaccattaaacgtcggttggaaaataattattactgggcagccagcgagtgcatgcaggacttcaataccatgttcaccaactgttatatctataataaacctacagatgatattgtgttgatggcccaaacactggaaaagatcttcctgcaaaaggtagctagcatgcctcaggaagaacaggagctggtggttaccatccccaagaatagtcacaaaaagggagccaagctcgcagccttgcaggggtcagttacttcagcccatcaggtgcccgctgtttcctctgtaagccacacggccctatacaccccaccacccgagatccctaccaccgtcctgaatatacctcatccctctgtcatttcttctcccttattgaaatcactgcactcagctggacccccactcttggccgtaaccgccgcaccacccgctcagccactggcgaaaaaaaagggcgtgaagcggaaggctgatacaaccacccctaccccaaccgcgatactcgctcctgggtccccagcttctccacctggatctctggagccgaaagccgctcggctgccgcctatgagacgtgaaagtggccgtccaattaagccccctcggaaggaccttcccgattcccagcagcagcatcagtcctccaagaagggcaaactgagtgaacagttgaaacattgcaatgggattcttaaagaactactgtccaaaaaacatgcagcttacgcgtggccattctacaagcccgtggacgcttctgccctgggccttcatgactatcacgatatcataaagcatccgatggatctgtccactgtcaaacgcaagatggagaatcgggattacagggacgctcaggaatttgccgcagacgtcaggttgatgttctccaactgttacaagtacaatcctcctgatcatgacgtggtcgctatggcacgaaaacttcaagatgtgtttgagttccgatacgcaaaaatgccagacgagcccctggaacctggccctctacccgtttctacagctatgccacctggccttgcaaagagtagctccgaatcttcatccgaagaaagctcgtcggagtcctctagtgaagaagaggaggaggaagatgaggaggacgaagaagaagaggagtctgaaagctccgacagcgaagaggagcgcgctcaccgccttgcggagcttcaagagcagctgcgtgccgtgcatgagcagctggctgctctctctcagggcccaataagcaagccgaagaggaagcgggaaaagaaagagaaaaagaagaagcgcaaggccgagaaacaccgcggacgcgcaggcgctgacgaagatgataaaggtcctcgcgctcctcggcctccacagcccaagaaaagtaaaaaggcctcgggatcaggaggcggttcggcagcattgggtccttccggattcgggccatccggcggaagcggcacctag

SEQ ID NO: 42529 - DNA, 1842 bp, Artificial Sequence
  derived and/or modified sequence
atgctgcagaatgttaccccgcacaataagctgccaggcgaagggaacgctggcctactgggcctggggccagaagccgctgcacccggtaaaagaataagaaaaccatctctgctttatgaagggtttgaatctcccacaatggcttccgtgcctgcactacagttgactcccgctaatcccccaccaccagaggtctctaaccctaagaagcccggacgcgttacaaatcagctacagtatctgcacaaggtggttatgaaggctctgtggaaacatcagtttgcctggccttttcgtcagcctgtggacgccgttaaactcggtttgcctgattaccacaagattattaaacagcccatggacatggggacaataaagcggagacttgaaaacaactattactgggccgcaagtgagtgcatgcaagattttaataccatgtttaccaattgttatatttacaacaaaccaacagacgacatagtcctgatggctcaaacccttgagaaaatcttcctgcagaaggtagcaagcatgccccaagaagaacaggaactggtggtgacaattccaaaaaacagccacaaaaagggcgctaagttagctgccttgcaaggatccgtgacaagtgcccatcaggtgcccgcagtttcatcagtctcccacactgcactttacactccacctcccgagattcccaccacagtgctgaatatcccacatcccagcgtgatctcctccccattgcttaagtcacttcactctgcaggacctcccctgctggccgttactgccgctccccctgctcagccacttgcaaaaaagaagggcgtaaaacgaaaggccgacacaactaccccaacccctaccgccatccttgcacccggttcccctgcaagcccaccagggtcactcgagcccaaggccgcaagactaccccctatgcgcagggaaagcggtaggcctattaaacccccacggaaggacctgcctgattcccagcaacagcaccagtcaagtaagaagggaaaattgagtgaacagctgaagcattgtaatggcatcctgaaggaattgctctccaagaaacacgcggcatatgcatggccattttataaaccggtggatgcatccgccctgggcctccacgactatcatgacataatcaagcaccccatggatttgagcacggtcaagaggaagatggagaaccgtgattatcgggatgcccaggaatttgctgccgatgtgcggcttatgttttcgaactgctacaaatacaatccacctgatcacgatgtggtcgcaatggcacgcaagctgcaggacgtgttcgagtttcggtatgcaaaaatgccagacgagcctcttgaacctggccctctcccagtgtcaacagcaatgccccctggcctcgccaagagctcctcagaatctagctccgaggaatcatccagtgagagcagttctgaagaagaagaagaggaggatgaggaagacgaagaagaggaggagagcgagagctctgattctgaggaggaacgcgctcataggcttgctgaactccaggagcagttgcgggcagtacatgaacaactggccgcattgagccagggaccgatttccaagcccaaaagaaaacgcgaaaaaaaggagaagaagaagaagcgcaaagccgaaaagcaccgagggagagctggggcagatgaggacgacaaaggtcctagggcgcctcgtcctcctcagcccaagaaatcaaagaaggcttcagggtccggcggtggatcagcagctctcggcccaagtgggttcggccctagcgggggtagtggcacttag

SEQ ID NO: 42530 - DNA, 2424 bp, Artificial Sequence
  derived and/or modified sequence
taaaacggaggtgggggatcagccaccgcgaggggcggagagtacagactccccggtgaggggaatgctggcctgctgggcctcggtcccgaagccgctgcccctgggaaaaggatccgcaaaccttcgctgctttacgagggcttcgagtcaccaaccatggcctctgtgcccgcactgcagttgacaccagccaatccaccgccacctgaggtgtctaatcccaagaaacccggtcgtgtgacaaatcaacttcagtacttgcacaaagtcgtaatgaaggctctgtggaagcatcagtttgcctggccatttcggcagcccgtggatgcagtgaagctggggcttcctgattaccataaaattattaaacagccaatggatatgggtaccataaaaagacgcctggagaataattattactgggccgctagtgagtgcatgcaggactttaacaccatgttcaccaattgctatatatacaacaaacctacagacgatattgtactaatggcacagaccctcgagaaaatcttcctgcagaaagtggccagtatgccacaggaagaacaggagttagtcgttactattccaaaaaattcacacaaaaaaggagccaagctggccgcattgcagggctctgttactagcgcccatcaggtgcccgctgtatcttctgtcagtcatacagccctctacactccccctccggaaatcccaaccaccgtctttaacattccacatccgagcgtgataagcagccccttgctgaaatctctccactctgcgggacctcccttgttagctgttactgcggcaccccctgcccagcctctcgccaaaaagaaaggggttaaaagaaaggccgacaccaccactccgacacccactgctattctcgcccctggctcaccggcaagcccccctggaagtctagagccgaaggcagccagactgccccctatgaggagagaaagcggcagacccattaagcctccacggaaagacctgcctgacagccagcaacagcaccaatccagcaaaaaagggaagttatccgagcagctgaaacactgtaacgggatcctcaaagagctcctttctaaaaaacacgctgcgtatgcttggcctttctacaaaccagtggacgctagcgccctaggcctacacgattaccacgacattatcaagcaccctatggacctgtcaacagtgaaaagaaaaatggaaaaccgcgactacagggacgcccaggaatttgcggctgacgttcgtctcatgttcagcaattgttataagtacaatccccctgaccacgacgtggtggcaatggctcgcaaactgcaggacgtgttcgagttccgatacgctaagatgccagacgagcccctggagcctgggccattgcctgtgagcacagccatgccccctgggctcgcgaagtctagttccgagtcatcctctgaggagagcagcagcgagagctcatccgaggaagaggaagaggaggacgaggaggacgaggaggaagaggaatcagagagttcagactcggaagaggagcgagctcaccggctcgctgagttgcaggagcaactgagggccgtgcacgagcagctcgccgcactgagtcagggccctatttcgaagccaaagcgtaagagggagaaaaaggagaagaagaaaaaacggaaggccgagaaacaccgcggaagggctggcgctgacgaagacgataaaggcccaagagccccacgccctcctcagccaaagaaaagcaagaaggccagcggtagtggcggtggctcagccgctctggggccaagcgggtttggcccatccggagggtccgggactaaactccctaagaaggccactaagacagctccgccagcactgcctacaggatacgatagtgaggaggaggaagaatccaggccgatgagttacgatgagaagcgccaactgagcctcgatattaataagcttcccggagaaaagctggggcgagtggttcacatcatccaagccagagagccatctctgcgggactccaatcctgaggaaattgaaattgactttgagaccctcaagccaagcacactgagggaacttgagcggtatgtgctctcttgcctgagaaaaaagccacgcaagccctataccatcaaaaaaccagtcgggaagacgaaagaggaactggcgctagagaagaagcgcgaactcgaaaaacggctccaggatgtgtccggccagttgaatagcactaaaaaacctcctaagaaggccaacgaaaaaacagagagctccagtgcccagcaggtcgctgtcagcaggctgtctgcatccagcagttcttctgactcatcaagtagttccagttcttcatcgtcatccgacactagcgactcagatagtggatag

SEQ ID NO: 42531 - DNA, 891 bp, Artificial Sequence
  derived and/or modified sequence
tagcgccctttgggcgtccaacaacccggagcaaggctgcccggagaaggaaacgcaggcctcttggggctaggtcctgaggctgccgctccaggcaagcgcattcggaagccttccctgctctacgaagggttcgaaagccctactatggcctcagttcccgcactgcagctgacccccgcaaatccaccaccccctgaggtttctaatcccaaaaaaccaggcagagtcacgaaccagctccaatatttgcataaggtggtgatgaaggctctgtggaaacaccagttcgcatggcctttccggcagcccgttgacgctgtgaagctaggcttgcctgattaccataagatcataaaacagcctatggatatggggacaataaagagacggttagagaataactactactgggccgcaagtgaatgcatgcaggactttaacactatgttcacgaattgctacatttataacaaaccaaccgatgatatcgtactcatggcccagaccctagagaaaattttcctgcaaaaagtggccagcatgccgcaggaagaacaggagctcgtggtgactatccctaagaattcgcacaagaagggcgctaaactcgccgcactgcaagggagcgtgacctccgcgcaccaggtcccggctgtttcttcggtgagccacaccgccctgtacaccccaccaccagagatccctaccacagttttcaacatcccgcacccttctgtgatttcgagtcctttgttaaaaagcctgcacagcgcaggcccaccacttcttgccgtcacagccgcaccccctgctcagcccctcgcgaaaaaaaaaggcgttaagcggaaggcagataccaccactccaacacccaccgccatcctgtag

SEQ ID NO: 42532 - DNA, 2406 bp, Artificial Sequence
  derived and/or modified sequence
atgctgcagaacgtgacgcctcacaataagcttcccggtgagggtaacgctggactgttaggtttgggacccgaggctgctgcgcctggcaaacgcattagaaaaccctccctgctgtacgagggattcgaatcgcccaccatggccagtgtgcccgctctgcaactgacacctgccaaccccccacctccagaagtttccaatcctaagaaacccggacgggtgactaatcagctgcagtacctgcataaggtggtaatgaaggccctctggaagcaccagttcgcatggccattcagacagcctgtggacgctgtcaaattgggcctgcccgactaccacaaaataatcaaacagcctatggacatggggaccataaaaaggcgcctggaaaataattattattgggctgccagcgaatgtatgcaggacttcaacaccatgtttaccaactgctacatttataacaagcctacagatgacattgtcctgatggcgcagacgttagaaaagatttttctgcagaaggtcgcatccatgccccaggaggaacaagaattggtggttacaatcccgaaaaatagccacaagaagggggcaaaactggctgcactgcagggtagcgtcacgagtgctcatcaagtcccagccgtgtctagcgtgagccacaccgctctgtacacccctccacctgaaattccaactaccgtcctgaacattccacacccgagcgtcatctcttccccactcctcaaatccttacacagcgcgggtccaccactccttgctgtcacagcagctccaccagcccaaccactggccaaaaaaaaaggcgtgaaacgaaaggccgataccaccacaccaactccgactgctatcctggcaccgggaagtcctgctagccctcccggaagcctggagcccaaggcagcccgtctgcctccaatgagaagagagtccggccgaccaattaagcctcctcgaaaagatcttccagacagccaacagcaacaccagagtagtaagaaagggaaactgagcgagcagctgaagcattgcaacggaatactaaaggaactgttgtcgaagaagcacgccgcttatgcctggcctttctataagccggtagacgccagcgccctgggcctgcacgattaccacgatattataaaacaccccatggatctctccaccgtgaagcgtaaaatggagaatcgtgactaccgggacgctcaggaattcgccgcagatgtacggcttatgttctccaactgctataaatacaatccaccggatcacgacgtcgtggccatggccagaaagctgcaggacgtcttcgagtttcgctatgctaagatgccagacgagccgttggagcctggcccattgcctgtctcaacagccatgcctcccggactggctaagagttcctcggaatcatcgtctgaagagtcttcgtccgaaagcagctcagaggaagaagaggaagaggacgaagaagatgaggaagaagaagaatcggagagcagtgacagtgaggaggagcgggcacatcgcctggccgagctgcaagagcaactccgggctgtgcacgagcagctcgctgccctttcccaggggccaatctccaaacctaaaagaaagcgcgagaaaaaagaaaaaaaaaaaaagaggaaggctgagaaacaccggggacgggctggagctgatgaggatgacaaaggacctagggcacccagacctccacaacctaagaagagcaaaaaggccagtggctctggcggtggctctgccgcactaggtcctagcgggttcgggccaagcgggggttctggaactaagcttccgaaaaaggctaccaagaccgcaccacccgctttgccgaccgggtacgatagcgaagaagaagaagaaagccggcctatgtcttatgacgagaaaaggcagctgagcctagatataaataagctccccggtgaaaagctgggcagggtggtgcacatcatccaggctcgggagccctccctccgcgacagcaaccccgaggagattgagattgactttgagactctcaaaccaagcacgctgcgcgaactggaacggtacgttctgagttgcctgcggaagaaacctcgcaagccttataccatcaaaaaacctgtcggcaagacaaaggaagagctggccctagagaagaagcgtgagttggagaaaaggctccaggacgtgagcggtcagctcaactctaccaagaagcctcctaagaaagctaacgaaaaaaccgagagcagctctgcacagcaggtggcagtgagtaggctgtccgccagctcttcctctagcgatagctccagttcctcctcatcatcatcctcgtctgatacatctgattctgactccggctag

SEQ ID NO: 42533 - DNA, 2424 bp, Artificial Sequence
  derived and/or modified sequence
tgaaatggagggggtggctcggcaactgctcggggaggtgagtaccggctccctggtgaaggtaatgccggattgctgggactcggtccagaggccgcagctcccggaaaacgcatcaggaagccaagtctcctgtatgagggattcgaatccccaaccatggctagcgtgcctgcactccagctgaccccagccaaccccccaccacctgaagtctcaaaccctaagaagcccggaagggtgaccaatcagctccagtatttacataaggttgttatgaaagcactctggaagcatcagtttgcctggcctttcaggcagcccgtagacgcggtgaagctaggtctcccagattatcacaaaattattaaacagccaatggatatgggcaccatcaaacgtaggctagaaaacaactattactgggccgcttccgaatgtatgcaagactttaacactatgttcacaaattgctacatctacaataagcctactgacgacattgttttgatggcccagaccctcgagaaaatcttcctgcagaaggttgcttctatgccacaagaggagcaagagctcgtggtgactataccaaaaaatagtcataaaaaaggcgctaagcttgcagccctgcaggggtcagtgacttcagcccaccaggtgcccgctgtgtcctctgtcagtcacactgctctctacacccctcctccagaaatacccaccacagttttaaacataccacacccgtcagttatatctagtccgttgctgaaatccttacatagtgccggtcctcccttactagcagtgactgccgctccccctgcccagcctcttgcaaaaaaaaagggtgtgaagaggaaggcggatacaacaacccctacacccaccgcaattctcgcgccagggtcacctgcctctccgcctggttctcttgagcctaaggccgcacgccttccacccatgcgtcgcgaatccggcagaccaatcaagccccctaggaaggatctgcctgatagtcagcagcagcatcagagcagcaaaaaagggaaactgtcagagcaactgaagcactgtaacgggatactgaaggaattgctaagcaaaaaacacgccgcttacgcctggcctttttataagcctgttgatgcctctgccctcggcctccatgactaccacgacattattaaacatcctatggatcttagcacggtcaagcgtaagatggagaatcgggactatcgagacgctcaggaatttgctgctgacgtgagactgatgttcagtaactgctataagtataacccccctgaccacgatgtggtcgccatggcacgaaaattgcaggatgtctttgagtttagatatgctaaaatgcctgatgagcccctggaacctggccctttgccagtgtccaccgccatgcctccaggcctggccaagtcatcgtctgaaagcagttccgaagagagctctagcgagagctcctccgaagaggaagaagaagaagacgaggaggatgaagaagaagaggagtctgagtcctccgacagtgaggaggaacgcgcacaccgccttgccgaactgcaggagcagctcagggccgtgcacgagcaacttgcagcccttagccagggacctatcagtaaaccaaaacggaagagagaaaagaaagagaaaaagaaaaaacggaaggctgaaaaacatagggggagagccggagccgacgaagacgataaagggcctcgagccccacgaccacctcagccaaaaaaatctaagaaggccagcgggtcgggtggcggaagcgctgccctgggaccaagcgggttcgggccttcaggtgggtccggcacaaaactgccgaagaaggctaccaaaacagcaccacccgctctgccaactgggtacgatagtgaggaggaggaagagagtcgccctatgagctatgatgagaagcgacaactgtcattagacattaacaagttaccaggcgaaaagttaggaagagtcgtacacattatccaggcacgtgaacccagtttgagggattcgaaccctgaagagatcgagatcgactttgagaccctgaagccatccactttgagggagctcgaaagatacgttttatcttgtctgcgcaaaaagccgaggaagccatacacaataaagaagcccgtggggaagacaaaggaggagcttgccctcgagaagaagagagagctcgaaaagaggcttcaggacgtttctggccagctcaactctactaaaaagccgcctaaaaaagctaatgagaagactgaatcatcctccgctcagcaggtggctgtcagcagattaagtgctagttcctcttcgtcagacagctccagctcctcttctagttcatcatcctcagacacaagcgacagcgattcagggtag

SEQ ID NO: 42534 - DNA, 2424 bp, Artificial Sequence
  derived and/or modified sequence
taaaatggaggagggggaagcgccacggcccgaggcggagaatatcggctgccgggagaaggtaatgcgggacttctgggtctggggccagaagctgccgctcctgggaaacgaattagaaagccatccctcttatatgaaggttttgaaagtcccacaatggcctccgtgcctgccttgcagctcaccccagccaacccccctccccctgaggtctctaatcctaaaaagcctggcagggtcaccaatcagctgcagtacctgcataaggtggttatgaaagccctctggaagcaccagttcgcatggccatttagacaaccggtggatgcagtcaagcttggtctgcctgattaccataagataatcaagcaaccaatggatatgggtaccattaagagacggctggaaaacaattattattgggcggcatcagaatgcatgcaggattttaacaccatgtttacaaattgttacatttataacaagcccacagatgatatagttctcatggcacagaccctggagaaaattttcctgcaaaaggtggcgtccatgccccaggaggagcaggaactggtagtaacaatacccaagaatagccacaaaaagggggctaaacttgcggcactgcagggctctgtgacatccgctcatcaggtgccagccgtgagctctgtctcacacactgccttgtatactccaccccctgaaattccgacaactgtgctgaacatcccacatccctccgtgatctcatccccccttctgaaatccctgcattccgccggtcctccgctcctagccgtcaccgctgcccctcctgcgcagccactggccaagaaaaagggcgtgaaacgtaaggccgacacaacaacacctacccccacggcgattctggcgcctggatcaccagcttctcctccgggatccctggaaccaaaggccgctagattgccaccaatgcgaagggaaagcggcagacctatcaagccgccacgcaaagacctccccgacagtcagcaacagcaccagtcaagtaaaaaagggaagcttagtgaacagctgaaacactgtaatggcatactaaaagagttgctatccaagaaacacgcagcctacgcatggcctttttacaagcctgtggacgcaagtgctctcggtctacacgattaccacgacataatcaagcaccctatggatctgtcaaccgttaagcggaagatggagaatcgcgactatagggatgcacaagaattcgccgctgatgtaaggctgatgttctcaaattgctacaagtacaaccctcctgatcacgacgtagtcgccatggcccgtaagttacaggacgtattcgagtttcggtacgccaaaatgcctgacgagcctctggaaccagggcctctgccagtgtccacagcgatgccacctggtctggcaaagtccagctccgagagttcctcggaggagtcctcttctgaatcctcctccgaggaggaggaggaagaggacgaggaggacgaggaggaggaggagtcagagtcctccgactctgaagaagaaagagcacaccgcctggctgagttgcaggaacagctacgcgctgtgcatgagcagttagccgcacttagccagggacctatcagcaagcctaagcgcaagagggagaagaaggaaaaaaagaagaaacgaaaggctgaaaagcaccgtggacgagcaggggctgatgaggatgataaagggcctagagcaccccgtccaccacagcctaagaagagtaagaaggcgagtgggtctggaggcggatccgccgcactcggaccgtctgggtttggaccgagtgggggaagcggtacaaagttacctaagaaggccaccaaaaccgcccctcctgccctgcctacggggtatgatagcgaagaggaggaggagagtaggcctatgagctacgacgagaagcgacagctgtcccttgacatcaataagctcccgggtgaaaagctggggagagtggtgcacataattcaggctagagagccatcgcttagagacagcaatcccgaagagatcgagatcgatttcgaaacccttaaaccctcgacactacgagaactggagcggtacgttctgtcatgtcttcgcaagaaaccacggaagccatacaccatcaaaaaacctgtaggcaaaacaaaagaggagctggctcttgaaaagaagcgggaactggaaaagagactgcaggatgtttcgggccagttaaattccacaaagaaaccgccaaaaaaggccaacgaaaaaacagaatctagttcagcacagcaagtcgctgtctctcggttaagcgctagctcctcgtcctcagactcttccagcagcagcagctcgtccagttcctccgacactagcgatagcgattcaggttag

SEQ ID NO: 42535 - DNA, 2424 bp, Artificial Sequence
  derived and/or modified sequence
taaaacgggggaggtggaagcgctaccgcccgaggcggtgagtaccgattgcccggagagggcaatgcgggacttctgggcctcgggccagaagctgctgcccctggtaagagaattagaaagccatcccttctctatgagggtttcgaatcgcccaccatggcctcagtgcctgctcttcagcttacgcctgccaatccaccaccacctgaggtttcaaacccaaaaaagcctggcagagtgaccaaccagctgcaatatcttcacaaggttgttatgaaagcgctctggaaacaccaattcgcttggccttttcgccagcctgttgatgccgtcaagctcggtctgcctgattatcacaaaatcataaaacagccaatggatatgggaacaattaaacggagattggaaaacaactattactgggcagcctcggagtgcatgcaggatttcaatacgatgttcacaaattgttatatctataacaagcccacggacgacatagttttaatggcccagacacttgaaaagatctttctgcagaaagtggctagcatgccgcaggaggaacaggaactggtggtgacaatccccaaaaattcacacaagaaaggggctaaattggctgctctccagggatccgtaacctcagcccaccaagtgcctgccgtttcgagcgtatcccacaccgcactatataccccaccaccagagattccaacaacagtgctgaatatcccacacccgagcgtcataagctcgcccttgcttaaatctctacattccgctggaccaccactgctcgccgtcacagctgctccccctgcacagccactcgccaaaaaaaagggggtcaaacggaaggccgacacgaccaccccaaccccgactgccatacttgcacctggaagcccagcaagtccgcctggatctctggagccaaaggccgctcgcctacctccaatgcgaagagagagtgggcgacccataaaaccccctcggaaggatttacctgatagccagcaacagcatcaaagctctaagaaaggcaagctctctgaacagttgaagcactgtaatgggatactcaaggaactgctgtctaaaaagcacgccgcttatgcttggcccttctacaagcccgttgacgcctcagcgctgggacttcatgactaccatgacattattaagcatccaatggacctgtctaccgtgaagagaaaaatggagaacagagactatagggacgcacaggagtttgcggcagatgtgaggctgatgtttagcaactgttataaatacaacccgcctgatcacgacgtggtagccatggcacgcaaattgcaagatgtcttcgagtttcgctacgccaagatgcctgatgaaccacttgaaccaggacctcttccagtgagcaccgcgatgcctcccggactagcaaagtctagcagtgaatccagtagcgaggagtcaagctcagaatcctcctctgaggaggaagaggaagaagatgaggaggatgaggaggaggaggagtcagaaagcagtgatagtgaagaggagagagcacaccgcttggctgagctccaggagcaactgagagctgtgcacgagcaactggcagcactgagccagggaccaatttcgaagcccaagcggaagcgagaaaagaaagagaaaaagaagaagcggaaggctgagaagcatcgcggacgggctggtgccgacgaggacgacaagggccctcgggcacctaggcctcctcagcctaagaaatcaaagaaagcttctgggtctgggggaggatctgccgctctagggccatccgggttcggcccatccgggggtagcggaaccaagctccccaagaaagccaccaaaacagccccaccagctctgcccaccggctacgatagcgaagaggaggaggaaagccgacctatgagttatgacgagaagaggcagctcagcctggacattaacaagcttcctggagagaagttgggtagggttgttcacattattcaggctagagagccttccttgcgcgacagtaacccagaggaaatcgagattgattttgaaacactgaaaccctccactctgagggagctagagagatatgtgttgtcatgcttgcgcaagaagccgaggaaaccttacacaattaaaaagcctgtcggaaaaacaaaggaagaacttgcgctcgagaagaaaagagagctggaaaaaaggctgcaggacgtgtctggtcaattgaacagcacaaagaaaccacctaagaaagctaacgagaaaacggagtcttccagcgctcaacaggtcgctgtgagtcgcctcagtgcctcttcgtctagttcagacagcagctcgtctagcagctcatcttcttcttccgatacgagcgactccgactctggctag

SEQ ID NO: 42536 - DNA, 2406 bp, Artificial Sequence
  derived and/or modified sequence
atgttgcagaacgtcacccctcacaacaaactgcccggagaagggaacgcgggactgctcggactgggtcccgaggctgcagctcctgggaaacggattcgtaagccttcactgctgtatgaggggttcgagtctccgaccatggcatctgtgccagccctgcaactgacccccgcaaatcccccaccacccgaggtgtcgaacccgaaaaagcctggacgcgtaacgaatcagcttcaatacctgcataaggtggtgatgaaggcactgtggaagcaccagtttgcctggccgttccggcagccagtcgatgctgtaaagttagggctccctgactaccacaagataataaaacagcctatggacatgggcacgattaagagaagactcgaaaacaattattactgggccgcttccgagtgcatgcaggacttcaacactatgttcaccaactgttatatttataataaaccgactgatgacattgtgttgatggcccagaccctggagaagatctttctgcagaaagtcgcctcaatgcctcaggaagagcaggaactggtggtgactattcctaagaactcacacaaaaagggagctaaattggccgctctacagggctcagtgactagcgcccatcaggtgccagctgtgtcgtcagtgagccacaccgcactctacactccgcctcccgagattcctaccaccgtgtttaacattcctcacccttctgttatcagcagtcctttactcaagtctttgcacagcgcaggacccccactgctggctgtcacagcagctccccctgcacagccgctggctaagaagaagggcgtgaaacgcaaagctgacacaaccacgccaactccaactgcgatcctggctcctggatctcccgctagcccgcctggctcgctggaacccaaagcagccaggttgccaccaatgcgtcgcgagagtggtaggccaattaaaccccctagaaaggatcttccggactcccagcagcaacatcagtcctctaagaaaggtaaactgtctgagcagctgaagcattgcaatgggattctcaaggagctgctgtcaaaaaaacacgcagcgtacgcgtggcctttttacaagcccgtggatgcaagcgctctcggcttgcacgattaccatgacatcattaaacacccaatggatctatctacggtaaagcgtaagatggagaatagagactacagggacgcacaggagtttgccgctgacgtgcgcttgatgttcagtaattgttataaatacaacccgccagaccatgacgtcgttgctatggcccgtaagttgcaggacgtgttcgagtttcgatatgcgaagatgccagatgagccgctggaaccaggtcccctgcccgtatcaactgccatgccacccggactagccaaatcctcctcagaatcatccagcgaggagagttcatccgaatcctcatccgaggaggaagaggaagaagacgaagaagacgaggaagaagaggaaagcgagtcttctgactccgaggaagaaagggcccacagactggctgaactgcaagaacaactgcgcgctgttcacgaacagctcgctgccctgtcccagggacctatctctaaacctaagcgtaaaagggaaaagaaggagaagaagaaaaaacgaaaggcagaaaagcatagaggacgcgctggcgctgatgaggacgacaaagggccacgcgcaccgaggcctccccagcctaaaaaaagtaagaaagctagtggttcaggtgggggatctgcagcgttaggcccttccggctttgggccttcggggggtagtggtacaaaactgcctaaaaaggcaaccaagaccgctcccccagcactgcctacaggatatgacagtgaagaggaggaagagagccgccctatgagctatgatgagaaacggcaactcagtctagacattaacaagctgccaggggagaaacttgggagagtagtgcacatcatccaggccagagaaccttctctgagggactccaaccctgaagagatcgaaatcgatttcgaaaccctgaagcccagcactcttcgcgagcttgagaggtacgtgctgagctgcctccgcaaaaaacccaggaaaccctatactatcaaaaagcccgtgggaaagaccaaggaagagttggcacttgaaaaaaagagggaactcgagaaacgattacaggatgtgtctgggcagttaaactccacaaagaagccaccaaaaaaagcaaacgagaagaccgaatcttcttctgcacagcaggtagcagtctcccgcctaagcgcgtcctcttcctcgtctgacagttccagtagttccagcagttcttcatcaagcgacacatcggattctgattcaggatag

SEQ ID NO: 42537 - DNA, 891 bp, Artificial Sequence
  derived and/or modified sequence
tagcggcctcttggcgtgcagcagccaggcgcacggctcccgggagagggtaacgctggtttgctgggtctgggacccgaggcagccgctccaggcaaaagaatccgaaaaccgtcgcttctttacgagggatttgaatccccaacgatggcctctgtgccagctctgcagttgactcctgccaaccccccacctccggaggtgtctaaccccaagaaaccgggtcgtgtgacgaaccagcttcaatacctgcataaggtcgtgatgaaggccttgtggaagcatcagttcgcatggccttttcggcagcccgtagacgccgttaagctgggcttaccagactaccataagattattaaacagccaatggatatgggaaccattaagaggcggctggaaaataactactattgggccgctagcgagtgcatgcaggatttcaacacgatgtttacgaactgttatatctataataagcccacagatgatattgtcctcatggcgcagactctcgagaagatatttctacagaaggtggcgagcatgcctcaggaagaacaagaacttgtggtgacgatcccaaagaactctcataagaagggagccaaattggcagccctccagggcagtgtaacttccgctcaccaggtgcccgcagtctcatccgttagccatacggcgctttatactcctcccccagagattcccacgactgtgctgaacatcccgcatcccagcgtcatatctagccctcttcttaagtcactacacagcgccggtcctccactcctcgcggtcactgctgctccacccgctcaaccactggctaagaaaaaaggcgtgaagcggaaagctgacaccacaaccccgactccaacggccattctctag

SEQ ID NO: 42538 - DNA, 891 bp, Artificial Sequence
  derived and/or modified sequence
tgacgaccactcggagtgcaacaacctggggcacgcctgccaggcgaggggaacgccggtctgttaggtctgggccctgaggcggcagcccctggcaagagaattcgtaagccatctctgttgtacgaaggctttgagtctcctacaatggcaagtgtgccagccctccagttaactcccgcaaacccaccccctcctgaggtttctaacccaaagaagcccggtcgggtgaccaaccagttacagtacctgcacaaggtcgtaatgaaagcattatggaaacaccaattcgcttggcccttcaggcagccagtggacgccgtcaagctgggactccccgactatcataaaatcatcaaacaaccaatggatatggggactattaaacgtcgtctcgagaataattactattgggctgcatccgagtgtatgcaggattttaacactatgttcacgaactgctacatttataataaacccactgacgacatagtcttgatggcacagaccttagagaaaatcttcttgcaaaaggtcgcatcaatgcctcaggaggaacaggaactggtggttacaattccaaagaattctcacaagaaaggcgcaaagctggccgcactgcaaggctccgtcaccagcgcccatcaagtccccgcagtgagctcggtatcccatactgccctgtataccccgcctcccgagatccccacaacagtgctaaacatccctcacccatctgtcatcagctcgcctctgctcaagtctcttcacagcgctggcccacctttgctggctgtcacggctgcgcctccagcgcagccattagcaaaaaagaaaggagtgaaaaggaaagcagatacaactacacccacacccacagccattttatag

SEQ ID NO: 42539 - DNA, 891 bp, Artificial Sequence
  derived and/or modified sequence
tgaaggccgcttggggtccaacagcccggtgccagacttcctggggagggcaatgcgggactgctagggctgggcccagaagcagccgctccagggaagcgtatccggaagccctcactgctctacgagggttttgaaagccctactatggcaagcgtgcccgcacttcaactaacgccagcaaatcctccacctcctgaggtaagcaaccctaagaagcccggacgggtgacaaatcagttacagtacttacataaggttgttatgaaggcattatggaagcatcagtttgcttggccatttcggcagccagtcgacgctgtgaaactggggctacccgattatcacaagatcatcaagcagccaatggacatgggcaccatcaaacgcaggttggagaacaactactactgggcagcttccgagtgtatgcaggattttaacaccatgtttactaattgttacatctataacaagcctacggatgatatcgtactgatggcgcagactcttgaaaagatcttcttgcagaaggttgcgagcatgcctcaggaagagcaggaactggttgtgactattccgaagaacagtcataagaagggagctaagctggctgctcttcagggttccgtcacatctgcccaccaagtccccgctgtctcatctgtgtcccacacagcgctgtataccccacccccagagatccccacaactgtacttaacattccccatccttctgtgatatcgtctccactgctcaaatctttacatagtgcaggacctcccttgctcgccgtgacagcggcacccccagcccagccactggccaaaaagaagggcgtgaagcggaaggcagatacgactacgcccacaccgacggccattctctag

SEQ ID NO: 42540 - DNA, 1860 bp, Artificial Sequence
  derived and/or modified sequence
tagaacgggggtggcggaagtgcaacggctcgcggaggtgagtacagacttcccggtgaagggaatgctggtttgctagggctgggcccagaggcagccgctccgggtaagcggattagaaaaccctccttattgtacgagggtttcgaaagcccaacaatggcaagtgtgcccgcactgcagctcacacccgctaatccaccccctccagaggtcagcaatcccaagaaaccgggacgcgttaccaaccagctgcagtaccttcataaggtggtgatgaaggctctgtggaagcatcagttcgcttggccatttaggcagcctgtggatgccgtgaaattgggactcccagactatcacaagattataaaacaacccatggatatgggtactatcaagcggcgattagaaaacaattactactgggcggcttccgagtgcatgcaagattttaacaccatgttcaccaactgttacatctataacaagccaacagatgacatcgtcctgatggcacagacccttgaaaagatctttctgcagaaagtcgctagcatgccacaggaggaacaggaactcgtggttaccatccccaagaacagccacaaaaagggcgcaaaattggctgcactgcaggggtcagtcacatccgcacaccaggtcccagctgtctcctcagtgtcccatactgctttgtacacccctcctcctgagattccaacgaccgtcctcaacataccccatccatcagtgatcagtagtccactcttgaagtctttgcattctgctggtccacccctgttggcggttacggccgcaccccctgcccagcctctcgccaagaagaagggcgtgaaaagaaaagcagatacgaccacgcctaccccaaccgcgattctggctccaggtagtcccgcatcaccacccggtagcctggaaccaaaggcggctcgactccccccaatgcggagagaatcaggcaggccgataaaaccacccaggaaggacctgcccgacagccaacagcagcatcagtcttctaaaaagggcaagctctcagaacagcttaagcattgtaatggaatattaaaggagctgctgtccaagaaacatgccgcttacgcctggcctttttacaaacccgtcgatgccagcgccctgggtctgcacgactatcacgatatcataaagcatccaatggatctgtccaccgtgaaaaggaaaatggagaatcgggactaccgggatgcacaagagtttgctgcagatgtcagactaatgttcagtaattgttacaaatacaatccgcctgatcatgatgttgtcgccatggccaggaaactccaggatgttttcgaatttcgctatgccaagatgccagatgagccactcgagccagggccactgcccgtgtcaacagccatgcccccaggcctcgccaaaagcagttccgagtcgtcatcagaggagagcagttctgaatcctcatccgaagaggaggaagaagaggatgaagaagatgaagaagaggaagaatctgagtctagtgactccgaagaggagagggcccatcggttggcggagcttcaagagcagctacgagcggttcacgaacaacttgccgcactgtcccagggtccaatcagcaaaccaaaacgcaagcgagagaaaaaggaaaaaaaaaagaaacggaaggctgagaaacaccgcggacgcgctggcgctgacgaggacgataaaggacctcgggctcccagaccgcctcaacctaagaagtccaagaaagccagcggatcagggggaggctccgctgctctagggcctagtggattcgggcctagtgggggatccggtacttag

SEQ ID NO: 42541 - DNA, 2406 bp, Artificial Sequence
  derived and/or modified sequence
atgttgcaaaatgtcacaccccacaataaactgcctggtgagggcaatgcaggcctcctgggcctggggcctgaggctgccgctcctggtaaaaggatcagaaaaccctccctgctctacgaaggtttcgaaagcccaactatggcctctgtccccgctctacagctcactcccgctaacccacctccaccagaggtctcaaatccaaagaaacctgggcgtgtcacgaaccaacttcaatatctacacaaggtggtcatgaaagccctgtggaagcaccagttcgcctggcccttccgacaacctgtggacgcagtcaaattaggactgcccgattaccacaagatcatcaaacagccaatggatatgggcactatcaagagacgactggagaacaattactattgggcagccagcgaatgtatgcaggattttaacacaatgtttaccaactgctacatctacaacaaacccaccgacgatatcgtcctgatggctcagactctcgagaaaatctttctgcagaaggtggccagcatgcctcaagaggaacaggaacttgtcgtgacgatcccaaaaaatagtcacaagaaaggagcaaaactggccgctttgcagggaagcgtcacatctgcccaccaggtgccagcagtgtcatcggtatctcacacagctttgtacacgccacccccagaaatccctaccaccgttctgaatatcccacaccccagtgtcatctctagtccactccttaagtctcttcattccgccggtccaccacttctggctgtgactgccgctccccctgcacagcccttagccaaaaagaagggtgtgaagcggaaggccgataccacaacacccactcctacagcaatcctcgcccctggcagcccagcgtccccccctggcagcctcgagcccaaggccgctcggctacctcctatgaggcgggaatctggaagaccgatcaaaccgcctcggaaggacctgccagacagccagcagcagcatcagagctccaagaaaggaaaactgtcagagcagttgaaacattgcaatggaatcctcaaagagctcctcagtaaaaaacatgccgcttacgcttggcccttctataaacccgtagacgcttcagcactgggcttgcacgactaccatgacatcatcaagcacccaatggatctctccaccgtaaaacgcaagatggagaatcgggattaccgcgacgcacaggagtttgctgccgacgtcaggcttatgttctcgaattgctataagtacaatcctccagatcatgacgtggtggcaatggccaggaagctgcaagatgtgttcgagttcagatacgctaagatgcctgatgagccactggaacctgggccactgccagtgtctaccgccatgccccctggactcgccaagagttcctccgagtcaagttccgaagaatctagcagcgaaagcagttccgaggaggaggaggaggaagacgaggaagatgaggaagaggaggaatccgaatcctccgatagtgaggaggaacgtgcccaccgattggccgaattgcaggagcagctgcgggcagtgcacgaacagcttgcagccctctctcagggcccaataagtaagcctaagcgaaagcgggagaagaaggagaaaaagaagaagcgcaaagctgaaaagcaccggggacgcgctggcgctgatgaggatgacaaggggccaagggcacctaggcccccacaaccaaagaaatcaaaaaaggccagcggctccggcggaggtagcgccgctctcgggccaagcggattcggaccaagcgggggatctgggaccaagctccctaagaaagccaccaaaacagcccctcctgcgcttcccaccggctacgactccgaagaagaagaggagagcagacccatgagttacgacgagaagagacaattaagcctagacatcaataagcttcccggagaaaaactgggtagggtcgtgcacataatccaagcaagggaacccagcttacgagatagcaaccctgaggagattgagatcgattttgagacattgaaaccgtccactctccgggagttggagcgctatgtcctgtcctgcctgcggaaaaagccacgaaagccatacaccatcaaaaagcccgttggaaagacaaaggaggagctcgccttagaaaagaagcgagagttggagaaaagactacaggatgtcagcgggcagctcaattctaccaaaaaaccgccaaaaaaagcgaacgaaaagactgaaagctcatctgctcagcaagtggctgttagtaggctgtcagcttcaagtagctcatctgactctagttcctccagctcctcaagcagcagctccgataccagcgacagcgattctggttag

SEQ ID NO: 42542 - DNA, 4894 bp, Artificial Sequence
  derived and/or modified sequence
ggactgcgggataggaagctggggatatggacaagcagcagcgttatagcgctctgggtttcgggacataggcctgggccatgcggcccccttggccccttggcgcgacccccaggaacgttcggaaagctggtcctcgtggctgggggaaaggcggggggtgggggggaagcgggcacgtgaccccggtcagccaatctgggtgctgctgacgtggccgcgcggccccgatgctctccccacccccccagcccgttcgggaagggaggggctgggggctacgccccctcccccagcacggcttcgttttctgggggggggttgacaccccggattacataccccgtaccaagccgagggcaactttggaggccccctggaaggctttaggatccagattcttcgctgctgctgccttaccgccgagaaccaccacccgccaggcgtcttgcggccacacccctggcgggttcaggcaggctacgcccacgcgacccctcccgtttccctgctttggccaatggaggagctacgaatggcacgacctgctcgagcttggcagtctccagttgggctgtgcatggaagcttgggaagactttgttggaaggggaggcggggagagagtgctggaggctctggggcgatggcttccgcacctcttccaaccaccctctttccctggagtcggcggaccacagctcagccaattggcttggagatgtggcgggttgccacttccctgtgggtctctgcggcactcttctgcctggtgactgacaccttggaaatgaagtttatgacgtcatcgttgcggctggccaatagaaaaagctcccgcggagaggtgttccttccccttcgactcagcttcttcacccgcgtgagcgagcgcgcgcgcgcggagggggtggggaaaagctcaagcagggtggcgcgcatgagcggcgaagctcctcctccccgcctatatataaagggctggcgcggggctcggcggcgccatttcgtgctggagtggagcagcctctagaacgagctggaggattctgcctaccgatacagagccttcgagtcgtccggggccgccattacaatccacctccatccgcttggaaatggccttcgtcccggcctatgactggtcccagcgggcagtacagaccccctagaagcccctggagctcccctttttcgggccccgcccaatcctcggagtctgtccaccccctctactccgccctcaagaggatttcaaagatggaggcggcggctccctaaaccacttttcgtgttcatccgcctccatccgagatcgaaacgggacctcgtcggccccgtaggggcccgacaagaagagggaatccctgcagaccaacagcgggctatattgacgacggtgtctgagatcggggaccgtcttttgaagagtcagtccctccttagttgcccgcctcagctgaggccgccgccattttcttgctgtccgccgtctgcagagcgcgccaagctgcccggagctctccgagaggccccaaagagactgctttcgtgccggccaggcagggggtttgtcgcctggaggcccaagaggaacggcctccccccaacttagcgggttatgctggaccgggcggtgaggggaaccgaggccacccggactttccgcggctgagggcagcgccggttccttgcggtcaagatgctgcaaaacgtgactccccacaataagctccctggggaagggaatgcagggttgctggggctgggcccagaagcagcagcaccagggaagaggattcgaaaaccctctctcttgtatgagggctttgagagccccacaatggcttcggtgcctgctttgcaacttacccctgccaacccaccacccccggaggtgtccaatcccaaaaagccaggacgagttaccaaccagctgcaatacctacacaaggtagtgatgaaggctctgtggaaacatcagttcgcatggccattccggcagcctgtggatgctgtcaaactgggtctaccggattatcacaaaattataaaacagcctatggacatgggtactattaagaggagacttgaaaacaattattattgggctgcttcagagtgtatgcaagattttaataccatgttcaccaactgttacatttacaacaagcccactgatgatattgtcctaatggcacaaacgctggaaaagatattcctacagaaggttgcatcaatgccacaagaagaacaagagctggtagtgaccatccctaagaacagccacaagaagggggccaagttggcagcgctccagggcagtgttaccagtgcccatcaggtgcctgccgtctcttctgtgtcacacacagccctgtatactcctccacctgagatacctaccactgtcctcaacattccccacccatcagtcatttcctctccacttctcaagtccttgcactctgctggacccccgctccttgctgttactgcagctcctccagcccagccccttgccaagaaaaaaggcgtaaagcggaaagcagatactaccacccctacacctacagccatcttggctcctggttctccagctagccctcctgggagtcttgagcctaaggcagcacggcttccccctatgcgtagagagagtggtcgccccatcaagcccccacgcaaagacttgcctgactctcagcaacaacaccagagctctaagaaaggaaagctttcagaacagttaaaacattgcaatggcattttgaaggagttactctctaagaagcatgctgcctatgcttggcctttctataaaccagtggatgcttctgcacttggcctgcatgactaccatgacatcattaagcaccccatggacctcagcactgtcaagcggaagatggagaaccgtgattaccgggatgcacaggagtttgctgctgatgtacggcttatgttctccaactgctataagtacaatcccccagatcacgatgttgtggcaatggcacgaaagctacaggatgtatttgagttccgttatgccaagatgccagatgaaccactagaaccagggcctttaccagtctctactgccatgccccctggcttggccaaatcgtcttcagagtcctccagtgaggaaagtagcagtgagagctcctctgaggaagaggaggaggaagatgaggaggacgaggaggaagaagagagtgaaagctcagactcagaggaagaaagggctcatcgcttagcagaactacaggaacagcttcgggcagtacatgaacaactggctgctctgtcccagggtccaatatccaagcccaagaggaaaagagagaaaaaagagaaaaagaagaaacggaaggcagagaagcatcgaggccgagctggggccgatgaagatgacaaggggcctagggcaccccgcccacctcaacctaagaagtccaagaaagcaagtggcagtgggggtggcagtgctgctttaggcccttctggctttggaccttctggaggaagtggcaccaagctccccaaaaaggccacaaagacagccccacctgccctgcctacaggttatgattcagaggaggaggaagagagcaggcccatgagttacgatgagaagcggcagctgagcctggacatcaacaaattacctggggagaagctgggccgagttgtgcatataatccaagccagggagccctctttacgtgattcaaacccagaagagattgagattgattttgaaacactcaagccatccacacttagagagcttgagcgctatgtcctttcctgcctacgtaagaaaccccggaagccctacaccattaagaagcctgtgggaaagacaaaggaggaactggctttggagaaaaagcgggaattagaaaagcggttacaagatgtcagcggacagctcaattctactaaaaagccccccaagaaagcgaatgagaaaacagagtcatcctctgcacagcaagtagcagtgtcacgccttagcgcttccagctccagctcagattccagctcctcctcttcctcgtcgtcgtcttcagacaccagtgattcagactcaggctaaggggtcaggccagatggggcaggaaggctccgcaggaccggacccctagaccaccctgccccacctgccccttccccctttgctgtgacacttcttcatctcacccccccccgcccccctctaggagagctggctctgcagtgggggagggatgcagggacatttactgaaggagggacatggacaaaacaacattgaattcccagccccattggggagtgatctcttggacacagagcccccattcaaaatggggcagggcaagggtgggagtgtgcaaagccctgatctggagttacctgaggccacagctgccctattcacttctaagggccctgttttgagattgtttgttctaatttattttaagctaggtaaggctggggggagggtggggccgtggtcccctcagcctccatggggagggaagaagggggagctctttttttacgttgatttttttttttctactctgttttccctttttccttccgctccatttggggccctgggggtttcagtcatctccccatttggtcccctggactgtctttgttgattctaacttgtaaataaagaaaatattattcaagttttgagttaccttaatatttgcttttgtagtgtttcaaaaggaacatcataagaattgtcttgataattttgagggaaatattactgcagtgagaaaaggcaatagctaacctataattggattgtcttaatttttaaaccagtaggcttttgctgtgtttttaataaagtaaatatgacttttgtaaattga

SEQ ID NO: 42543 - DNA, 4807 bp, Artificial Sequence
  derived and/or modified sequence
ggagggggagggctagtctgagccgcagccgccgcctcctccgctcgccctcctccctggcgctgaccgatggaccagccgctccgtggggaggactccggaccctggtgggggggcgggggggttctttcgcccccgtggcggagggcccctgagaggcggatacgggtgtgcctttgggggtgatgtggcgtgtggggggaaaggtccgagctcgcctggagggggagggtttttcccttaagtcatccctcccaggacttgctttttctgctctgagccggacgccggaatggagtttgaggaagagattcttcgctgctgctgccttaccgccgagaaccaccacccgccaggcgtcttgcggccacacccctggcgggttcaggcaggctacgcccacgcgacccctcccgtttccctgctttggccaatggaggagctacgaatggcacgacctgctcgagcttggcagtctccagttgggctgtgcatggaagcttgggaagactttgttggaaggggaggcggggagagagtgctggaggctctggggcgatggcttccgcacctcttccaaccaccctctttccctggagtcggcggaccacagctcagccaattggcttggagatgtggcgggttgccacttccctgtgggtctctgcggcactcttctgcctggtgactgacaccttggaaatgaagtttatgacgtcatcgttgcggctggccaatagaaaaagctcccgcggagaggtgttccttccccttcgactcagcttcttcacccgcgtgagcgagcgcgcgcgcgcggagggggtggggaaaagctcaagcagggtggcgcgcatgagcggcgaagctcctcctccccgcctatatataaagggctggcgcggggctcggcggcgccatttcgtgctggagtggagcagcctctagaacgagctggaggattctgcctaccgatacagagccttcgagtcgtccggggccgccattacaatccacctccatccgcttggaaatggccttcgtcccggcctatgactggtcccagcgggcagtacagaccccctagaagcccctggagctcccctttttcgggccccgcccaatcctcggagtctgtccaccccctctactccgccctcaagaggatttcaaagatggaggcggcggctccctaaaccacttttcgtgttcatccgcctccatccgagatcgaaacgggacctcgtcggccccgtaggggcccgacaagaagagggaatccctgcagaccaacagcgggctatattgacgacggtgtctgagatcggggaccgtcttttgaagagtcagtccctccttagttgcccgcctcagctgaggccgccgccattttcttgctgtccgccgtctgcagagcgcgccaagctgcccggagctctccgagaggccccaaagagactgctttcgtgccggccaggcagggggtttgtcgcctggaggcccaagaggaacggcctccccccaacttagcgggttatgctggaccgggcggtgaggggaaccgaggccacccggactttccgcggctgagggcagcgccggttccttgcggtcaagatgctgcaaaacgtgactccccacaataagctccctggggaagggaatgcagggttgctggggctgggcccagaagcagcagcaccagggaagaggattcgaaaaccctctctcttgtatgagggctttgagagccccacaatggcttcggtgcctgctttgcaacttacccctgccaacccaccacccccggaggtgtccaatcccaaaaagccaggacgagttaccaaccagctgcaatacctacacaaggtagtgatgaaggctctgtggaaacatcagttcgcatggccattccggcagcctgtggatgctgtcaaactgggtctaccggattatcacaaaattataaaacagcctatggacatgggtactattaagaggagacttgaaaacaattattattgggctgcttcagagtgtatgcaagattttaataccatgttcaccaactgttacatttacaacaagcccactgatgatattgtcctaatggcacaaacgctggaaaagatattcctacagaaggttgcatcaatgccacaagaagaacaagagctggtagtgaccatccctaagaacagccacaagaagggggccaagttggcagcgctccagggcagtgttaccagtgcccatcaggtgcctgccgtctcttctgtgtcacacacagccctgtatactcctccacctgagatacctaccactgtcctcaacattccccacccatcagtcatttcctctccacttctcaagtccttgcactctgctggacccccgctccttgctgttactgcagctcctccagcccagccccttgccaagaaaaaaggcgtaaagcggaaagcagatactaccacccctacacctacagccatcttggctcctggttctccagctagccctcctgggagtcttgagcctaaggcagcacggcttccccctatgcgtagagagagtggtcgccccatcaagcccccacgcaaagacttgcctgactctcagcaacaacaccagagctctaagaaaggaaagctttcagaacagttaaaacattgcaatggcattttgaaggagttactctctaagaagcatgctgcctatgcttggcctttctataaaccagtggatgcttctgcacttggcctgcatgactaccatgacatcattaagcaccccatggacctcagcactgtcaagcggaagatggagaaccgtgattaccgggatgcacaggagtttgctgctgatgtacggcttatgttctccaactgctataagtacaatcccccagatcacgatgttgtggcaatggcacgaaagctacaggatgtatttgagttccgttatgccaagatgccagatgaaccactagaaccagggcctttaccagtctctactgccatgccccctggcttggccaaatcgtcttcagagtcctccagtgaggaaagtagcagtgagagctcctctgaggaagaggaggaggaagatgaggaggacgaggaggaagaagagagtgaaagctcagactcagaggaagaaagggctcatcgcttagcagaactacaggaacagcttcgggcagtacatgaacaactggctgctctgtcccagggtccaatatccaagcccaagaggaaaagagagaaaaaagagaaaaagaagaaacggaaggcagagaagcatcgaggccgagctggggccgatgaagatgacaaggggcctagggcaccccgcccacctcaacctaagaagtccaagaaagcaagtggcagtgggggtggcagtgctgctttaggcccttctggctttggaccttctggaggaagtggcaccaagctccccaaaaaggccacaaagacagccccacctgccctgcctacaggttatgattcagaggaggaggaagagagcaggcccatgagttacgatgagaagcggcagctgagcctggacatcaacaaattacctggggagaagctgggccgagttgtgcatataatccaagccagggagccctctttacgtgattcaaacccagaagagattgagattgattttgaaacactcaagccatccacacttagagagcttgagcgctatgtcctttcctgcctacgtaagaaaccccggaagccctacaccattaagaagcctgtgggaaagacaaaggaggaactggctttggagaaaaagcgggaattagaaaagcggttacaagatgtcagcggacagctcaattctactaaaaagccccccaagaaagcgaatgagaaaacagagtcatcctctgcacagcaagtagcagtgtcacgccttagcgcttccagctccagctcagattccagctcctcctcttcctcgtcgtcgtcttcagacaccagtgattcagactcaggctaaggggtcaggccagatggggcaggaaggctccgcaggaccggacccctagaccaccctgccccacctgccccttccccctttgctgtgacacttcttcatctcacccccccccgcccccctctaggagagctggctctgcagtgggggagggatgcagggacatttactgaaggagggacatggacaaaacaacattgaattcccagccccattggggagtgatctcttggacacagagcccccattcaaaatggggcagggcaagggtgggagtgtgcaaagccctgatctggagttacctgaggccacagctgccctattcacttctaagggccctgttttgagattgtttgttctaatttattttaagctaggtaaggctggggggagggtggggccgtggtcccctcagcctccatggggagggaagaagggggagctctttttttacgttgatttttttttttctactctgttttccctttttccttccgctccatttggggccctgggggtttcagtcatctccccatttggtcccctggactgtctttgttgattctaacttgtaaataaagaaaatattattcaagttttgagttaccttaatatttgcttttgtagtgtttcaaaaggaacatcataagaattgtcttgataattttgagggaaatattactgcagtgagaaaaggcaatagctaacctataattggattgtcttaatttttaaaccagtaggcttttgctgtgtttttaataaagtaaatatgacttttgtaaattga

SEQ ID NO: 42544 - DNA, 4807 bp, Artificial Sequence
  derived and/or modified sequence
ggagggggagggctagtctgagccgcagccgccgcctcctccgctcgccctcctccctggcgctgaccgatggaccagccgctccgtggggaggactccggaccctggtgggggggcgggggggttctttcgcccccgtggcggagggcccctgagaggcggatacgggtgtgcctttgggggtgatgtggcgtgtggggggaaaggtccgagctcgcctggagggggagggtttttcccttaagtcatccctcccaggacttgctttttctgctctgagccggacgccggaatggagtttgaggaagagattcttcgctgctgctgccttaccgccgagaaccaccacccgccaggcgtcttgcggccacacccctggcgggttcaggcaggctacgcccacgcgacccctcccgtttccctgctttggccaatggaggagctacgaatggcacgacctgctcgagcttggcagtctccagttgggctgtgcatggaagcttgggaagactttgttggaaggggaggcggggagagagtgctggaggctctggggcgatggcttccgcacctcttccaaccaccctctttccctggagtcggcggaccacagctcagccaattggcttggagatgtggcgggttgccacttccctgtgggtctctgcggcactcttctgcctggtgactgacaccttggaaatgaagtttatgacgtcatcgttgcggctggccaatagaaaaagctcccgcggagaggtgttccttccccttcgactcagcttcttcacccgcgtgagcgagcgcgcgcgcgcggagggggtggggaaaatctcaagcagggtggcgcgcatgagcggcgaagctcctcctccccgcctatatataaagggctggcgcggggctcggcggcgccatttcgtgctggagtggagcagcctctagaacgagctggaggattctgcctaccgatacagagccttcgagtcgtccggggccgccattacaatccacctccatccgcttggaaatggccttcgtcccggcctatgactggtcccagcgggcagtacagaccccctagaagcccctggagctcccctttttcgggccccgcccaatcctcggagtctgtccaccccctctactccgccctcaagaggatttcaaagatggaggcggcggctccctaaaccacttttcgtgttcatccgcctccatccgagatcgaaacgggacctcgtcggccccgtaggggcccgacaagaagagggaatccctgcagaccaacagcgggctatattgacgacggtgtctgagatcggggaccgtcttttgaagagtcagtccctccttagttgcccgcctcagctgaggccgccgccattttcttgctgtccgccgtctgcagagcgcgccaagctgcccggagctctccgagaggccccaaagagactgctttcgtgccggccaggcagggggtttgtcgcctggaggcccaagaggaacggcctccccccaacttagcgggttatgctggaccgggcggtgaggggaaccgaggccacccggactttccgcggctgagggcagcgccggttccttgcggtcaagatgctgcaaaacgtgactccccacaataagctccctggggaagggaatgcagggttgctggggctgggcccagaagcagcagcaccagggaagaggattcgaaaaccctctctcttgtatgagggctttgagagccccacaatggcttcggtgcctgctttgcaacttacccctgccaacccaccacccccggaggtgtccaatcccaaaaagccaggacgagttaccaaccagctgcaatacctacacaaggtagtgatgaaggctctgtggaaacatcagttcgcatggccattccggcagcctgtggatgctgtcaaactgggtctaccggattatcacaaaattataaaacagcctatggacatgggtactattaagaggagacttgaaaacaattattattgggctgcttcagagtgtatgcaagattttaataccatgttcaccaactgttacatttacaacaagcccactgatgatattgtcctaatggcacaaacgctggaaaagatattcctacagaaggttgcatcaatgccacaagaagaacaagagctggtagtgaccatccctaagaacagccacaagaagggggccaagttggcagcgctccagggcagtgttaccagtgcccatcaggtgcctgccgtctcttctgtgtcacacacagccctctatactcctccacctgagatacctaccactgtcctcaacattccccacccatcagtcatttcctctccacttctcaagtccttgcactctgctggacccccgctccttgctgttactgcagctcctccagcccagccccttgccaagaaaaaaggcgtaaagcggaaagcagatactaccacccctacacctacagccatcttggctcctggttctccagctagccctcctgggagtcttgagcctaaggcagcacggcttccccctatgcgtagagagagtggtcgccccatcaagcccccacgcaaagacttgcctgactctcagcaacaacaccagagctctaagaaaggaaagctttcagaacagttaaaacattgcaatggcattttgaaggagttactctctaagaagcatgctgcctatgcttggcctttctataaaccagtggatgcttctgcacttggcctgcatgactaccatgacatcattaagcaccccatggacctcagcactgtcaagcggaagatggagaaccgtgattaccgggatgcacaggagtttgctgctgatgtacggcttatgttctccaactgctataagtacaatcccccagatcacgatgttgtggcaatggcacgaaagctacaggatgtatttgagttccgttatgccaagatgccagatgaaccactagaaccagggcctttaccagtctctactgccatgccccctggcttggccaaatcgtcttcagagtcctccagtgaggaaagtagcagtgagagctcctctgaggaagaggaggaggaagatgaggaggacgaggaggaagaagagagtgaaagctcagactcagaggaagaaagggctcatcgcttagcagaactacaggaacagcttcgggcagtacatgaacaactggctgctctgtcccagggtccaatatccaagcccaagaggaaaagagagaaaaaagagaaaaagaagaaacggaaggcagagaagcatcgaggccgagctggggccgatgaagatgacaaggggcctagggcaccccgcccacctcaacctaagaagtccaagaaagcaagtggcagtgggggtggcagtgctgctttaggcccttctggctttggaccttctggaggaagtggcaccaagctccccaaaaaggccacaaagacagccccacctgccctgcctacaggttatgattcagaggaggaggaagagagcaggcccatgagttacgatgagaagcggcagctgagcctggacatcaacaaattacctggggagaagctgggccgagttgtgcatataatccaagccagggagccctctttacgtgattcaaacccagaagagattgagattgattttgaaacactcaagccatccacacttagagagcttgagcgctatgtcctttcctgcctacgtaagaaaccccggaagccctacaccattaagaagcctgtgggaaagacaaaggaggaactggctttggagaaaaagcgggaattagaaaagcggttacaagatgtcagcggacagctcaattctactaaaaagccccccaagaaagcgaatgagaaaacagagtcatcctctgcacagcaagtagcagtgtcacgccttagcgcttccagctctagctcagattccagctcctcctcttcctcgtcgtcgtcttcagacaccagtgattcagactcaggctaaggggtcaggccagatggggcaggaaggctccgcaggaccggacccctagaccaccctgccccacctgccccttccccctttgctgtgacacttcttcatctcacccccccctgcccccctctaggagagctggctctgcagtgggggagggatgcagggacatttactgaaggagggacatggacaaaacaacattgaattcccagccccattggggagtgatctcttggacacagagcccccattcaaaatggggcagggcaagggtgggagtgtgcaaagccctgatctggagttacctgaggccatagctgccctattcacttctaagggccctgttttgagattgtttgttctaatttattttaagctaggtaaggctggggggagggtggggccgtggtcccctcagcctccatggggagggaagaagggggagctctttttttacgttgatttttttttttctactctgttttccctttttccttccgctccatttggggccctgggggtttcagtcatctccccatttggtcccctggactgtctttgttgattctaacttgtaaataaagaaaatattattcaagttttgagttaccttaatatttgcttttgtagtgtttcaaaaggaacatcataagaattgtcttgataattttgagggaaatattactgcagtgagaaaaggcaatagctaacctataattggattgtcttaatttttaaaccagtaggcttttgctgtgtttttaataaagtaaatatgacttttgtaaattga

SEQ ID NO: 42545 - DNA, 4807 bp, Artificial Sequence
  derived and/or modified sequence
ggagggggagggctagtctgagccgcagccgccgcctcctccgctcgccctcctccctggcgctgaccgatggaccagccgctccgtggggaggactccggaccctggtgggggggcgggggggttctttcgcccccgtggcggagggcccctgagaggcggatacgggtgtgcctttgggggtgatgtggcgtgtggggggaaaggtccgagctcgcctggagggggagggtttttcccttaagtcatccctcccaggacttgctttttctgctctgagccggacgccggaatggagtttgaggaagagattcttcgctgctgctgccttaccgccgagaaccaccacccgccaggcgtcttgcggccacacccctggcgggttcaggcaggctacgcccacgcgacccctcccgtttccctgctttggccaatggaggagctacgaatggcacgacctgctcgagcttggcagtctccagttgggctgtgcatggaagcttgggaagactttgttggaaggggaggcggggagagagtgctggaggctctggggcgatggcttccgcacctcttccaaccaccctctttccctggagtcggcggaccacagctcagccaattggcttggagatgtggcgggttgccacttccctgtgggtctctgcggcactcttctgcctggtgactgacaccttggaaatgaagtttatgacgtcatcgttgcggctggccaatagaaaaagctcccgcggagaggtgttccttccccttcgactcagcttcttcacccgcgtgagcgagcgcgcgcgcgcggagggggtggggaaaatctcaagcagggtggcgcgcatgagcggcgaagctcctcctccccgcctatatataaagggctggcgcggggctcggcggcgccatttcgtgctggagtggagcagcctctagaacgagctggaggattctgcctaccgatacagagccttcgagtcgtccggggccgccattacaatccacctccatccgcttggaaatggccttcgtcccggcctatgactggtcccagcgggcagtacagaccccctagaagcccctggagctcccctttttcgggccccgcccaatcctcggagtctgtccaccccctctactccgccctcaagaggatttcaaagatggaggcggcggctccctaaaccacttttcgtgttcatccgcctccatccgagatcgaaacgggacctcgtcggccccgtaggggcccgacaagaagagggaatccctgcagaccaacagcgggctatattgacgacggtgtctgagatcggggaccgtcttttgaagagtcagtccctccttagttgcccgcctcagctgaggccgccgccattttcttgctgtccgccgtctgcagagcgcgccaagctgcccggagctctccgagaggccccaaagagactgctttcgtgccggccaggcagggggtttgtcgcctggaggcccaagaggaacggcctccccccaacttagcgggttatgctggaccgggcggtgaggggaaccgaggccacccggactttccgcggctgagggcagcgccggttccttgcggtcaagatgctgcaaaacgtgactccccacaataagctccctggggaagggaatgcagggttgctggggctgggcccagaagcagcagcaccagggaaaaggattcgaaaaccctctctcttgtatgagggctttgagagccccacaatggcttcggtgcctgctttgcaacttacccctgccaacccaccacccccggaggtgtccaatcccaaaaagccaggacgagttaccaaccagctgcaatacctacacaaggtagtgatgaaggctctgtggaaacatcagttcgcatggccattccggcagcctgtggatgctgtcaaactgggtctaccggattatcacaaaattataaaacagcctatggacatgggtactattaagaggagacttgaaaacaattattattgggctgcttcagagtgtatgcaagattttaataccatgttcaccaactgttacatttacaacaagcccactgatgatattgtcctaatggcacaaacgctggaaaagatattcctacagaaggttgcatcaatgccacaagaagaacaagagctggtagtgaccatccctaagaacagccacaagaagggggccaagttggcagcgctccagggcagtgttaccagtgcccatcaggtgcctgccgtctcttctgtgtcacacacagccctgtatactcctccacctgagatacctaccactgtcctcaacattccccacccatcagtcatttcctctccacttctcaagtccttgcactctgctggacccccgctccttgctgttactgcagctcctccagcccagccccttgccaagaaaaaaggcgtaaagcggaaagcagatactaccacccctacacctacagccatcttggctcctggttctccagctagccctcctgggagtcttgagcctaaggcagcacggcttccccctatgcgtagagagagtggtcgccccatcaagcccccacgcaaagacttgcctgactctcagcaacaacaccagagctctaagaaaggaaagctttcagaacagttaaaacattgcaatggcattttgaaggagttactctctaagaagcatgctgcctatgcttggcctttctataaaccagtggatgcttctgcacttggcctgcatgactaccatgacatcattaagcaccccatggacctcagcactgtcaagcggaagatggagaaccgtgattaccgggatgcacaggagtttgctgctgatgtacggcttatgttctccaactgctataagtacaatcccccagatcacgatgttgtggcaatggcacgaaagctacaggatgtatttgagttccgttatgccaagatgccagatgaaccactagaaccagggcctttaccagtctctactgccatgccccctggcttggccaaatcgtcttcagagtcctccagtgaggaaagtagcagtgagagctcctctgaggaagaggaggaggaagatgaggaggacgaggaggaagaagagagtgaaagctcagactcagaggaagaaagggctcatcgcttagcagaactacaggaacagcttcgggcagtacatgaacaactggctgctctgtcccagggtccaatatccaagcccaagaggaaaagagagaaaaaagagaaaaagaagaaacggaaggcagagaagcatcgaggccgagctggggccgatgaagatgacaaggggcctagggcaccccgcccacctcaacctaagaagtccaagaaagcaagtggcagtgggggtggcagtgctgctttaggcccttctggctttggaccttctggaggaagtggcaccaagctccccaaaaaggccacaaagacagccccacctgccctgcctacaggttatgattcagaggaggaggaagagagcaggcccatgagttacgatgagaagcggcagctgagcctggacatcaacaaattacctggggagaagctgggccgagttgtgcatataatccaagccagggagccctctttacgtgattcaaacccagaagagattgagattgattttgaaacactcaagccatccacacttagagagcttgagcgctatgtcctttcctgcctacgtaagaaaccccggaagccctacaccattaagaagcctgtgggaaagacaaaggaggaactggctttggagaaaaagcgggaattagaaaagcggttacaagatgtcagcggacagctcaattctactaaaaagccccccaagaaagcgaatgagaaaacagagtcatcctctgcacagcaagtagcagtgtcacgccttagcgcttccagctccagctcagattccagctcctcctcttcctcgtcgtcgtcttcagacaccagtgattcagactcaggctaaggggtcaggccagatggggcaggaaggctccgcaggaccggacccctagaccaccctgccccacctgccccttccccctttgctgtgacacttcttcatctcacccccccctgcccccctctaggagagctggctctgcagtgggggagggatgcagggacatttactgaaggagggacatggacaaaacaacattgaattcccagccccattggggagtgatctcttggacacagagcccccattcaaaatggggcagggcaagggtgggagtgtgcaaagccctgatctggagttacctgaggccatagctgccctattcacttctaagggccctgttttgagattgtttgttctaatttattttaagctaggtaaggctggggggagggtggggccgtggtcccctcagcctccatggggagggaagaagggggagctctttttttacgttgatttttttttttctactctgttttccctttttccttccgctccatttggggccctgggggtttcagtcatctccccatttggtcccctggactgtctttgttgattctaacttgtaaataaagaaaatattattcaagttttgagttaccttaatatttgcttttgtagtgtttcaaaaggaacatcataagaattgtcttgataattttgagggaaatattactgcagtgagaaaaggcaatagctaacctataattggattgtcttaatttttaaaccagtaggcttttgctgtgtttttaataaagtaaatatgacttttgtaaattga

SEQ ID NO: 42546 - DNA, 4894 bp, Artificial Sequence
  derived and/or modified sequence
ggactgcgggataggaagctggggatatggacaagcagcagcgttatagcgctctgggtttcgggacataggcctgggccatgcggcccccttggccccttggcgcgacccccaggaacgttcggaaagctggtcctcgtggctgggggaaaggcggggggtgggggggaagcgggcacgtgaccccggtcagccaatctgggtgctgctgacgtggccgcgcggccccgatgctctccccacccccccagcccgttcgggaagggaggggctgggggctacgccccctcccccagcacggcttcgttttctgggggggggttgacaccccggattacataccccgtaccaagccgagggcaactttggaggccccctggaaggctttaggatccagattcttcgctgctgctgccttaccgccgagaaccaccacccgccaggcgtcttgcggccacacccctggcgggttcaggcaggctacgcccacgcgacccctcccgtttccctgctttggccaatggaggagctacgaatggcacgacctgctcgagcttggcagtctccagttgggctgtgcatggaagcttgggaagactttgttggaaggggaggcggggagagagtgctggaggctctggggcgatggcttccgcacctcttccaaccaccctctttccctggagtcggcggaccacagctcagccaattggcttggagatgtggcgggttgccacttccctgtgggtctctgcggcactcttctgcctggtgactgacaccttggaaatgaagtttatgacgtcatcgttgcggctggccaatagaaaaagctcccgcggagaggtgttccttccccttcgactcagcttcttcacccgcgtgagcgagcgcgcgcgcgcggagggggtggggaaaatctcaagcagggtggcgcgcatgagcggcgaagctcctcctccccgcctatatataaagggctggcgcggggctcggcggcgccatttcgtgctggagtggagcagcctctagaacgagctggaggattctgcctaccgatacagagccttcgagtcgtccggggccgccattacaatccacctccatccgcttggaaatggccttcgtcccggcctatgactggtcccagcgggcagtacagaccccctagaagcccctggagctcccctttttcgggccccgcccaatcctcggagtctgtccaccccctctactccgccctcaagaggatttcaaagatggaggcggcggctccctaaaccacttttcgtgttcatccgcctccatccgagatcgaaacgggacctcgtcggccccgtaggggcccgacaagaagagggaatccctgcagaccaacagcgggctatattgacgacggtgtctgagatcggggaccgtcttttgaagagtcagtccctccttagttgcccgcctcagctgaggccgccgccattttcttgctgtccgccgtctgcagagcgcgccaagctgcccggagctctccgagaggccccaaagagactgctttcgtgccggccaggcagggggtttgtcgcctggaggcccaagaggaacggcctccccccaacttagcgggttatgctggaccgggcggtgaggggaaccgaggccacccggactttccgcggctgagggcagcgccggttccttgcggtcaagatgctgcaaaacgtgactccccacaataagctccctggggaagggaatgcagggttgctggggctgggcccagaagcagcagcaccagggaaaaggattcgaaaaccctctctcttgtatgagggctttgagagccccacaatggcttcggtgcctgctttgcaacttacccctgccaacccaccacccccggaggtgtccaatcccaaaaagccaggacgagttaccaaccagctgcaatacctacacaaggtagtgatgaaggctctgtggaaacatcagttcgcatggccattccggcagcctgtggatgctgtcaaactgggtctaccggattatcacaaaattataaaacagcctatggacatgggtactattaagaggagacttgaaaacaattattattgggctgcttcagagtgtatgcaagattttaataccatgttcaccaactgttacatttacaacaagcccactgatgatattgtcctaatggcacaaacgctggaaaagatattcctacagaaggttgcatcaatgccacaagaagaacaagagctggtagtgaccatccctaagaacagccacaagaagggggccaagttggcagcgctccagggcagtgttaccagtgcccatcaggtgcctgccgtctcttctgtgtcacacacagccctgtatactcctccacctgagatacctaccactgtcctcaacattccccacccatcagtcatttcctctccacttctcaagtccttgcactctgctggacccccgctccttgctgttactgcagctcctccagcccagccccttgccaagaaaaaaggcgtaaagcggaaagcagatactaccacccctacacctacagccatcttggctcctggttctccagctagccctcctgggagtcttgagcctaaggcagcacggcttccccctatgcgtagagagagtggtcgccccatcaagcccccacgcaaagacttgcctgactctcagcaacaacaccagagctctaagaaaggaaagctttcagaacagttaaaacattgcaatggcattttgaaggagttactctctaagaagcatgctgcctatgcttggcctttctataaaccagtggatgcttctgcacttggcctgcatgactaccatgacatcattaagcaccccatggacctcagcactgtcaagcggaagatggagaaccgtgattaccgggatgcacaggagtttgctgctgatgtacggcttatgttctccaactgctataagtacaatcccccagatcacgatgttgtggcaatggcacgaaagctacaggatgtatttgagttccgttatgccaagatgccagatgaaccactagaaccagggcctttaccagtctctactgccatgccccctggcttggccaaatcgtcttcagagtcctccagtgaggaaagtagcagtgagagctcctctgaggaagaggaggaggaagatgaggaggacgaggaggaagaagagagtgaaagctcagactcagaggaagaaagggctcatcgcttagcagaactacaggaacagcttcgggcagtacatgaacaactggctgctctgtcccagggtccaatatccaagcccaagaggaaaagagagaaaaaagagaaaaagaagaaacggaaggcagagaagcatcgaggccgagctggggccgatgaagatgacaaggggcctagggcaccccgcccacctcaacctaagaagtccaagaaagcaagtggcagtgggggtggcagtgctgctttaggcccttctggctttggaccttctggaggaagtggcaccaagctccccaaaaaggccacaaagacagccccacctgccctgcctacaggttatgattcagaggaggaggaagagagcaggcccatgagttacgatgagaagcggcagctgagcctggacatcaacaaattacctggggagaagctgggccgagttgtgcatataatccaagccagggagccctctttacgtgattcaaacccagaagagattgagattgattttgaaacactcaagccatccacacttagagagcttgagcgctatgtcctttcctgcctacgtaagaaaccccggaagccctacaccattaagaagcctgtgggaaagacaaaggaggaactggctttggagaaaaagcgggaattagaaaagcggttacaagatgtcagcggacagctcaattctactaaaaagccccccaagaaagcgaatgagaaaacagagtcatcctctgcacagcaagtagcagtgtcacgccttagcgcttccagctccagctcagattccagctcctcctcttcctcgtcgtcgtcttcagacaccagtgattcagactcaggctaaggggtcaggccagatggggcaggaaggctccgcaggaccggacccctagaccaccctgccccacctgccccttccccctttgctgtgacacttcttcatctcacccccccctgcccccctctaggagagctggctctgcagtgggggagggatgcagggacatttactgaaggagggacatggacaaaacaacattgaattcccagccccattggggagtgatctcttggacacagagcccccattcaaaatggggcagggcaagggtgggagtgtgcaaagccctgatctggagttacctgaggccatagctgccctattcacttctaagggccctgttttgagattgtttgttctaatttattttaagctaggtaaggctggggggagggtggggccgtggtcccctcagcctccatggggagggaagaagggggagctctttttttacgttgatttttttttttctactctgttttccctttttccttccgctccatttggggccctgggggtttcagtcatctccccatttggtcccctggactgtctttgttgattctaacttgtaaataaagaaaatattattcaagttttgagttaccttaatatttgcttttgtagtgtttcaaaaggaacatcataagaattgtcttgataattttgagggaaatattactgcagtgagaaaaggcaatagctaacctataattggattgtcttaatttttaaaccagtaggcttttgctgtgtttttaataaagtaaatatgacttttgtaaattga

SEQ ID NO: 42547 - DNA, 887 bp, Artificial Sequence
  derived and/or modified sequence
ttcgtcccctgggggtacagcagccgggagccaggctccctggggaagggaatgcagggttgctggggctgggcccagaagcagcagcaccagggaagaggattcgaaaaccctctctcttgtatgagggctttgagagccccacaatggcttcggtgcctgctttgcaacttacccctgccaacccaccacccccggaggtgtccaatcccaaaaagccaggacgagttaccaaccagctgcaatacctacacaaggtagtgatgaaggctctgtggaaacatcagttcgcatggccattccggcagcctgtggatgctgtcaaactgggtctaccggattatcacaaaattataaaacagcctatggacatgggtactattaagaggagacttgaaaacaattattattgggctgcttcagagtgtatgcaagattttaataccatgttcaccaactgttacatttacaacaagcccactgatgatattgtcctaatggcacaaacgctggaaaagatattcctacagaaggttgcatcaatgccacaagaagaacaagagctggtagtgaccatccctaagaacagccacaagaagggggccaagttggcagcgctccagggcagtgttaccagtgcccatcaggtgcctgccgtctcttctgtgtcacacacagccctctatactcctccacctgagatacctaccactgtcctcaacattccccacccatcagtcatttcctctccacttctcaagtccttgcactctgctggacccccgctccttgctgttactgcagctcctccagcccagccccttgccaagaaaaaaggcgtaaagcggaaagcagatactaccacccctacacctacagccatcttg

SEQ ID NO: 42548 - DNA, 4894 bp, Artificial Sequence
  derived and/or modified sequence
ggactgcgggataggaagctggggatatggacaagcagcagcgttatagcgctctgggtttcgggacataggcctgggccatgcggcccccttggccccttggcgcgacccccaggaacgttcggaaagctggtcctcgtggctgggggaaaggcggggggtgggggggaagcgggcacgtgaccccggtcagccaatctgggtgctgctgacgtggccgcgcggccccgatgctctccccacccccccagcccgttcgggaagggaggggctgggggctacgccccctcccccagcacggcttcgttttctgggggggggttgacaccccggattacataccccgtaccaagccgagggcaactttggaggccccctggaaggctttaggatccagattcttcgctgctgctgccttaccgccgagaaccaccacccgccaggcgtcttgcggccacacccctggcgggttcaggcaggctacgcccacgcgacccctcccgtttccctgctttggccaatggaggagctacgaatggcacgacctgctcgagcttggcagtctccagttgggctgtgcatggaagcttgggaagactttgttggaaggggaggcggggagagagtgctggaggctctggggcgatggcttccgcacctcttccaaccaccctctttccctggagtcggcggaccacagctcagccaattggcttggagatgtggcgggttgccacttccctgtgggtctctgcggcactcttctgcctggtgactgacaccttggaaatgaagtttatgacgtcatcgttgcggctggccaatagaaaaagctcccgcggagaggtgttccttccccttcgactcagcttcttcacccgcgtgagcgagcgcgcgcgcgcggagggggtggggaaaatctcaagcagggtggcgcgcatgagcggcgaagctcctcctccccgcctatatataaagggctggcgcggggctcggcggcgccatttcgtgctggagtggagcagcctctagaacgagctggaggattctgcctaccgatacagagccttcgagtcgtccggggccgccattacaatccacctccatccgcttggaaatggccttcgtcccggcctatgactggtcccagcgggcagtacagaccccctagaagcccctggagctcccctttttcgggccccgcccaatcctcggagtctgtccaccccctctactccgccctcaagaggatttcaaagatggaggcggcggctccctaaaccacttttcgtgttcatccgcctccatccgagatcgaaacgggacctcgtcggccccgtaggggcccgacaagaagagggaatccctgcagaccaacagcgggctatattgacgacggtgtctgagatcggggaccgtcttttgaagagtcagtccctccttagttgcccgcctcagctgaggccgccgccattttcttgctgtccgccgtctgcagagcgcgccaagctgcccggagctctccgagaggccccaaagagactgctttcgtgccggccaggcagggggtttgtcgcctggaggcccaagaggaacggcctccccccaacttagcgggttatgctggaccgggcggtgaggggaaccgaggccacccggactttccgcggctgagggcagcgccggttccttgcggtcaagatgctgcaaaacgtgactccccacaataagctccctggggaagggaatgcagggttgctggggctgggcccagaagcagcagcaccagggaaaaggattcgaaaaccctctctcttgtatgagggctttgagagccccacaatggcttcggtgcctgctttgcaacttacccctgccaacccaccacccccggaggtgtccaatcccaaaaagccaggacgagttaccaaccagctgcaatacctacacaaggtagtgatgaaggctctgtggaaacatcagttcgcatggccattccggcagcctgtggatgctgtcaaactgggtctaccggattatcacaaaattataaaacagcctatggacatgggtactattaagaggagacttgaaaacaattattattgggctgcttcagagtgtatgcaagattttaataccatgttcaccaactgttacatttacaacaagcccactgatgatattgtcctaatggcacaaacgctggaaaagatattcctacagaaggttgcatcaatgccacaagaagaacaagagctggtagtgaccatccctaagaacagccacaagaagggggccaagttggcagcgctccagggcagtgttaccagtgcccatcaggtgcctgccgtctcttctgtgtcacacacagccctgtatactcctccacctgagatacctaccactgtcttcaacattccccacccatcagtcatttcctctccacttctcaagtccttgcactctgctggacccccgctccttgctgttactgcagctcctccagcccagccccttgccaagaaaaaaggcgtaaagcggaaagcagatactaccacccctacacctacagccatcttggctcctggttctccagctagccctcctgggagtcttgagcctaaggcagcacggcttccccctatgcgtagagagagtggtcgccccatcaagcccccacgcaaagacttgcctgactctcagcaacaacaccagagctctaagaaaggaaagctttcagaacagttaaaacattgcaatggcattttgaaggagttactctctaagaagcatgctgcctatgcttggcctttctataaaccagtggatgcttctgcacttggcctgcatgactaccatgacatcattaagcaccccatggacctcagcactgtcaagcggaagatggagaaccgtgattaccgggatgcacaggagtttgctgctgatgtacggcttatgttctccaactgctataagtacaatcccccagatcacgatgttgtggcaatggcacgaaagctacaggatgtatttgagttccgttatgccaagatgccagatgaaccactagaaccagggcctttaccagtctctactgccatgccccctggcttggccaaatcgtcttcagagtcctccagtgaggaaagtagcagtgagagctcctctgaggaagaggaggaggaagatgaggaggacgaggaggaagaagagagtgaaagctcagactcagaggaagaaagggctcatcgcttagcagaactacaggaacagcttcgggcagtacatgaacaactggctgctctgtcccagggtccaatatccaagcccaagaggaaaagagagaaaaaagagaaaaagaagaaacggaaggcagagaagcatcgaggccgagctggggccgatgaagatgacaaggggcctagggcaccccgcccacctcaacctaagaagtccaagaaagcaagtggcagtgggggtggcagtgctgctttaggcccttccggctttggaccttctggaggaagtggcaccaagctccccaaaaaggccacaaagacagccccacctgccctgcctacaggttatgattcagaggaggaggaagagagcaggcccatgagttacgatgagaagcggcagctgagcctggacatcaacaaattacctggggagaagctgggccgagttgtgcatataatccaagccagggagccctctttacgtgattcaaacccagaagagattgagattgattttgaaacactcaagccatccacacttagagagcttgagcgctatgtcctttcctgcctacgtaagaaaccccggaagccctacaccattaagaagcctgtgggaaagacaaaggaggaactggctttggagaaaaagcgggaattagaaaagcggttacaagatgtcagcggacagctcaattctactaaaaagccccccaagaaagcgaatgagaaaacagagtcatcctctgcacagcaagtagcagtgtcacgccttagcgcttccagctccagctcagattccagctcctcctcttcctcgtcgtcgtcttcagacaccagtgattcagactcaggctaaggggtcaggccagatggggcaggaaggctccgcaggaccggacccctagaccaccctgccccacctgccccttccccctttgctgtgacacttcttcatctcacccccccctgcccccctctaggagagctggctctgcagtgggggagggatgcagggacatttactgaaggagggacatggacaaaacaacattgaattcccagccccattggggagtgatctcttggacacagagcccccattcaaaatggggcagggcaagggtgggagtgtgcaaagccctgatctggagttacctgaggccatagctgccctattcacttctaagggccctgttttgagattgtttgttctaatttattttaagctaggtaaggctggggggagggtggggccgtggtcccctcagcctccatggggagggaagaagggggagctctttttttacgttgatttttttttttctactctgttttccctttttccttccgctccatttggggccctgggggtttcagtcatctccccatttggtcccctggactgtctttgttgattctaacttgtaaataaagaaaatattattcaagttttgagttaccttaatatttgcttttgtagtgtttcaaaaggaacatcataagaattgtcttgataattttgagggaaatattactgcagtgagaaaaggcaatagctaacctataattggattgtcttaatttttaaaccagtaggcttttgctgtgtttttaataaagtaaatatgacttttgtaaattga

SEQ ID NO: 42549 - DNA, 3542 bp, Artificial Sequence
  derived and/or modified sequence
ggaccgcgggataggaagctggggatatggacaagcagcagcgttatagcgctctgggtttcgggacataggcctgggccatgcggcccccttggccccttggcgcgacccccaggaacgttcggaaagctggtcctcgtggctgggggaaaggcggggggtgggggggaagcgggcacgtgaccccggtcagccaatctgggtgctgctgacgtggccgcgcggccccgatgctctccccacccccccagcccgttcgggaagggaggggctgggggctacgccccctcccccagcacggcttcgttttctgggggggggttgacaccccggattacataccccgtaccaagccgagggcaactttggaggccccctggaaggctttaggatccagattcttcgctgctgctgccttaccgccgagaaccaccacccgccaggcgtcttgcggccacacccctggcgggttcaggcaggctacgcccacgcgacccctcccgtttccctgctttggccaatggaggagctacgaatggcacgacctgctcgagcttggcagtctccagttgggctgtgcatggaagcttgggaagactttgttggaaggggaggcggggagagagtgctggaggctctggggcgatggcttccgcacctcttccaaccaccctctttccctggagtcggcggaccacagctcagccaattggcttggagatgtggcgggttgccacttccctgtgggtctctgcggcactcttctgcctggtgactgacaccttggaaatgaagtttatgacgtcatcgttgcggctggccaatagaaaaagctcccgcggagaggtgttccttccccttcgactcagcttcttcacccgcgtgagcgagcgcgcgcgcgcggagggggtggggaaaatctcaagcagggtggcgcgcatgagcggcgaagctcctcctccccgcctatatataaagggctggcgcggggctcggcggcgccatttcgtgctggagtggagcagcctctagaacgagctggaggattctgcctaccgatacagagccttcgagtcgtccggggccgccattacaatccacctccatccgcttggaaatggccttcgtcccggcctatgactggtcccagcgggcagtacagaccccctagaagcccctggagctcccctttttcgggccccgcccaatcctcggagtctgtccaccccctctactccgccctcaagaggatttcaaagatggaggcggcggctccctaaaccacttttcgtgttcatccgcctccatccgagatcgaaacgggacctcgtcggccccgtaggggcccgacaagaagagggaatccctgcagaccaacagcgggctatattgacgacggtgtctgagatcggggaccgtcttttgaagagtcagtccctccttagttgcccgcctcagctgaggccgccgccattttcttgctgtccgccgtctgcagagcgcgccaagctgcccggagctctccgagaggccccaaagagactgctttcgtgccggccaggcagggggtttgtcgcctggaggcccaagaggaacggcctccccccaacttagcgggttatgctggaccgggcggtgaggggaaccgaggccacccggactttccgcggctgagggcagcgccggttccttgcggtcaagatgctgcaaaacgtgactccccacaataagctccctggggaagggaatgcagggttgctggggctgggcccagaagcagcagcaccagggaagaggattcgaaaaccctctctcttgtatgagggctttgagagccccacaatggcttcggtgcctgctttgcaacttacccctgccaacccaccacccccggaggtgtccaatcccaaaaagccaggacgagttaccaaccagctgcaatacctacacaaggtagtgatgaaggctctgtggaaacatcagttcgcatggccattccggcagcctgtggatgctgtcaaactgggtctaccggattatcacaaaattataaaacagcctatggacatgggtactattaagaggagacttgaaaacaattattattgggctgcttcagagtgtatgcaagattttaataccatgttcaccaactgttacatttacaacaagcccactgatgatattgtcctaatggcacaaacgctggaaaagatattcctacagaaggttgcatcaatgccacaagaagaacaagagctggtagtgaccatccctaagaacagccacaagaagggggccaagttggcagcgctccagggcagtgttaccagtgcccatcaggtgcctgccgtctcttctgtgtcacacacagccctctatactcctccacctgagatacctaccactgtcctcaacattccccacccatcagtcatttcctctccacttctcaagtccttgcactctgctggacccccgctccttgctgttactgcagctcctccagcccagccccttgccaagaaaaaaggcgtaaagcggaaagcagatactaccacccctacacctacagccatcttggctcctggttctccagctagccctcctgggagtcttgagcctaaggcagcacggcttccccctatgcgtagagagagtggtcgccccatcaagcccccacgcaaagacttgcctgactctcagcaacaacaccagagctctaagaaaggaaagctttcagaacagttaaaacattgcaatggcattttgaaggagttactctctaagaagcatgctgcctatgcttggcctttctataaaccagtggatgcttctgcacttggcctgcatgactaccatgacatcattaagcaccccatggacctcagcactgtcaagcggaagatggagaaccgtgattaccgggatgcacaggagtttgctgctgatgtacggcttatgttctccaactgctataagtacaatcccccagatcacgatgttgtggcaatggcacgaaagctacaggatgtatttgagttccgttatgccaagatgccagatgaaccactagaaccagggcctttaccagtctctactgccatgccccctggcttggccaaatcgtcttcagagtcctccagtgaggaaagtagcagtgagagctcctctgaggaagaggaggaggaagatgaggaggacgaggaggaagaagagagtgaaagctcagactcagaggaagaaagggctcatcgcttagcagaactacaggaacagcttcgggcagtacatgaacaactggctgctctgtcccagggtccaatatccaagcccaagaggaaaagagagaaaaaagagaaaaagaagaaacggaaggcagagaagcatcgaggccgagctggggccgatgaagatgacaaggggcctagggcaccccgcccacctcaacctaagaagtccaagaaagcaagtggcagtgggggtggcagtgctgctttaggcccttctggctttggaccttctggaggaagtggcaccaa

SEQ ID NO: 42550 - DNA, 3455 bp, Artificial Sequence
  derived and/or modified sequence
ggagggggagggctagtctgagccgcagccgccgcctcctccgctcgccctcctccctggcgctgaccgatggaccagccgctccgtggggaggactccggaccctggtgggggggcgggggggttctttcgcccccgtggcggagggcccctgagaggcggatacgggtgtgcctttgggggtgatgtggcgtgtggggggaaaggtccgagctcgcctggagggggagggtttttcccttaagtcatccctcccaggacttgctttttctgctctgagccggacgccggaatggagtttgaggaagagattcttcgctgctgctgccttaccgccgagaaccaccacccgccaggcgtcttgcggccacacccctggcgggttcaggcaggctacgcccacgcgacccctcccgtttccctgctttggccaatggaggagctacgaatggcacgacctgctcgagcttggcagtctccagttgggctgtgcatggaagcttgggaagactttgttggaaggggaggcggggagagagtgctggaggctctggggcgatggcttccgcacctcttccaaccaccctctttccctggagtcggcggaccacagctcagccaattggcttggagatgtggcgggttgccacttccctgtgggtctctgcggcactcttctgcctggtgactgacaccttggaaatgaagtttatgacgtcatcgttgcggctggccaatagaaaaagctcccgcggagaggtgttccttccccttcgactcagcttcttcacccgcgtgagcgagcgcgcgcgcgcggagggggtggggaaaatctcaagcagggtggcgcgcatgagcggcgaagctcctcctccccgcctatatataaagggctggcgcggggctcggcggcgccatttcgtgctggagtggagcagcctctagaacgagctggaggattctgcctaccgatacagagccttcgagtcgtccggggccgccattacaatccacctccatccgcttggaaatggccttcgtcccggcctatgactggtcccagcgggcagtacagaccccctagaagcccctggagctcccctttttcgggccccgcccaatcctcggagtctgtccaccccctctactccgccctcaagaggatttcaaagatggaggcggcggctccctaaaccacttttcgtgttcatccgcctccatccgagatcgaaacgggacctcgtcggccccgtaggggcccgacaagaagagggaatccctgcagaccaacagcgggctatattgacgacggtgtctgagatcggggaccgtcttttgaagagtcagtccctccttagttgcccgcctcagctgaggccgccgccattttcttgctgtccgccgtctgcagagcgcgccaagctgcccggagctctccgagaggccccaaagagactgctttcgtgccggccaggcagggggtttgtcgcctggaggcccaagaggaacggcctccccccaacttagcgggttatgctggaccgggcggtgaggggaaccgaggccacccggactttccgcggctgagggcagcgccggttccttgcggtcaagatgctgcaaaacgtgactccccacaataagctccctggggaagggaatgcagggttgctggggctgggcccagaagcagcagcaccagggaagaggattcgaaaaccctctctcttgtatgagggctttgagagccccacaatggcttcggtgcctgctttgcaacttacccctgccaacccaccacccccggaggtgtccaatcccaaaaagccaggacgagttaccaaccagctgcaatacctacacaaggtagtgatgaaggctctgtggaaacatcagttcgcatggccattccggcagcctgtggatgctgtcaaactgggtctaccggattatcacaaaattataaaacagcctatggacatgggtactattaagaggagacttgaaaacaattattattgggctgcttcagagtgtatgcaagattttaataccatgttcaccaactgttacatttacaacaagcccactgatgatattgtcctaatggcacaaacgctggaaaagatattcctacagaaggttgcatcaatgccacaagaagaacaagagctggtagtgaccatccctaagaacagccacaagaagggggccaagttggcagcgctccagggcagtgttaccagtgcccatcaggtgcctgccgtctcttctgtgtcacacacagccctctatactcctccacctgagatacctaccactgtcctcaacattccccacccatcagtcatttcctctccacttctcaagtccttgcactctgctggacccccgctccttgctgttactgcagctcctccagcccagccccttgccaagaaaaaaggcgtaaagcggaaagcagatactaccacccctacacctacagccatcttggctcctggttctccagctagccctcctgggagtcttgagcctaaggcagcacggcttccccctatgcgtagagagagtggtcgccccatcaagcccccacgcaaagacttgcctgactctcagcaacaacaccagagctctaagaaaggaaagctttcagaacagttaaaacattgcaatggcattttgaaggagttactctctaagaagcatgctgcctatgcttggcctttctataaaccagtggatgcttctgcacttggcctgcatgactaccatgacatcattaagcaccccatggacctcagcactgtcaagcggaagatggagaaccgtgattaccgggatgcacaggagtttgctgctgatgtacggcttatgttctccaactgctataagtacaatcccccagatcacgatgttgtggcaatggcacgaaagctacaggatgtatttgagttccgttatgccaagatgccagatgaaccactagaaccagggcctttaccagtctctactgccatgccccctggcttggccaaatcgtcttcagagtcctccagtgaggaaagtagcagtgagagctcctctgaggaagaggaggaggaagatgaggaggacgaggaggaagaagagagtgaaagctcagactcagaggaagaaagggctcatcgcttagcagaactacaggaacagcttcgggcagtacatgaacaactggctgctctgtcccagggtccaatatccaagcccaagaggaaaagagagaaaaaagagaaaaagaagaaacggaaggcagagaagcatcgaggccgagctggggccgatgaagatgacaaggggcctagggcaccccgcccacctcaacctaagaagtccaagaaagcaagtggcagtgggggtggcagtgctgctttaggcccttctggctttggaccttctggaggaagtggcaccaa

SEQ ID NO: 42551 - DNA, 3210 bp, Artificial Sequence
  derived and/or modified sequence
ggaacggtggtggcggctcggctactgctcgtggaggggaatacaggctccctggggaagggaatgcagggttgctggggctgggcccagaagcagcagcaccagggaaaaggattcgaaaaccctctctcttgtatgagggctttgagagccccacaatggcttcggtgcctgctttgcaacttacccctgccaacccaccacccccggaggtgtccaatcccaaaaagccaggacgagttaccaaccagctgcaatacctacacaaggtagtgatgaaggctctgtggaaacatcagttcgcatggccattccggcagcctgtggatgctgtcaaactgggtctaccggattatcacaaaattataaaacagcctatggacatgggtactattaagaggagacttgaaaacaattattattgggctgcttcagagtgtatgcaagattttaataccatgttcaccaactgttacatttacaacaagcccactgatgatattgtcctaatggcacaaacgctggaaaagatattcctacagaaggttgcatcaatgccacaagaagaacaagagctggtagtgaccatccctaagaacagccacaagaagggggccaagttggcagcgctccagggcagtgttaccagtgcccatcaggtgcctgccgtctcttctgtgtcacacacagccctgtatactcctccacctgagatacctaccactgtcttcaacattccccacccatcagtcatttcctctccacttctcaagtccttgcactctgctggacccccgctccttgctgttactgcagctcctccagcccagccccttgccaagaaaaaaggcgtaaagcggaaagcagatactaccacccctacacctacagccatcttggctcctggttctccagctagccctcctgggagtcttgagcctaaggcagcacggcttccccctatgcgtagagagagtggtcgccccatcaagcccccacgcaaagacttgcctgactctcagcaacaacaccagagctctaagaaaggaaagctttcagaacagttaaaacattgcaatggcattttgaaggagttactctctaagaagcatgctgcctatgcttggcctttctataaaccagtggatgcttctgcacttggcctgcatgactaccatgacatcattaagcaccccatggacctcagcactgtcaagcggaagatggagaaccgtgattaccgggatgcacaggagtttgctgctgatgtacggcttatgttctccaactgctataagtacaatcccccagatcacgatgttgtggcaatggcacgaaagctacaggatgtatttgagttccgttatgccaagatgccagatgaaccactagaaccagggcctttaccagtctctactgccatgccccctggcttggccaaatcgtcttcagagtcctccagtgaggaaagtagcagtgagagctcctctgaggaagaggaggaggaagatgaggaggacgaggaggaagaagagagtgaaagctcagactcagaggaagaaagggctcatcgcttagcagaactacaggaacagcttcgggcagtacatgaacaactggctgctctgtcccagggtccaatatccaagcccaagaggaaaagagagaaaaaagagaaaaagaagaaacggaaggcagagaagcatcgaggccgagctggggccgatgaagatgacaaggggcctagggcaccccgcccacctcaacctaagaagtccaagaaagcaagtggcagtgggggtggcagtgctgctttaggcccttccggctttggaccttctggaggaagtggcaccaagctccccaaaaaggccacaaagacagccccacctgccctgcctacaggttatgattcagaggaggaggaagagagcaggcccatgagttacgatgagaagcggcagctgagcctggacatcaacaaattacctggggagaagctgggccgagttgtgcatataatccaagccagggagccctctttacgtgattcaaacccagaagagattgagattgattttgaaacactcaagccatccacacttagagagcttgagcgctatgtcctttcctgcctacgtaagaaaccccggaagccctacaccattaagaagcctgtgggaaagacaaaggaggaactggctttggagaaaaagcgggaattagaaaagcggttacaagatgtcagcggacagctcaattctactaaaaagccccccaagaaagcgaatgagaaaacagagtcatcctctgcacagcaagtagcagtgtcacgccttagcgcttccagctccagctcagattccagctcctcctcttcctcgtcgtcgtcttcagacaccagtgattcagactcaggctaaggggtcaggccagatggggcaggaaggctccgcaggaccggacccctagaccaccctgccccacctgccccttccccctttgctgtgacacttcttcatctcacccccccctgcccccctctaggagagctggctctgcagtgggggagggatgcagggacatttactgaaggagggacatggacaaaacaacattgaattcccagccccattggggagtgatctcttggacacagagcccccattcaaaatggggcagggcaagggtgggagtgtgcaaagccctgatctggagttacctgaggccatagctgccctattcacttctaagggccctgttttgagattgtttgttctaatttattttaagctaggtaaggctggggggagggtggggccgtggtcccctcagcctccatggggagggaagaagggggagctctttttttacgttgatttttttttttctactctgttttccctttttccttccgctccatttggggccctgggggtttcagtcatctccccatttggtcccctggactgtctttgttgattctaacttgtaaataaagaaaatattattcaagttttgagttaccttaatatttgcttttgtagtgtttcaaaaggaacatcataagaattgtcttgataattttgagggaaatattactgcagtgagaaaaggcaatagctaacctataattggattgtcttaatttttaaaccagtaggcttttgctgtgtttttaataaagtaaatatgacttttgtaaattga

SEQ ID NO: 42552 - DNA, 887 bp, Artificial Sequence
  derived and/or modified sequence
ttcgtcccctgggggtacagcagccgggagccaggctccctggggaagggaatgcagggttgctggggctgggcccagaagcagcagcaccagggaaaaggattcgaaaaccctctctcttgtatgagggctttgagagccccacaatggcttcggtgcctgctttgcaacttacccctgccaacccaccacccccggaggtgtccaatcccaaaaagccaggacgagttaccaaccagctgcaatacctacacaaggtagtgatgaaggctctgtggaaacatcagttcgcatggccattccggcagcctgtggatgctgtcaaactgggtctaccggattatcacaaaattataaaacagcctatggacatgggtactattaagaggagacttgaaaacaattattattgggctgcttcagagtgtatgcaagattttaataccatgttcaccaactgttacatttacaacaagcccactgatgatattgtcctaatggcacaaacgctggaaaagatattcctacagaaggttgcatcaatgccacaagaagaacaagagctggtagtgaccatccctaagaacagccacaagaagggggccaagttggcagcgctccagggcagtgttaccagtgcccatcaggtgcctgccgtctcttctgtgtcacacacagccctgtatactcctccacctgagatacctaccactgtcttcaacattccccacccatcagtcatttcctctccacttctcaagtccttgcactctgctggacccccgctccttgctgttactgcagctcctccagcccagccccttgccaagaaaaaaggcgtaaagcggaaagcagatactaccacccctacacctacagccatcttg

SEQ ID NO: 42553 - DNA, 3210 bp, Artificial Sequence
  derived and/or modified sequence
ggaacggtggtggcggctcggctactgctcgtggaggggaatacaggctccctggggaagggaatgcagggttgctggggctgggcccagaagcagcagcaccagggaagaggattcgaaaaccctctctcttgtatgagggctttgagagccccacaatggcttcggtgcctgctttgcaacttacccctgccaacccaccacccccggaggtgtccaatcccaaaaagccaggacgagttaccaaccagctgcaatacctacacaaggtagtgatgaaggctctgtggaaacatcagttcgcatggccattccggcagcctgtggatgctgtcaaactgggtctaccggattatcacaaaattataaaacagcctatggacatgggtactattaagaggagacttgaaaacaattattattgggctgcttcagagtgtatgcaagattttaataccatgttcaccaactgttacatttacaacaagcccactgatgatattgtcctaatggcacaaacgctggaaaagatattcctacagaaggttgcatcaatgccacaagaagaacaagagctggtagtgaccatccctaagaacagccacaagaagggggccaagttggcagcgctccagggcagtgttaccagtgcccatcaggtgcctgccgtctcttctgtgtcacacacagccctctatactcctccacctgagatacctaccactgtcctcaacattccccacccatcagtcatttcctctccacttctcaagtccttgcactctgctggacccccgctccttgctgttactgcagctcctccagcccagccccttgccaagaaaaaaggcgtaaagcggaaagcagatactaccacccctacacctacagccatcttggctcctggttctccagctagccctcctgggagtcttgagcctaaggcagcacggcttccccctatgcgtagagagagtggtcgccccatcaagcccccacgcaaagacttgcctgactctcagcaacaacaccagagctctaagaaaggaaagctttcagaacagttaaaacattgcaatggcattttgaaggagttactctctaagaagcatgctgcctatgcttggcctttctataaaccagtggatgcttctgcacttggcctgcatgactaccatgacatcattaagcaccccatggacctcagcactgtcaagcggaagatggagaaccgtgattaccgggatgcacaggagtttgctgctgatgtacggcttatgttctccaactgctataagtacaatcccccagatcacgatgttgtggcaatggcacgaaagctacaggatgtatttgagttccgttatgccaagatgccagatgaaccactagaaccagggcctttaccagtctctactgccatgccccctggcttggccaaatcgtcttcagagtcctccagtgaggaaagtagcagtgagagctcctctgaggaagaggaggaggaagatgaggaggacgaggaggaagaagagagtgaaagctcagactcagaggaagaaagggctcatcgcttagcagaactacaggaacagcttcgggcagtacatgaacaactggctgctctgtcccagggtccaatatccaagcccaagaggaaaagagagaaaaaagagaaaaagaagaaacggaaggcagagaagcatcgaggccgagctggggccgatgaagatgacaaggggcctagggcaccccgcccacctcaacctaagaagtccaagaaagcaagtggcagtgggggtggcagtgctgctttaggcccttctggctttggaccttctggaggaagtggcaccaagctccccaaaaaggccacaaagacagccccacctgccctgcctacaggttatgattcagaggaggaggaagagagcaggcccatgagttacgatgagaagcggcagctgagcctggacatcaacaaattacctggggagaagctgggccgagttgtgcatataatccaagccagggagccctctttacgtgattcaaacccagaagagattgagattgattttgaaacactcaagccatccacacttagagagcttgagcgctatgtcctttcctgcctacgtaagaaaccccggaagccctacaccattaagaagcctgtgggaaagacaaaggaggaactggctttggagaaaaagcgggaattagaaaagcggttacaagatgtcagcggacagctcaattctactaaaaagccccccaagaaagcgaatgagaaaacagagtcatcctctgcacagcaagtagcagtgtcacgccttagcgcttccagctctagctcagattccagctcctcctcttcctcgtcgtcgtcttcagacaccagtgattcagactcaggctaaggggtcaggccagatggggcaggaaggctccgcaggaccggacccctagaccaccctgccccacctgccccttccccctttgctgtgacacttcttcatctcacccccccctgcccccctctaggagagctggctctgcagtgggggagggatgcagggacatttactgaaggagggacatggacaaaacaacattgaattcccagccccattggggagtgatctcttggacacagagcccccattcaaaatggggcagggcaagggtgggagtgtgcaaagccctgatctggagttacctgaggccatagctgccctattcacttctaagggccctgttttgagattgtttgttctaatttattttaagctaggtaaggctggggggagggtggggccgtggtcccctcagcctccatggggagggaagaagggggagctctttttttacgttgatttttttttttctactctgttttccctttttccttccgctccatttggggccctgggggtttcagtcatctccccatttggtcccctggactgtctttgttgattctaacttgtaaataaagaaaatattattcaagttttgagttaccttaatatttgcttttgtagtgtttcaaaaggaacatcataagaattgtcttgataattttgagggaaatattactgcagtgagaaaaggcaatagctaacctataattggattgtcttaatttttaaaccagtaggcttttgctgtgtttttaataaagtaaatatgacttttgtaaattga

SEQ ID NO: 42554 - DNA, 4894 bp, Artificial Sequence
  derived and/or modified sequence
ggaccgcgggataggaagctggggatatggacaagcagcagcgttatagcgctctgggtttcgggacataggcctgggccatgcggcccccttggccccttggcgcgacccccaggaacgttcggaaagctggtcctcgtggctgggggaaaggcggggggtgggggggaagcgggcacgtgaccccggtcagccaatctgggtgctgctgacgtggccgcgcggccccgatgctctccccacccccccagcccgttcgggaagggaggggctgggggctacgccccctcccccagcacggcttcgttttctgggggggggttgacaccccggattacataccccgtaccaagccgagggcaactttggaggccccctggaaggctttaggatccagattcttcgctgctgctgccttaccgccgagaaccaccacccgccaggcgtcttgcggccacacccctggcgggttcaggcaggctacgcccacgcgacccctcccgtttccctgctttggccaatggaggagctacgaatggcacgacctgctcgagcttggcagtctccagttgggctgtgcatggaagcttgggaagactttgttggaaggggaggcggggagagagtgctggaggctctggggcgatggcttccgcacctcttccaaccaccctctttccctggagtcggcggaccacagctcagccaattggcttggagatgtggcgggttgccacttccctgtgggtctctgcggcactcttctgcctggtgactgacaccttggaaatgaagtttatgacgtcatcgttgcggctggccaatagaaaaagctcccgcggagaggtgttccttccccttcgactcagcttcttcacccgcgtgagcgagcgcgcgcgcgcggagggggtggggaaaatctcaagcagggtggcgcgcatgagcggcgaagctcctcctccccgcctatatataaagggctggcgcggggctcggcggcgccatttcgtgctggagtggagcagcctctagaacgagctggaggattctgcctaccgatacagagccttcgagtcgtccggggccgccattacaatccacctccatccgcttggaaatggccttcgtcccggcctatgactggtcccagcgggcagtacagaccccctagaagcccctggagctcccctttttcgggccccgcccaatcctcggagtctgtccaccccctctactccgccctcaagaggatttcaaagatggaggcggcggctccctaaaccacttttcgtgttcatccgcctccatccgagatcgaaacgggacctcgtcggccccgtaggggcccgacaagaagagggaatccctgcagaccaacagcgggctatattgacgacggtgtctgagatcggggaccgtcttttgaagagtcagtccctccttagttgcccgcctcagctgaggccgccgccattttcttgctgtccgccgtctgcagagcgcgccaagctgcccggagctctccgagaggccccaaagagactgctttcgtgccggccaggcagggggtttgtcgcctggaggcccaagaggaacggcctccccccaacttagcgggttatgctggaccgggcggtgaggggaaccgaggccacccggactttccgcggctgagggcagcgccggttccttgcggtcaagatgctgcaaaacgtgactccccacaataagctccctggggaagggaatgcagggttgctggggctgggcccagaagcagcagcaccagggaagaggattcgaaaaccctctctcttgtatgagggctttgagagccccacaatggcttcggtgcctgctttgcaacttacccctgccaacccaccacccccggaggtgtccaatcccaaaaagccaggacgagttaccaaccagctgcaatacctacacaaggtagtgatgaaggctctgtggaaacatcagttcgcatggccattccggcagcctgtggatgctgtcaaactgggtctaccggattatcacaaaattataaaacagcctatggacatgggtactattaagaggagacttgaaaacaattattattgggctgcttcagagtgtatgcaagattttaataccatgttcaccaactgttacatttacaacaagcccactgatgatattgtcctaatggcacaaacgctggaaaagatattcctacagaaggttgcatcaatgccacaagaagaacaagagctggtagtgaccatccctaagaacagccacaagaagggggccaagttggcagcgctccagggcagtgttaccagtgcccatcaggtgcctgccgtctcttctgtgtcacacacagccctctatactcctccacctgagatacctaccactgtcctcaacattccccacccatcagtcatttcctctccacttctcaagtccttgcactctgctggacccccgctccttgctgttactgcagctcctccagcccagccccttgccaagaaaaaaggcgtaaagcggaaagcagatactaccacccctacacctacagccatcttggctcctggttctccagctagccctcctgggagtcttgagcctaaggcagcacggcttccccctatgcgtagagagagtggtcgccccatcaagcccccacgcaaagacttgcctgactctcagcaacaacaccagagctctaagaaaggaaagctttcagaacagttaaaacattgcaatggcattttgaaggagttactctctaagaagcatgctgcctatgcttggcctttctataaaccagtggatgcttctgcacttggcctgcatgactaccatgacatcattaagcaccccatggacctcagcactgtcaagcggaagatggagaaccgtgattaccgggatgcacaggagtttgctgctgatgtacggcttatgttctccaactgctataagtacaatcccccagatcacgatgttgtggcaatggcacgaaagctacaggatgtatttgagttccgttatgccaagatgccagatgaaccactagaaccagggcctttaccagtctctactgccatgccccctggcttggccaaatcgtcttcagagtcctccagtgaggaaagtagcagtgagagctcctctgaggaagaggaggaggaagatgaggaggacgaggaggaagaagagagtgaaagctcagactcagaggaagaaagggctcatcgcttagcagaactacaggaacagcttcgggcagtacatgaacaactggctgctctgtcccagggtccaatatccaagcccaagaggaaaagagagaaaaaagagaaaaagaagaaacggaaggcagagaagcatcgaggccgagctggggccgatgaagatgacaaggggcctagggcaccccgcccacctcaacctaagaagtccaagaaagcaagtggcagtgggggtggcagtgctgctttaggcccttctggctttggaccttctggaggaagtggcaccaagctccccaaaaaggccacaaagacagccccacctgccctgcctacaggttatgattcagaggaggaggaagagagcaggcccatgagttacgatgagaagcggcagctgagcctggacatcaacaaattacctggggagaagctgggccgagttgtgcatataatccaagccagggagccctctttacgtgattcaaacccagaagagattgagattgattttgaaacactcaagccatccacacttagagagcttgagcgctatgtcctttcctgcctacgtaagaaaccccggaagccctacaccattaagaagcctgtgggaaagacaaaggaggaactggctttggagaaaaagcgggaattagaaaagcggttacaagatgtcagcggacagctcaattctactaaaaagccccccaagaaagcgaatgagaaaacagagtcatcctctgcacagcaagtagcagtgtcacgccttagcgcttccagctctagctcagattccagctcctcctcttcctcgtcgtcgtcttcagacaccagtgattcagactcaggctaaggggtcaggccagatggggcaggaaggctccgcaggaccggacccctagaccaccctgccccacctgccccttccccctttgctgtgacacttcttcatctcacccccccctgcccccctctaggagagctggctctgcagtgggggagggatgcagggacatttactgaaggagggacatggacaaaacaacattgaattcccagccccattggggagtgatctcttggacacagagcccccattcaaaatggggcagggcaagggtgggagtgtgcaaagccctgatctggagttacctgaggccatagctgccctattcacttctaagggccctgttttgagattgtttgttctaatttattttaagctaggtaaggctggggggagggtggggccgtggtcccctcagcctccatggggagggaagaagggggagctctttttttacgttgatttttttttttctactctgttttccctttttccttccgctccatttggggccctgggggtttcagtcatctccccatttggtcccctggactgtctttgttgattctaacttgtaaataaagaaaatattattcaagttttgagttaccttaatatttgcttttgtagtgtttcaaaaggaacatcataagaattgtcttgataattttgagggaaatattactgcagtgagaaaaggcaatagctaacctataattggattgtcttaatttttaaaccagtaggcttttgctgtgtttttaataaagtaaatatgacttttgtaaattga

SEQ ID NO: 42555 - DNA, 3210 bp, Artificial Sequence
  derived and/or modified sequence
ggaacggtggtggcggctcggctactgctcgtggaggggaatacaggctccctggggaagggaatgcagggttgctggggctgggcccagaagcagcagcaccagggaaaaggattcgaaaaccctctctcttgtatgagggctttgagagccccacaatggcttcggtgcctgctttgcaacttacccctgccaacccaccacccccggaggtgtccaatcccaaaaagccaggacgagttaccaaccagctgcaatacctacacaaggtagtgatgaaggctctgtggaaacatcagttcgcatggccattccggcagcctgtggatgctgtcaaactgggtctaccggattatcacaaaattataaaacagcctatggacatgggtactattaagaggagacttgaaaacaattattattgggctgcttcagagtgtatgcaagattttaataccatgttcaccaactgttacatttacaacaagcccactgatgatattgtcctaatggcacaaacgctggaaaagatattcctacagaaggttgcatcaatgccacaagaagaacaagagctggtagtgaccatccctaagaacagccacaagaagggggccaagttggcagcgctccagggcagtgttaccagtgcccatcaggtgcctgccgtctcttctgtgtcacacacagccctgtatactcctccacctgagatacctaccactgtcctcaacattccccacccatcagtcatttcctctccacttctcaagtccttgcactctgctggacccccgctccttgctgttactgcagctcctccagcccagccccttgccaagaaaaaaggcgtaaagcggaaagcagatactaccacccctacacctacagccatcttggctcctggttctccagctagccctcctgggagtcttgagcctaaggcagcacggcttccccctatgcgtagagagagtggtcgccccatcaagcccccacgcaaagacttgcctgactctcagcaacaacaccagagctctaagaaaggaaagctttcagaacagttaaaacattgcaatggcattttgaaggagttactctctaagaagcatgctgcctatgcttggcctttctataaaccagtggatgcttctgcacttggcctgcatgactaccatgacatcattaagcaccccatggacctcagcactgtcaagcggaagatggagaaccgtgattaccgggatgcacaggagtttgctgctgatgtacggcttatgttctccaactgctataagtacaatcccccagatcacgatgttgtggcaatggcacgaaagctacaggatgtatttgagttccgttatgccaagatgccagatgaaccactagaaccagggcctttaccagtctctactgccatgccccctggcttggccaaatcgtcttcagagtcctccagtgaggaaagtagcagtgagagctcctctgaggaagaggaggaggaagatgaggaggacgaggaggaagaagagagtgaaagctcagactcagaggaagaaagggctcatcgcttagcagaactacaggaacagcttcgggcagtacatgaacaactggctgctctgtcccagggtccaatatccaagcccaagaggaaaagagagaaaaaagagaaaaagaagaaacggaaggcagagaagcatcgaggccgagctggggccgatgaagatgacaaggggcctagggcaccccgcccacctcaacctaagaagtccaagaaagcaagtggcagtgggggtggcagtgctgctttaggcccttctggctttggaccttctggaggaagtggcaccaagctccccaaaaaggccacaaagacagccccacctgccctgcctacaggttatgattcagaggaggaggaagagagcaggcccatgagttacgatgagaagcggcagctgagcctggacatcaacaaattacctggggagaagctgggccgagttgtgcatataatccaagccagggagccctctttacgtgattcaaacccagaagagattgagattgattttgaaacactcaagccatccacacttagagagcttgagcgctatgtcctttcctgcctacgtaagaaaccccggaagccctacaccattaagaagcctgtgggaaagacaaaggaggaactggctttggagaaaaagcgggaattagaaaagcggttacaagatgtcagcggacagctcaattctactaaaaagccccccaagaaagcgaatgagaaaacagagtcatcctctgcacagcaagtagcagtgtcacgccttagcgcttccagctccagctcagattccagctcctcctcttcctcgtcgtcgtcttcagacaccagtgattcagactcaggctaaggggtcaggccagatggggcaggaaggctccgcaggaccggacccctagaccaccctgccccacctgccccttccccctttgctgtgacacttcttcatctcacccccccctgcccccctctaggagagctggctctgcagtgggggagggatgcagggacatttactgaaggagggacatggacaaaacaacattgaattcccagccccattggggagtgatctcttggacacagagcccccattcaaaatggggcagggcaagggtgggagtgtgcaaagccctgatctggagttacctgaggccatagctgccctattcacttctaagggccctgttttgagattgtttgttctaatttattttaagctaggtaaggctggggggagggtggggccgtggtcccctcagcctccatggggagggaagaagggggagctctttttttacgttgatttttttttttctactctgttttccctttttccttccgctccatttggggccctgggggtttcagtcatctccccatttggtcccctggactgtctttgttgattctaacttgtaaataaagaaaatattattcaagttttgagttaccttaatatttgcttttgtagtgtttcaaaaggaacatcataagaattgtcttgataattttgagggaaatattactgcagtgagaaaaggcaatagctaacctataattggattgtcttaatttttaaaccagtaggcttttgctgtgtttttaataaagtaaatatgacttttgtaaattga

SEQ ID NO: 42556 - DNA, 3210 bp, Artificial Sequence
  derived and/or modified sequence
ggaacggtggtggcggctcggctactgctcgtggaggggaatacaggctccctggggaagggaatgcagggttgctggggctgggcccagaagcagcagcaccagggaagaggattcgaaaaccctctctcttgtatgagggctttgagagccccacaatggcttcggtgcctgctttgcaacttacccctgccaacccaccacccccggaggtgtccaatcccaaaaagccaggacgagttaccaaccagctgcaatacctacacaaggtagtgatgaaggctctgtggaaacatcagttcgcatggccattccggcagcctgtggatgctgtcaaactgggtctaccggattatcacaaaattataaaacagcctatggacatgggtactattaagaggagacttgaaaacaattattattgggctgcttcagagtgtatgcaagattttaataccatgttcaccaactgttacatttacaacaagcccactgatgatattgtcctaatggcacaaacgctggaaaagatattcctacagaaggttgcatcaatgccacaagaagaacaagagctggtagtgaccatccctaagaacagccacaagaagggggccaagttggcagcgctccagggcagtgttaccagtgcccatcaggtgcctgccgtctcttctgtgtcacacacagccctgtatactcctccacctgagatacctaccactgtcctcaacattccccacccatcagtcatttcctctccacttctcaagtccttgcactctgctggacccccgctccttgctgttactgcagctcctccagcccagccccttgccaagaaaaaaggcgtaaagcggaaagcagatactaccacccctacacctacagccatcttggctcctggttctccagctagccctcctgggagtcttgagcctaaggcagcacggcttccccctatgcgtagagagagtggtcgccccatcaagcccccacgcaaagacttgcctgactctcagcaacaacaccagagctctaagaaaggaaagctttcagaacagttaaaacattgcaatggcattttgaaggagttactctctaagaagcatgctgcctatgcttggcctttctataaaccagtggatgcttctgcacttggcctgcatgactaccatgacatcattaagcaccccatggacctcagcactgtcaagcggaagatggagaaccgtgattaccgggatgcacaggagtttgctgctgatgtacggcttatgttctccaactgctataagtacaatcccccagatcacgatgttgtggcaatggcacgaaagctacaggatgtatttgagttccgttatgccaagatgccagatgaaccactagaaccagggcctttaccagtctctactgccatgccccctggcttggccaaatcgtcttcagagtcctccagtgaggaaagtagcagtgagagctcctctgaggaagaggaggaggaagatgaggaggacgaggaggaagaagagagtgaaagctcagactcagaggaagaaagggctcatcgcttagcagaactacaggaacagcttcgggcagtacatgaacaactggctgctctgtcccagggtccaatatccaagcccaagaggaaaagagagaaaaaagagaaaaagaagaaacggaaggcagagaagcatcgaggccgagctggggccgatgaagatgacaaggggcctagggcaccccgcccacctcaacctaagaagtccaagaaagcaagtggcagtgggggtggcagtgctgctttaggcccttctggctttggaccttctggaggaagtggcaccaagctccccaaaaaggccacaaagacagccccacctgccctgcctacaggttatgattcagaggaggaggaagagagcaggcccatgagttacgatgagaagcggcagctgagcctggacatcaacaaattacctggggagaagctgggccgagttgtgcatataatccaagccagggagccctctttacgtgattcaaacccagaagagattgagattgattttgaaacactcaagccatccacacttagagagcttgagcgctatgtcctttcctgcctacgtaagaaaccccggaagccctacaccattaagaagcctgtgggaaagacaaaggaggaactggctttggagaaaaagcgggaattagaaaagcggttacaagatgtcagcggacagctcaattctactaaaaagccccccaagaaagcgaatgagaaaacagagtcatcctctgcacagcaagtagcagtgtcacgccttagcgcttccagctccagctcagattccagctcctcctcttcctcgtcgtcgtcttcagacaccagtgattcagactcaggctaaggggtcaggccagatggggcaggaaggctccgcaggaccggacccctagaccaccctgccccacctgccccttccccctttgctgtgacacttcttcatctcacccccccccgcccccctctaggagagctggctctgcagtgggggagggatgcagggacatttactgaaggagggacatggacaaaacaacattgaattcccagccccattggggagtgatctcttggacacagagcccccattcaaaatggggcagggcaagggtgggagtgtgcaaagccctgatctggagttacctgaggccacagctgccctattcacttctaagggccctgttttgagattgtttgttctaatttattttaagctaggtaaggctggggggagggtggggccgtggtcccctcagcctccatggggagggaagaagggggagctctttttttacgttgatttttttttttctactctgttttccctttttccttccgctccatttggggccctgggggtttcagtcatctccccatttggtcccctggactgtctttgttgattctaacttgtaaataaagaaaatattattcaagttttgagttaccttaatatttgcttttgtagtgtttcaaaaggaacatcataagaattgtcttgataattttgagggaaatattactgcagtgagaaaaggcaatagctaacctataattggattgtcttaatttttaaaccagtaggcttttgctgtgtttttaataaagtaaatatgacttttgtaaattga

SEQ ID NO: 42557 - DNA, 3013 bp, Artificial Sequence
  derived and/or modified sequence
ggaacggtggtggcggctcggctactgctcgtggaggggaatacaggctccctggggaagggaatgcagggttgctggggctgggcccagaagcagcagcaccagggaagaggattcgaaaaccctctctcttgtatgagggctttgagagccccacaatggcttcggtgcctgctttgcaacttacccctgccaacccaccacccccggaggtgtccaatcccaaaaagccaggacgagttaccaaccagctgcaatacctacacaaggtagtgatgaaggctctgtggaaacatcagttcgcatggccattccggcagcctgtggatgctgtcaaactgggtctaccggattatcacaaaattataaaacagcctatggacatgggtactattaagaggagacttgaaaacaattattattgggctgcttcagagtgtatgcaagattttaataccatgttcaccaactgttacatttacaacaagcccactgatgatattgtcctaatggcacaaacgctggaaaagatattcctacagaaggttgcatcaatgccacaagaagaacaagagctggtagtgaccatccctaagaacagccacaagaagggggccaagttggcagcgctccagggcagtgttaccagtgcccatcaggtgcctgccgtctcttctgtgtcacacacagccctgtatactcctccacctgagatacctaccactgtcctcaacattccccacccatcagtcatttcctctccacttctcaagtccttgcactctgctggacccccgctccttgctgttactgcagctcctccagcccagccccttgccaagaaaaaaggcgtaaagcggaaagcagatactaccacccctacacctacagccatcttggctcctggttctccagctagccctcctgggagtcttgagcctaaggcagcacggcttccccctatgcgtagagagagtggtcgccccatcaagcccccacgcaaagacttgcctgactctcagcaacaacaccagagctctaagaaaggaaagctttcagaacagttaaaacattgcaatggcattttgaaggagttactctctaagaagcatgctgcctatgcttggcctttctataaaccagtggatgcttctgcacttggcctgcatgactaccatgacatcattaagcaccccatggacctcagcactgtcaagcggaagatggagaaccgtgattaccgggatgcacaggagtttgctgctgatgtacggcttatgttctccaactgctataagtacaatcccccagatcacgatgttgtggcaatggcacgaaagctacaggatgtatttgagttccgttatgccaagatgccagatgaaccactagaaccagggcctttaccagtctctactgccatgccccctggcttggccaaatcgtcttcagagtcctccagtgaggaaagtagcagtgagagctcctctgaggaagaggaggaggaagatgaggaggacgaggaggaagaagagagtgaaagctcagactcagaggaagaaagggctcatcgcttagcagaactacaggaacagcttcgggcagtacatgaacaactggctgctctgtcccagggtccaatatccaagcccaagaggaaaagagagaaaaaagagaaaaagaagaaacggaaggcagagaagcatcgaggccgagctggggccgatgaagatgacaaggggcctagggcaccccgcccacctcaacctaagaagtccaagaaagcaagtggcagtgggggtggcagtgctgctttaggcccttctggctttggaccttctggaggaagtggcaccaagctccccaaaaaggccacaaagacagccccacctgccctgcctacaggttatgattcagaggaggaggaagagagcaggcccatgagttacgatgagaagcggcagctgagcctggacatcaacaaattacctggggagaagctgggccgagttgtgcatataatccaagccagggagccctctttacgtgattcaaacccagaagagattgagattgattttgaaacactcaagccatccacacttagagagcttgagcgctatgtcctttcctgcctacgtaagaaaccccggaagccctacaccattaagaagcctgtgggaaagacaaaggaggaactggctttggagaaaaagcgggaattagaaaagcggttacaagatgtcagcggacagctcaattctactaaaaagccccccaagaaagcgaatgagaaaacagagtcatcctctgcacagcaagtagcagtgtcacgccttagcgcttccagctccagctcagattccagctcctcctcttcctcgtcgtcgtcttcagacaccagtgattcagactcaggctaaggggtcaggccagatggggcaggaaggctccgcaggaccggacccctagaccaccctgccccacctgccccttccccctttgctgtgacacttcttcatctcacccccccccgcccccctctaggagagctggctctgcagtgggggagggatgcagggacatttactgaaggagggacatggacaaaacaacattgaattcccagccccattggggagtgatctcttggacacagagcccccattcaaaatggggcagggcaagggtgggagtgtgcaaagccctgatctggagttacctgaggccacagctgccctattcacttctaagggccctgttttgagattgtttgttctaatttattttaagctaggtaaggctggggggagggtggggccgtggtcccctcagcctccatggggagggaagaagggggagctctttttttacgttgatttttttttttctactctgttttccctttttccttccgctccatttggggccctgggggtttcagtcatctccccatttggtcccctggactgtctttgttgattctaacttgtaaataaagaaaatattattc

SEQ ID NO: 42558 - DNA, 4807 bp, Artificial Sequence
  derived and/or modified sequence
ggagggggagggctagtctgagccgcagccgccgcctcctccgctcgccctcctccctggcgctgaccgatggaccagccgctccgtggggaggactccggaccctggtgggggggcgggggggttctttcgcccccgtggcggagggcccctgagaggcggatacgggtgtgcctttgggggtgatgtggcgtgtggggggaaaggtccgagctcgcctggagggggagggtttttcccttaagtcatccctcccaggacttgctttttctgctctgagccggacgccggaatggagtttgaggaagagattcttcgctgctgctgccttaccgccgagaaccaccacccgccaggcgtcttgcggccacacccctggcgggttcaggcaggctacgcccacgcgacccctcccgtttccctgctttggccaatggaggagctacgaatggcacgacctgctcgagcttggcagtctccagttgggctgtgcatggaagcttgggaagactttgttggaaggggaggcggggagagagtgctggaggctctggggcgatggcttccgcacctcttccaaccaccctctttccctggagtcggcggaccacagctcagccaattggcttggagatgtggcgggttgccacttccctgtgggtctctgcggcactcttctgcctggtgactgacaccttggaaatgaagtttatgacgtcatcgttgcggctggccaatagaaaaagctcccgcggagaggtgttccttccccttcgactcagcttcttcacccgcgtgagcgagcgcgcgcgcgcggagggggtggggaaaatctcaagcagggtggcgcgcatgagcggcgaagctcctcctccccgcctatatataaagggctggcgcggggctcggcggcgccatttcgtgctggagtggagcagcctctagaacgagctggaggattctgcctaccgatacagagccttcgagtcgtccggggccgccattacaatccacctccatccgcttggaaatggccttcgtcccggcctatgactggtcccagcgggcagtacagaccccctagaagcccctggagctcccctttttcgggccccgcccaatcctcggagtctgtccaccccctctactccgccctcaagaggatttcaaagatggaggcggcggctccctaaaccacttttcgtgttcatccgcctccatccgagatcgaaacgggacctcgtcggccccgtaggggcccgacaagaagagggaatccctgcagaccaacagcgggctatattgacgacggtgtctgagatcggggaccgtcttttgaagagtcagtccctccttagttgcccgcctcagctgaggccgccgccattttcttgctgtccgccgtctgcagagcgcgccaagctgcccggagctctccgagaggccccaaagagactgctttcgtgccggccaggcagggggtttgtcgcctggaggcccaagaggaacggcctccccccaacttagcgggttatgctggaccgggcggtgaggggaaccgaggccacccggactttccgcggctgagggcagcgccggttccttgcggtcaagatgctgcaaaacgtgactccccacaataagctccctggggaagggaatgcagggttgctggggctgggcccagaagcagcagcaccagggaaaaggattcgaaaaccctctctcttgtatgagggctttgagagccccacaatggcttcggtgcctgctttgcaacttacccctgccaacccaccacccccggaggtgtccaatcccaaaaagccaggacgagttaccaaccagctgcaatacctacacaaggtagtgatgaaggctctgtggaaacatcagttcgcatggccattccggcagcctgtggatgctgtcaaactgggtctaccggattatcacaaaattataaaacagcctatggacatgggtactattaagaggagacttgaaaacaattattattgggctgcttcagagtgtatgcaagattttaataccatgttcaccaactgttacatttacaacaagcccactgatgatattgtcctaatggcacaaacgctggaaaagatattcctacagaaggttgcatcaatgccacaagaagaacaagagctggtagtgaccatccctaagaacagccacaagaagggggccaagttggcagcgctccagggcagtgttaccagtgcccatcaggtgcctgccgtctcttctgtgtcacacacagccctgtatactcctccacctgagatacctaccactgtcttcaacattccccacccatcagtcatttcctctccacttctcaagtccttgcactctgctggacccccgctccttgctgttactgcagctcctccagcccagccccttgccaagaaaaaaggcgtaaagcggaaagcagatactaccacccctacacctacagccatcttggctcctggttctccagctagccctcctgggagtcttgagcctaaggcagcacggcttccccctatgcgtagagagagtggtcgccccatcaagcccccacgcaaagacttgcctgactctcagcaacaacaccagagctctaagaaaggaaagctttcagaacagttaaaacattgcaatggcattttgaaggagttactctctaagaagcatgctgcctatgcttggcctttctataaaccagtggatgcttctgcacttggcctgcatgactaccatgacatcattaagcaccccatggacctcagcactgtcaagcggaagatggagaaccgtgattaccgggatgcacaggagtttgctgctgatgtacggcttatgttctccaactgctataagtacaatcccccagatcacgatgttgtggcaatggcacgaaagctacaggatgtatttgagttccgttatgccaagatgccagatgaaccactagaaccagggcctttaccagtctctactgccatgccccctggcttggccaaatcgtcttcagagtcctccagtgaggaaagtagcagtgagagctcctctgaggaagaggaggaggaagatgaggaggacgaggaggaagaagagagtgaaagctcagactcagaggaagaaagggctcatcgcttagcagaactacaggaacagcttcgggcagtacatgaacaactggctgctctgtcccagggtccaatatccaagcccaagaggaaaagagagaaaaaagagaaaaagaagaaacggaaggcagagaagcatcgaggccgagctggggccgatgaagatgacaaggggcctagggcaccccgcccacctcaacctaagaagtccaagaaagcaagtggcagtgggggtggcagtgctgctttaggcccttccggctttggaccttctggaggaagtggcaccaagctccccaaaaaggccacaaagacagccccacctgccctgcctacaggttatgattcagaggaggaggaagagagcaggcccatgagttacgatgagaagcggcagctgagcctggacatcaacaaattacctggggagaagctgggccgagttgtgcatataatccaagccagggagccctctttacgtgattcaaacccagaagagattgagattgattttgaaacactcaagccatccacacttagagagcttgagcgctatgtcctttcctgcctacgtaagaaaccccggaagccctacaccattaagaagcctgtgggaaagacaaaggaggaactggctttggagaaaaagcgggaattagaaaagcggttacaagatgtcagcggacagctcaattctactaaaaagccccccaagaaagcgaatgagaaaacagagtcatcctctgcacagcaagtagcagtgtcacgccttagcgcttccagctccagctcagattccagctcctcctcttcctcgtcgtcgtcttcagacaccagtgattcagactcaggctaaggggtcaggccagatggggcaggaaggctccgcaggaccggacccctagaccaccctgccccacctgccccttccccctttgctgtgacacttcttcatctcacccccccctgcccccctctaggagagctggctctgcagtgggggagggatgcagggacatttactgaaggagggacatggacaaaacaacattgaattcccagccccattggggagtgatctcttggacacagagcccccattcaaaatggggcagggcaagggtgggagtgtgcaaagccctgatctggagttacctgaggccatagctgccctattcacttctaagggccctgttttgagattgtttgttctaatttattttaagctaggtaaggctggggggagggtggggccgtggtcccctcagcctccatggggagggaagaagggggagctctttttttacgttgatttttttttttctactctgttttccctttttccttccgctccatttggggccctgggggtttcagtcatctccccatttggtcccctggactgtctttgttgattctaacttgtaaataaagaaaatattattcaagttttgagttaccttaatatttgcttttgtagtgtttcaaaaggaacatcataagaattgtcttgataattttgagggaaatattactgcagtgagaaaaggcaatagctaacctataattggattgtcttaatttttaaaccagtaggcttttgctgtgtttttaataaagtaaatatgacttttgtaaattga

SEQ ID NO: 42559 - DNA, 887 bp, Artificial Sequence
  derived and/or modified sequence
ttcgtcccctgggggtacagcagccgggagccaggctccctggggaagggaatgcagggttgctggggctgggcccagaagcagcagcaccagggaaaaggattcgaaaaccctctctcttgtatgagggctttgagagccccacaatggcttcggtgcctgctttgcaacttacccctgccaacccaccacccccggaggtgtccaatcccaaaaagccaggacgagttaccaaccagctgcaatacctacacaaggtagtgatgaaggctctgtggaaacatcagttcgcatggccattccggcagcctgtggatgctgtcaaactgggtctaccggattatcacaaaattataaaacagcctatggacatgggtactattaagaggagacttgaaaacaattattattgggctgcttcagagtgtatgcaagattttaataccatgttcaccaactgttacatttacaacaagcccactgatgatattgtcctaatggcacaaacgctggaaaagatattcctacagaaggttgcatcaatgccacaagaagaacaagagctggtagtgaccatccctaagaacagccacaagaagggggccaagttggcagcgctccagggcagtgttaccagtgcccatcaggtgcctgccgtctcttctgtgtcacacacagccctgtatactcctccacctgagatacctaccactgtcctcaacattccccacccatcagtcatttcctctccacttctcaagtccttgcactctgctggacccccgctccttgctgttactgcagctcctccagcccagccccttgccaagaaaaaaggcgtaaagcggaaagcagatactaccacccctacacctacagccatcttg

SEQ ID NO: 42560 - DNA, 887 bp, Artificial Sequence
  derived and/or modified sequence
ttcgtcccctgggggtacagcagccgggagccaggctccctggggaagggaatgcagggttgctggggctgggcccagaagcagcagcaccagggaagaggattcgaaaaccctctctcttgtatgagggctttgagagccccacaatggcttcggtgcctgctttgcaacttacccctgccaacccaccacccccggaggtgtccaatcccaaaaagccaggacgagttaccaaccagctgcaatacctacacaaggtagtgatgaaggctctgtggaaacatcagttcgcatggccattccggcagcctgtggatgctgtcaaactgggtctaccggattatcacaaaattataaaacagcctatggacatgggtactattaagaggagacttgaaaacaattattattgggctgcttcagagtgtatgcaagattttaataccatgttcaccaactgttacatttacaacaagcccactgatgatattgtcctaatggcacaaacgctggaaaagatattcctacagaaggttgcatcaatgccacaagaagaacaagagctggtagtgaccatccctaagaacagccacaagaagggggccaagttggcagcgctccagggcagtgttaccagtgcccatcaggtgcctgccgtctcttctgtgtcacacacagccctgtatactcctccacctgagatacctaccactgtcctcaacattccccacccatcagtcatttcctctccacttctcaagtccttgcactctgctggacccccgctccttgctgttactgcagctcctccagcccagccccttgccaagaaaaaaggcgtaaagcggaaagcagatactaccacccctacacctacagccatcttg

SEQ ID NO: 42561 - DNA, 1858 bp, Artificial Sequence
  derived and/or modified sequence
ggaacggtggtggcggctcggctactgctcgtggaggggaatacaggctccctggggaagggaatgcagggttgctggggctgggcccagaagcagcagcaccagggaagaggattcgaaaaccctctctcttgtatgagggctttgagagccccacaatggcttcggtgcctgctttgcaacttacccctgccaacccaccacccccggaggtgtccaatcccaaaaagccaggacgagttaccaaccagctgcaatacctacacaaggtagtgatgaaggctctgtggaaacatcagttcgcatggccattccggcagcctgtggatgctgtcaaactgggtctaccggattatcacaaaattataaaacagcctatggacatgggtactattaagaggagacttgaaaacaattattattgggctgcttcagagtgtatgcaagattttaataccatgttcaccaactgttacatttacaacaagcccactgatgatattgtcctaatggcacaaacgctggaaaagatattcctacagaaggttgcatcaatgccacaagaagaacaagagctggtagtgaccatccctaagaacagccacaagaagggggccaagttggcagcgctccagggcagtgttaccagtgcccatcaggtgcctgccgtctcttctgtgtcacacacagccctctatactcctccacctgagatacctaccactgtcctcaacattccccacccatcagtcatttcctctccacttctcaagtccttgcactctgctggacccccgctccttgctgttactgcagctcctccagcccagccccttgccaagaaaaaaggcgtaaagcggaaagcagatactaccacccctacacctacagccatcttggctcctggttctccagctagccctcctgggagtcttgagcctaaggcagcacggcttccccctatgcgtagagagagtggtcgccccatcaagcccccacgcaaagacttgcctgactctcagcaacaacaccagagctctaagaaaggaaagctttcagaacagttaaaacattgcaatggcattttgaaggagttactctctaagaagcatgctgcctatgcttggcctttctataaaccagtggatgcttctgcacttggcctgcatgactaccatgacatcattaagcaccccatggacctcagcactgtcaagcggaagatggagaaccgtgattaccgggatgcacaggagtttgctgctgatgtacggcttatgttctccaactgctataagtacaatcccccagatcacgatgttgtggcaatggcacgaaagctacaggatgtatttgagttccgttatgccaagatgccagatgaaccactagaaccagggcctttaccagtctctactgccatgccccctggcttggccaaatcgtcttcagagtcctccagtgaggaaagtagcagtgagagctcctctgaggaagaggaggaggaagatgaggaggacgaggaggaagaagagagtgaaagctcagactcagaggaagaaagggctcatcgcttagcagaactacaggaacagcttcgggcagtacatgaacaactggctgctctgtcccagggtccaatatccaagcccaagaggaaaagagagaaaaaagagaaaaagaagaaacggaaggcagagaagcatcgaggccgagctggggccgatgaagatgacaaggggcctagggcaccccgcccacctcaacctaagaagtccaagaaagcaagtggcagtgggggtggcagtgctgctttaggcccttctggctttggaccttctggaggaagtggcaccaa

SEQ ID NO: 42562 - DNA, 3013 bp, Artificial Sequence
  derived and/or modified sequence
ggaacggtggtggcggctcggctactgctcgtggaggggaatacaggctccctggggaagggaatgcagggttgctggggctgggcccagaagcagcagcaccagggaaaaggattcgaaaaccctctctcttgtatgagggctttgagagccccacaatggcttcggtgcctgctttgcaacttacccctgccaacccaccacccccggaggtgtccaatcccaaaaagccaggacgagttaccaaccagctgcaatacctacacaaggtagtgatgaaggctctgtggaaacatcagttcgcatggccattccggcagcctgtggatgctgtcaaactgggtctaccggattatcacaaaattataaaacagcctatggacatgggtactattaagaggagacttgaaaacaattattattgggctgcttcagagtgtatgcaagattttaataccatgttcaccaactgttacatttacaacaagcccactgatgatattgtcctaatggcacaaacgctggaaaagatattcctacagaaggttgcatcaatgccacaagaagaacaagagctggtagtgaccatccctaagaacagccacaagaagggggccaagttggcagcgctccagggcagtgttaccagtgcccatcaggtgcctgccgtctcttctgtgtcacacacagccctgtatactcctccacctgagatacctaccactgtcttcaacattccccacccatcagtcatttcctctccacttctcaagtccttgcactctgctggacccccgctccttgctgttactgcagctcctccagcccagccccttgccaagaaaaaaggcgtaaagcggaaagcagatactaccacccctacacctacagccatcttggctcctggttctccagctagccctcctgggagtcttgagcctaaggcagcacggcttccccctatgcgtagagagagtggtcgccccatcaagcccccacgcaaagacttgcctgactctcagcaacaacaccagagctctaagaaaggaaagctttcagaacagttaaaacattgcaatggcattttgaaggagttactctctaagaagcatgctgcctatgcttggcctttctataaaccagtggatgcttctgcacttggcctgcatgactaccatgacatcattaagcaccccatggacctcagcactgtcaagcggaagatggagaaccgtgattaccgggatgcacaggagtttgctgctgatgtacggcttatgttctccaactgctataagtacaatcccccagatcacgatgttgtggcaatggcacgaaagctacaggatgtatttgagttccgttatgccaagatgccagatgaaccactagaaccagggcctttaccagtctctactgccatgccccctggcttggccaaatcgtcttcagagtcctccagtgaggaaagtagcagtgagagctcctctgaggaagaggaggaggaagatgaggaggacgaggaggaagaagagagtgaaagctcagactcagaggaagaaagggctcatcgcttagcagaactacaggaacagcttcgggcagtacatgaacaactggctgctctgtcccagggtccaatatccaagcccaagaggaaaagagagaaaaaagagaaaaagaagaaacggaaggcagagaagcatcgaggccgagctggggccgatgaagatgacaaggggcctagggcaccccgcccacctcaacctaagaagtccaagaaagcaagtggcagtgggggtggcagtgctgctttaggcccttccggctttggaccttctggaggaagtggcaccaagctccccaaaaaggccacaaagacagccccacctgccctgcctacaggttatgattcagaggaggaggaagagagcaggcccatgagttacgatgagaagcggcagctgagcctggacatcaacaaattacctggggagaagctgggccgagttgtgcatataatccaagccagggagccctctttacgtgattcaaacccagaagagattgagattgattttgaaacactcaagccatccacacttagagagcttgagcgctatgtcctttcctgcctacgtaagaaaccccggaagccctacaccattaagaagcctgtgggaaagacaaaggaggaactggctttggagaaaaagcgggaattagaaaagcggttacaagatgtcagcggacagctcaattctactaaaaagccccccaagaaagcgaatgagaaaacagagtcatcctctgcacagcaagtagcagtgtcacgccttagcgcttccagctccagctcagattccagctcctcctcttcctcgtcgtcgtcttcagacaccagtgattcagactcaggctaaggggtcaggccagatggggcaggaaggctccgcaggaccggacccctagaccaccctgccccacctgccccttccccctttgctgtgacacttcttcatctcacccccccctgcccccctctaggagagctggctctgcagtgggggagggatgcagggacatttactgaaggagggacatggacaaaacaacattgaattcccagccccattggggagtgatctcttggacacagagcccccattcaaaatggggcagggcaagggtgggagtgtgcaaagccctgatctggagttacctgaggccatagctgccctattcacttctaagggccctgttttgagattgtttgttctaatttattttaagctaggtaaggctggggggagggtggggccgtggtcccctcagcctccatggggagggaagaagggggagctctttttttacgttgatttttttttttctactctgttttccctttttccttccgctccatttggggccctgggggtttcagtcatctccccatttggtcccctggactgtctttgttgattctaacttgtaaataaagaaaatattattc

SEQ ID NO: 42563 - DNA, 3013 bp, Artificial Sequence
  derived and/or modified sequence
ggaacggtggtggcggctcggctactgctcgtggaggggaatacaggctccctggggaagggaatgcagggttgctggggctgggcccagaagcagcagcaccagggaaaaggattcgaaaaccctctctcttgtatgagggctttgagagccccacaatggcttcggtgcctgctttgcaacttacccctgccaacccaccacccccggaggtgtccaatcccaaaaagccaggacgagttaccaaccagctgcaatacctacacaaggtagtgatgaaggctctgtggaaacatcagttcgcatggccattccggcagcctgtggatgctgtcaaactgggtctaccggattatcacaaaattataaaacagcctatggacatgggtactattaagaggagacttgaaaacaattattattgggctgcttcagagtgtatgcaagattttaataccatgttcaccaactgttacatttacaacaagcccactgatgatattgtcctaatggcacaaacgctggaaaagatattcctacagaaggttgcatcaatgccacaagaagaacaagagctggtagtgaccatccctaagaacagccacaagaagggggccaagttggcagcgctccagggcagtgttaccagtgcccatcaggtgcctgccgtctcttctgtgtcacacacagccctgtatactcctccacctgagatacctaccactgtcctcaacattccccacccatcagtcatttcctctccacttctcaagtccttgcactctgctggacccccgctccttgctgttactgcagctcctccagcccagccccttgccaagaaaaaaggcgtaaagcggaaagcagatactaccacccctacacctacagccatcttggctcctggttctccagctagccctcctgggagtcttgagcctaaggcagcacggcttccccctatgcgtagagagagtggtcgccccatcaagcccccacgcaaagacttgcctgactctcagcaacaacaccagagctctaagaaaggaaagctttcagaacagttaaaacattgcaatggcattttgaaggagttactctctaagaagcatgctgcctatgcttggcctttctataaaccagtggatgcttctgcacttggcctgcatgactaccatgacatcattaagcaccccatggacctcagcactgtcaagcggaagatggagaaccgtgattaccgggatgcacaggagtttgctgctgatgtacggcttatgttctccaactgctataagtacaatcccccagatcacgatgttgtggcaatggcacgaaagctacaggatgtatttgagttccgttatgccaagatgccagatgaaccactagaaccagggcctttaccagtctctactgccatgccccctggcttggccaaatcgtcttcagagtcctccagtgaggaaagtagcagtgagagctcctctgaggaagaggaggaggaagatgaggaggacgaggaggaagaagagagtgaaagctcagactcagaggaagaaagggctcatcgcttagcagaactacaggaacagcttcgggcagtacatgaacaactggctgctctgtcccagggtccaatatccaagcccaagaggaaaagagagaaaaaagagaaaaagaagaaacggaaggcagagaagcatcgaggccgagctggggccgatgaagatgacaaggggcctagggcaccccgcccacctcaacctaagaagtccaagaaagcaagtggcagtgggggtggcagtgctgctttaggcccttctggctttggaccttctggaggaagtggcaccaagctccccaaaaaggccacaaagacagccccacctgccctgcctacaggttatgattcagaggaggaggaagagagcaggcccatgagttacgatgagaagcggcagctgagcctggacatcaacaaattacctggggagaagctgggccgagttgtgcatataatccaagccagggagccctctttacgtgattcaaacccagaagagattgagattgattttgaaacactcaagccatccacacttagagagcttgagcgctatgtcctttcctgcctacgtaagaaaccccggaagccctacaccattaagaagcctgtgggaaagacaaaggaggaactggctttggagaaaaagcgggaattagaaaagcggttacaagatgtcagcggacagctcaattctactaaaaagccccccaagaaagcgaatgagaaaacagagtcatcctctgcacagcaagtagcagtgtcacgccttagcgcttccagctccagctcagattccagctcctcctcttcctcgtcgtcgtcttcagacaccagtgattcagactcaggctaaggggtcaggccagatggggcaggaaggctccgcaggaccggacccctagaccaccctgccccacctgccccttccccctttgctgtgacacttcttcatctcacccccccctgcccccctctaggagagctggctctgcagtgggggagggatgcagggacatttactgaaggagggacatggacaaaacaacattgaattcccagccccattggggagtgatctcttggacacagagcccccattcaaaatggggcagggcaagggtgggagtgtgcaaagccctgatctggagttacctgaggccatagctgccctattcacttctaagggccctgttttgagattgtttgttctaatttattttaagctaggtaaggctggggggagggtggggccgtggtcccctcagcctccatggggagggaagaagggggagctctttttttacgttgatttttttttttctactctgttttccctttttccttccgctccatttggggccctgggggtttcagtcatctccccatttggtcccctggactgtctttgttgattctaacttgtaaataaagaaaatattattc

SEQ ID NO: 42564 - DNA, 3013 bp, Artificial Sequence
  derived and/or modified sequence
ggaacggtggtggcggctcggctactgctcgtggaggggaatacaggctccctggggaagggaatgcagggttgctggggctgggcccagaagcagcagcaccagggaagaggattcgaaaaccctctctcttgtatgagggctttgagagccccacaatggcttcggtgcctgctttgcaacttacccctgccaacccaccacccccggaggtgtccaatcccaaaaagccaggacgagttaccaaccagctgcaatacctacacaaggtagtgatgaaggctctgtggaaacatcagttcgcatggccattccggcagcctgtggatgctgtcaaactgggtctaccggattatcacaaaattataaaacagcctatggacatgggtactattaagaggagacttgaaaacaattattattgggctgcttcagagtgtatgcaagattttaataccatgttcaccaactgttacatttacaacaagcccactgatgatattgtcctaatggcacaaacgctggaaaagatattcctacagaaggttgcatcaatgccacaagaagaacaagagctggtagtgaccatccctaagaacagccacaagaagggggccaagttggcagcgctccagggcagtgttaccagtgcccatcaggtgcctgccgtctcttctgtgtcacacacagccctctatactcctccacctgagatacctaccactgtcctcaacattccccacccatcagtcatttcctctccacttctcaagtccttgcactctgctggacccccgctccttgctgttactgcagctcctccagcccagccccttgccaagaaaaaaggcgtaaagcggaaagcagatactaccacccctacacctacagccatcttggctcctggttctccagctagccctcctgggagtcttgagcctaaggcagcacggcttccccctatgcgtagagagagtggtcgccccatcaagcccccacgcaaagacttgcctgactctcagcaacaacaccagagctctaagaaaggaaagctttcagaacagttaaaacattgcaatggcattttgaaggagttactctctaagaagcatgctgcctatgcttggcctttctataaaccagtggatgcttctgcacttggcctgcatgactaccatgacatcattaagcaccccatggacctcagcactgtcaagcggaagatggagaaccgtgattaccgggatgcacaggagtttgctgctgatgtacggcttatgttctccaactgctataagtacaatcccccagatcacgatgttgtggcaatggcacgaaagctacaggatgtatttgagttccgttatgccaagatgccagatgaaccactagaaccagggcctttaccagtctctactgccatgccccctggcttggccaaatcgtcttcagagtcctccagtgaggaaagtagcagtgagagctcctctgaggaagaggaggaggaagatgaggaggacgaggaggaagaagagagtgaaagctcagactcagaggaagaaagggctcatcgcttagcagaactacaggaacagcttcgggcagtacatgaacaactggctgctctgtcccagggtccaatatccaagcccaagaggaaaagagagaaaaaagagaaaaagaagaaacggaaggcagagaagcatcgaggccgagctggggccgatgaagatgacaaggggcctagggcaccccgcccacctcaacctaagaagtccaagaaagcaagtggcagtgggggtggcagtgctgctttaggcccttctggctttggaccttctggaggaagtggcaccaagctccccaaaaaggccacaaagacagccccacctgccctgcctacaggttatgattcagaggaggaggaagagagcaggcccatgagttacgatgagaagcggcagctgagcctggacatcaacaaattacctggggagaagctgggccgagttgtgcatataatccaagccagggagccctctttacgtgattcaaacccagaagagattgagattgattttgaaacactcaagccatccacacttagagagcttgagcgctatgtcctttcctgcctacgtaagaaaccccggaagccctacaccattaagaagcctgtgggaaagacaaaggaggaactggctttggagaaaaagcgggaattagaaaagcggttacaagatgtcagcggacagctcaattctactaaaaagccccccaagaaagcgaatgagaaaacagagtcatcctctgcacagcaagtagcagtgtcacgccttagcgcttccagctctagctcagattccagctcctcctcttcctcgtcgtcgtcttcagacaccagtgattcagactcaggctaaggggtcaggccagatggggcaggaaggctccgcaggaccggacccctagaccaccctgccccacctgccccttccccctttgctgtgacacttcttcatctcacccccccctgcccccctctaggagagctggctctgcagtgggggagggatgcagggacatttactgaaggagggacatggacaaaacaacattgaattcccagccccattggggagtgatctcttggacacagagcccccattcaaaatggggcagggcaagggtgggagtgtgcaaagccctgatctggagttacctgaggccatagctgccctattcacttctaagggccctgttttgagattgtttgttctaatttattttaagctaggtaaggctggggggagggtggggccgtggtcccctcagcctccatggggagggaagaagggggagctctttttttacgttgatttttttttttctactctgttttccctttttccttccgctccatttggggccctgggggtttcagtcatctccccatttggtcccctggactgtctttgttgattctaacttgtaaataaagaaaatattattc

SEQ ID NO: 42565 - DNA, 4893 bp, Artificial Sequence
  derived and/or modified sequence
ggaccgcgggataggaagctggggatatggacaagcagcagcgttatagcgctctgggtttcgggacataggcctgggccatgcggcccccttggccccttggcgcgacccccaggaacgttcggaaagctggtcctcgtggctgggggaaaggcggggggtgggggggaagcgggcacgtgaccccggtcagccaatctgggtgctgctgacgtggccgcgcggccccgatgctctccccacccccccagcccgttcgggaagggaggggctgggggctacgccccctcccccagcacggcttcgttttctgggggggggttgacaccccggattacataccccgtaccaagccgagggcaactttggaggccccctggaaggctttaggatccagattcttcgctgctgctgccttaccgccgagaaccaccacccgccaggcgtcttgcggccacacccctggcgggttcaggcaggctacgcccacgcgacccctcccgtttccctgctttggccaatggaggagctacgaatggcacgacctgctcgagcttggcagtctccagttgggctgtgcatggaagcttgggaagactttgttggaaggggaggcggggagagagtgctggaggctctggggcgatggcttccgcacctcttccaaccaccctctttccctggagtcggcggaccacagctcagccaattggcttggagatgtggcgggttgccacttccctgtgggtctctgcggcactcttctgcctggtgactgacaccttggaaatgaagtttatgacgtcatcgttgcggctggccaatagaaaaagctcccgcggagaggtgttccttccccttcgactcagcttcttcacccgcgtgagcgagcgcgcgcgcgcggagggggtggggaaaatctcaagcagggtggcgcgcatgagcggcgaagctcctcctccccgcctatatataaagggctggcgcggggctcggcggcgccatttcgtgctggagtggagcagcctctagaacgagctggaggattctgcctaccgatacagagccttcgagtcgtccggggccgccattacaatccacctccatccgcttggaaatggccttcgtcccggcctatgactggtcccagcgggcagtacagaccccctagaagcccctggagctcccctttttcgggccccgcccaatcctcggagtctgtccaccccctctactccgccctcaagaggatttcaaagatggaggcggcggctccctaaaccacttttcgtgttcatccgcctccatccgagatcgaaacgggacctcgtcggccccgtaggggcccgacaagaagagggaatccctgcagaccaacagcgggctatattgacgacggtgtctgagatcggggaccgtcttttgaagagtcagtccctccttagttgcccgcctcagctgaggccgccgccattttcttgctgtccgccgtctgcagagcgcgccaagctgcccggagctctccgagaggccccaaagagactgctttcgtgccggccaggcagggggtttgtcgcctggaggcccaagaggaacggcctccccccaacttagcgggttatgctggaccgggcggtgaggggaaccgaggccacccggactttccgcggctgagggcagcgccggttccttgcggtcaagatgctgcaaaacgtgactccccacaataagctccctggggaagggaatgcagggttgctggggctgggcccagaagcagcagcaccagggaagaggattcgaaaaccctctctcttgtatgagggctttgagagccccacaatggcttcggtgcctgctttgcaacttacccctgccaacccaccacccccggaggtgtccaatcccaaaaagccaggacgagttaccaaccagctgcaatacctacacaaggtagtgatgaaggctctgtggaaacatcagttcgcatggccattccggcagcctgtggatgctgtcaaactgggtctaccggattatcacaaaattataaaacagcctatggacatgggtactattaagaggagacttgaaaacaattattattgggctgcttcagagtgtatgcaagattttaataccatgttcaccaactgttacatttacaacaagcccactgatgatattgtcctaatggcacaaacgctggaaaagatattcctacagaaggttgcatcaatgccacaagaagaacaagagctggtagtgaccatccctaagaacagccacaagaagggggccaagttggcagcgctccagggcagtgttaccagtgcccatcaggtgcctgccgtctcttctgtgtcacacacagccctctatactcctccacctgagatacctaccactgtcctcaacattccccacccatcagtcatttcctctccacttctcaagtccttgcactctgctggacccccgctccttgctgttactgcagctcctccagcccagccccttgccaagaaaaaaggcgtaaagcggaaagcagatactaccacccctacacctacagccatcttggctcctggttctccagctagccctcctgggagtcttgagcctaaggcagcacggcttccccctatgcgtagagagagtggtcgccccatcaagcccccacgcaaagacttgcctgactctcagcaacaacaccagagctctaagaaaggaaagctttcagaacagttaaaacattgcaatggcattttgaaggagttactctctaagaagcatgctgcctatgcttggcctttctataaaccagtggatgcttctgcacttggcctgcatgactaccatgacatcattaagcaccccatggacctcagcactgtcaagcggaagatggagaaccgtgattaccgggatgcacaggagtttgctgctgatgtacggcttatgttctccaactgctataagtacaatcccccagatcacgatgttgtggcaatggcacgaaagctacaggatgtatttgagttccgttatgccaagatgccagatgaaccactagaaccagggcctttaccagtctctactgccatgccccctggcttggccaaatcgtcttcagagtcctccagtgaggaaagtagcagtgagagctcctctgaggaagaggaggaggaagatgaggaggacgaggaggaagaagagagtgaaagctcagactcagaggaagaaagggctcatcgcttagcagaactacaggaacagcttcgggcagtacatgaacaactggctgctctgtcccagggtccaatatccaagcccaagaggaaaagagagaaaaaagagaaaaagaagaaacggaaggcagagaagcatcgaggccgagctggggccgatgaagatgacaaggggcctagggcaccccgcccacctcaacctaagaagtccaagaaagcaagtggcagtgggggtggcagtgctgctttaggcccttctggctttggaccttctggaggaagtggcaccaagctccccaaaaaggccacaaagacagccccacctgccctgcctacaggttatgattcagaggaggaggaagagagcaggcccatgagttacgatgagaagcggcagctgagcctggacatcaacaaattacctggggagaagctgggccgagttgtgcatataatccaagccagggagccctctttacgtgattcaaacccagaagagattgagattgattttgaaacactcaagccatccacacttagagagcttgagcgctatgtcctttcctgcctacgtaagaaaccccggaagccctacaccattaagaagcctgtgggaaagacaaaggaggaactggctttggagaaaaagcgggaattagaaaagcggttacaagatgtcagcggacagctcaattctactaaaaagccccccaagaaagcgaatgagaaaacagagtcatcctctgcacagcaagtagcagtgtcacgccttagcgcttccagctctagctcagattccagctcctcctcttcctcgtcgtcgtcttcagacaccagtgattcagactcaggctaaggggtcaggccagatggggcaggaaggctccgcaggaccggacccctagaccaccctgccccacctgccccttccccctttgctgtgacacttcttcatctcacccccccctgcccccctctaggagagctggctctgcagtgggggagggatgcagggacatttactgaaggagggacatggacaaaacaacattgaattcccagccccattggggagtgatctcttggacacagagcccccattcaaaatggggcagggcaagggtgggagtgtgcaaagccctgatctggagttacctgaggccatagctgccctattcacttctaagggccctgttttgagattgtttgttctaatttattttaagctaggtaaggctggggggagggtggggccgtggtcccctcagcctccatggggagggaagaagggggagctctttttttacgttgatttttttttttctactctgttttccctttttccttccgctccatttggggccctgggggtttcagtcatctccccatttggtcccctggactgtctttgttgattctaacttgtaaataaagaaaatattattcaagttttgagttaccttaatatttgcttttgtagtgtttcaaaaggaacatcataagaattgtcttgataattttgagggaaatattactgcagtgagaaaaggcaatagctaacctataattggattgtcttaatttttaaaccagtaggcttttgctgtgtttttaataaagtaaatatgacttttgtaaattg

SEQ ID NO: 42566 - DNA, 2406 bp, Artificial Sequence
  derived and/or modified sequence
atgctgcagaacgtgaccccccacaacaagctgcccggcgagggcaacgccggcctgctgggcctgggccccgaggccgccgcccccggcaagagaatcagaaagcccagcctgctgtacgagggcttcgagagccccaccatggccagcgtgcccgccctgcagctgacccccgccaacccccccccccccgaggtgagcaaccccaagaagcccggcagagtgaccaaccagctgcagtacctgcacaaggtggtgatgaaggccctgtggaagcaccagttcgcctggcccttcagacagcccgtggacgccgtgaagctgggcctgcccgactaccacaagatcatcaagcagcccatggacatgggcaccatcaagagaagactggagaacaactactactgggccgccagcgagtgcatgcaggacttcaacaccatgttcaccaactgctacatctacaacaagcccaccgacgacatcgtgctgatggcccagaccctggagaagatcttcctgcagaaggtggccagcatgccccaggaggagcaggagctggtggtgaccatccccaagaacagccacaagaagggcgccaagctggccgccctgcagggcagcgtgaccagcgcccaccaggtgcccgccgtgagcagcgtgagccacaccgccctgtacacccccccccccgagatccccaccaccgtgctgaacatcccccaccccagcgtgatcagcagccccctgctgaagagcctgcacagcgccggcccccccctgctggccgtgaccgccgccccccccgcccagcccctggccaagaagaagggcgtgaagagaaaggccgacaccaccacccccacccccaccgccatcctggcccccggcagccccgccagcccccccggcagcctggagcccaaggccgccagactgccccccatgagaagagagagcggcagacccatcaagccccccagaaaggacctgcccgacagccagcagcagcaccagagcagcaagaagggcaagctgagcgagcagctgaagcactgcaacggcatcctgaaggagctgctgagcaagaagcacgccgcctacgcctggcccttctacaagcccgtggacgccagcgccctgggcctgcacgactaccacgacatcatcaagcaccccatggacctgagcaccgtgaagagaaagatggagaacagagactacagagacgcccaggagttcgccgccgacgtgagactgatgttcagcaactgctacaagtacaacccccccgaccacgacgtggtggccatggccagaaagctgcaggacgtgttcgagttcagatacgccaagatgcccgacgagcccctggagcccggccccctgcccgtgagcaccgccatgccccccggcctggccaagagcagcagcgagagcagcagcgaggagagcagcagcgagagcagcagcgaggaggaggaggaggaggacgaggaggacgaggaggaggaggagagcgagagcagcgacagcgaggaggagagagcccacagactggccgagctgcaggagcagctgagagccgtgcacgagcagctggccgccctgagccagggccccatcagcaagcccaagagaaagagagagaagaaggagaagaagaagaagagaaaggccgagaagcacagaggcagagccggcgccgacgaggacgacaagggccccagagcccccagacccccccagcccaagaagagcaagaaggccagcggcagcggcggcggcagcgccgccctgggccccagcggcttcggccccagcggcggcagcggcaccaagctgcccaagaaggccaccaagaccgccccccccgccctgcccaccggctacgacagcgaggaggaggaggagagcagacccatgagctacgacgagaagagacagctgagcctggacatcaacaagctgcccggcgagaagctgggcagagtggtgcacatcatccaggccagagagcccagcctgagagacagcaaccccgaggagatcgagatcgacttcgagaccctgaagcccagcaccctgagagagctggagagatacgtgctgagctgcctgagaaagaagcccagaaagccctacaccatcaagaagcccgtgggcaagaccaaggaggagctggccctggagaagaagagagagctggagaagagactgcaggacgtgagcggccagctgaacagcaccaagaagccccccaagaaggccaacgagaagaccgagagcagcagcgcccagcaggtggccgtgagcagactgagcgccagcagcagcagcagcgacagcagcagcagcagcagcagcagcagcagcagcgacaccagcgacagcgacagcggctag

SEQ ID NO: 42567 - DNA, 891 bp, Artificial Sequence
  derived and/or modified sequence
tgaagacccctgggcgtgcagcagcccggcgccagactgcccggcgagggcaacgccggcctgctgggcctgggccccgaggccgccgcccccggcaagagaatcagaaagcccagcctgctgtacgagggcttcgagagccccaccatggccagcgtgcccgccctgcagctgacccccgccaacccccccccccccgaggtgagcaaccccaagaagcccggcagagtgaccaaccagctgcagtacctgcacaaggtggtgatgaaggccctgtggaagcaccagttcgcctggcccttcagacagcccgtggacgccgtgaagctgggcctgcccgactaccacaagatcatcaagcagcccatggacatgggcaccatcaagagaagactggagaacaactactactgggccgccagcgagtgcatgcaggacttcaacaccatgttcaccaactgctacatctacaacaagcccaccgacgacatcgtgctgatggcccagaccctggagaagatcttcctgcagaaggtggccagcatgccccaggaggagcaggagctggtggtgaccatccccaagaacagccacaagaagggcgccaagctggccgccctgcagggcagcgtgaccagcgcccaccaggtgcccgccgtgagcagcgtgagccacaccgccctgtacacccccccccccgagatccccaccaccgtgctgaacatcccccaccccagcgtgatcagcagccccctgctgaagagcctgcacagcgccggcccccccctgctggccgtgaccgccgccccccccgcccagcccctggccaagaagaagggcgtgaagagaaaggccgacaccaccacccccacccccaccgccatcctgtag

SEQ ID NO: 42568 - DNA, 2406 bp, Artificial Sequence
  derived and/or modified sequence
atgctgcagaacgtgaccccccacaacaagctgcccggcgagggcaacgccggcctgctgggcctgggccccgaggccgccgcccccggcaagagaatcagaaagcccagcctgctgtacgagggcttcgagagccccaccatggccagcgtgcccgccctgcagctgacccccgccaacccccccccccccgaggtgagcaaccccaagaagcccggcagagtgaccaaccagctgcagtacctgcacaaggtggtgatgaaggccctgtggaagcaccagttcgcctggcccttcagacagcccgtggacgccgtgaagctgggcctgcccgactaccacaagatcatcaagcagcccatggacatgggcaccatcaagagaagactggagaacaactactactgggccgccagcgagtgcatgcaggacttcaacaccatgttcaccaactgctacatctacaacaagcccaccgacgacatcgtgctgatggcccagaccctggagaagatcttcctgcagaaggtggccagcatgccccaggaggagcaggagctggtggtgaccatccccaagaacagccacaagaagggcgccaagctggccgccctgcagggcagcgtgaccagcgcccaccaggtgcccgccgtgagcagcgtgagccacaccgccctgtacacccccccccccgagatccccaccaccgtgttcaacatcccccaccccagcgtgatcagcagccccctgctgaagagcctgcacagcgccggcccccccctgctggccgtgaccgccgccccccccgcccagcccctggccaagaagaagggcgtgaagagaaaggccgacaccaccacccccacccccaccgccatcctggcccccggcagccccgccagcccccccggcagcctggagcccaaggccgccagactgccccccatgagaagagagagcggcagacccatcaagccccccagaaaggacctgcccgacagccagcagcagcaccagagcagcaagaagggcaagctgagcgagcagctgaagcactgcaacggcatcctgaaggagctgctgagcaagaagcacgccgcctacgcctggcccttctacaagcccgtggacgccagcgccctgggcctgcacgactaccacgacatcatcaagcaccccatggacctgagcaccgtgaagagaaagatggagaacagagactacagagacgcccaggagttcgccgccgacgtgagactgatgttcagcaactgctacaagtacaacccccccgaccacgacgtggtggccatggccagaaagctgcaggacgtgttcgagttcagatacgccaagatgcccgacgagcccctggagcccggccccctgcccgtgagcaccgccatgccccccggcctggccaagagcagcagcgagagcagcagcgaggagagcagcagcgagagcagcagcgaggaggaggaggaggaggacgaggaggacgaggaggaggaggagagcgagagcagcgacagcgaggaggagagagcccacagactggccgagctgcaggagcagctgagagccgtgcacgagcagctggccgccctgagccagggccccatcagcaagcccaagagaaagagagagaagaaggagaagaagaagaagagaaaggccgagaagcacagaggcagagccggcgccgacgaggacgacaagggccccagagcccccagacccccccagcccaagaagagcaagaaggccagcggcagcggcggcggcagcgccgccctgggccccagcggcttcggccccagcggcggcagcggcaccaagctgcccaagaaggccaccaagaccgccccccccgccctgcccaccggctacgacagcgaggaggaggaggagagcagacccatgagctacgacgagaagagacagctgagcctggacatcaacaagctgcccggcgagaagctgggcagagtggtgcacatcatccaggccagagagcccagcctgagagacagcaaccccgaggagatcgagatcgacttcgagaccctgaagcccagcaccctgagagagctggagagatacgtgctgagctgcctgagaaagaagcccagaaagccctacaccatcaagaagcccgtgggcaagaccaaggaggagctggccctggagaagaagagagagctggagaagagactgcaggacgtgagcggccagctgaacagcaccaagaagccccccaagaaggccaacgagaagaccgagagcagcagcgcccagcaggtggccgtgagcagactgagcgccagcagcagcagcagcgacagcagcagcagcagcagcagcagcagcagcagcgacaccagcgacagcgacagcggctag

SEQ ID NO: 42569 - DNA, 1842 bp, Artificial Sequence
  derived and/or modified sequence
atgctgcagaacgtgaccccccacaacaagctgcccggcgagggcaacgccggcctgctgggcctgggccccgaggccgccgcccccggcaagagaatcagaaagcccagcctgctgtacgagggcttcgagagccccaccatggccagcgtgcccgccctgcagctgacccccgccaacccccccccccccgaggtgagcaaccccaagaagcccggcagagtgaccaaccagctgcagtacctgcacaaggtggtgatgaaggccctgtggaagcaccagttcgcctggcccttcagacagcccgtggacgccgtgaagctgggcctgcccgactaccacaagatcatcaagcagcccatggacatgggcaccatcaagagaagactggagaacaactactactgggccgccagcgagtgcatgcaggacttcaacaccatgttcaccaactgctacatctacaacaagcccaccgacgacatcgtgctgatggcccagaccctggagaagatcttcctgcagaaggtggccagcatgccccaggaggagcaggagctggtggtgaccatccccaagaacagccacaagaagggcgccaagctggccgccctgcagggcagcgtgaccagcgcccaccaggtgcccgccgtgagcagcgtgagccacaccgccctgtacacccccccccccgagatccccaccaccgtgctgaacatcccccaccccagcgtgatcagcagccccctgctgaagagcctgcacagcgccggcccccccctgctggccgtgaccgccgccccccccgcccagcccctggccaagaagaagggcgtgaagagaaaggccgacaccaccacccccacccccaccgccatcctggcccccggcagccccgccagcccccccggcagcctggagcccaaggccgccagactgccccccatgagaagagagagcggcagacccatcaagccccccagaaaggacctgcccgacagccagcagcagcaccagagcagcaagaagggcaagctgagcgagcagctgaagcactgcaacggcatcctgaaggagctgctgagcaagaagcacgccgcctacgcctggcccttctacaagcccgtggacgccagcgccctgggcctgcacgactaccacgacatcatcaagcaccccatggacctgagcaccgtgaagagaaagatggagaacagagactacagagacgcccaggagttcgccgccgacgtgagactgatgttcagcaactgctacaagtacaacccccccgaccacgacgtggtggccatggccagaaagctgcaggacgtgttcgagttcagatacgccaagatgcccgacgagcccctggagcccggccccctgcccgtgagcaccgccatgccccccggcctggccaagagcagcagcgagagcagcagcgaggagagcagcagcgagagcagcagcgaggaggaggaggaggaggacgaggaggacgaggaggaggaggagagcgagagcagcgacagcgaggaggagagagcccacagactggccgagctgcaggagcagctgagagccgtgcacgagcagctggccgccctgagccagggccccatcagcaagcccaagagaaagagagagaagaaggagaagaagaagaagagaaaggccgagaagcacagaggcagagccggcgccgacgaggacgacaagggccccagagcccccagacccccccagcccaagaagagcaagaaggccagcggcagcggcggcggcagcgccgccctgggccccagcggcttcggccccagcggcggcagcggcacctag

SEQ ID NO: 42570 - DNA, 2424 bp, Artificial Sequence
  derived and/or modified sequence
tgaaacggcggcggcggcagcgccaccgccagaggcggcgagtacagactgcccggcgagggcaacgccggcctgctgggcctgggccccgaggccgccgcccccggcaagagaatcagaaagcccagcctgctgtacgagggcttcgagagccccaccatggccagcgtgcccgccctgcagctgacccccgccaacccccccccccccgaggtgagcaaccccaagaagcccggcagagtgaccaaccagctgcagtacctgcacaaggtggtgatgaaggccctgtggaagcaccagttcgcctggcccttcagacagcccgtggacgccgtgaagctgggcctgcccgactaccacaagatcatcaagcagcccatggacatgggcaccatcaagagaagactggagaacaactactactgggccgccagcgagtgcatgcaggacttcaacaccatgttcaccaactgctacatctacaacaagcccaccgacgacatcgtgctgatggcccagaccctggagaagatcttcctgcagaaggtggccagcatgccccaggaggagcaggagctggtggtgaccatccccaagaacagccacaagaagggcgccaagctggccgccctgcagggcagcgtgaccagcgcccaccaggtgcccgccgtgagcagcgtgagccacaccgccctgtacacccccccccccgagatccccaccaccgtgttcaacatcccccaccccagcgtgatcagcagccccctgctgaagagcctgcacagcgccggcccccccctgctggccgtgaccgccgccccccccgcccagcccctggccaagaagaagggcgtgaagagaaaggccgacaccaccacccccacccccaccgccatcctggcccccggcagccccgccagcccccccggcagcctggagcccaaggccgccagactgccccccatgagaagagagagcggcagacccatcaagccccccagaaaggacctgcccgacagccagcagcagcaccagagcagcaagaagggcaagctgagcgagcagctgaagcactgcaacggcatcctgaaggagctgctgagcaagaagcacgccgcctacgcctggcccttctacaagcccgtggacgccagcgccctgggcctgcacgactaccacgacatcatcaagcaccccatggacctgagcaccgtgaagagaaagatggagaacagagactacagagacgcccaggagttcgccgccgacgtgagactgatgttcagcaactgctacaagtacaacccccccgaccacgacgtggtggccatggccagaaagctgcaggacgtgttcgagttcagatacgccaagatgcccgacgagcccctggagcccggccccctgcccgtgagcaccgccatgccccccggcctggccaagagcagcagcgagagcagcagcgaggagagcagcagcgagagcagcagcgaggaggaggaggaggaggacgaggaggacgaggaggaggaggagagcgagagcagcgacagcgaggaggagagagcccacagactggccgagctgcaggagcagctgagagccgtgcacgagcagctggccgccctgagccagggccccatcagcaagcccaagagaaagagagagaagaaggagaagaagaagaagagaaaggccgagaagcacagaggcagagccggcgccgacgaggacgacaagggccccagagcccccagacccccccagcccaagaagagcaagaaggccagcggcagcggcggcggcagcgccgccctgggccccagcggcttcggccccagcggcggcagcggcaccaagctgcccaagaaggccaccaagaccgccccccccgccctgcccaccggctacgacagcgaggaggaggaggagagcagacccatgagctacgacgagaagagacagctgagcctggacatcaacaagctgcccggcgagaagctgggcagagtggtgcacatcatccaggccagagagcccagcctgagagacagcaaccccgaggagatcgagatcgacttcgagaccctgaagcccagcaccctgagagagctggagagatacgtgctgagctgcctgagaaagaagcccagaaagccctacaccatcaagaagcccgtgggcaagaccaaggaggagctggccctggagaagaagagagagctggagaagagactgcaggacgtgagcggccagctgaacagcaccaagaagccccccaagaaggccaacgagaagaccgagagcagcagcgcccagcaggtggccgtgagcagactgagcgccagcagcagcagcagcgacagcagcagcagcagcagcagcagcagcagcagcgacaccagcgacagcgacagcggctag

SEQ ID NO: 42571 - DNA, 891 bp, Artificial Sequence
  derived and/or modified sequence
tgaagacccctgggcgtgcagcagcccggcgccagactgcccggcgagggcaacgccggcctgctgggcctgggccccgaggccgccgcccccggcaagagaatcagaaagcccagcctgctgtacgagggcttcgagagccccaccatggccagcgtgcccgccctgcagctgacccccgccaacccccccccccccgaggtgagcaaccccaagaagcccggcagagtgaccaaccagctgcagtacctgcacaaggtggtgatgaaggccctgtggaagcaccagttcgcctggcccttcagacagcccgtggacgccgtgaagctgggcctgcccgactaccacaagatcatcaagcagcccatggacatgggcaccatcaagagaagactggagaacaactactactgggccgccagcgagtgcatgcaggacttcaacaccatgttcaccaactgctacatctacaacaagcccaccgacgacatcgtgctgatggcccagaccctggagaagatcttcctgcagaaggtggccagcatgccccaggaggagcaggagctggtggtgaccatccccaagaacagccacaagaagggcgccaagctggccgccctgcagggcagcgtgaccagcgcccaccaggtgcccgccgtgagcagcgtgagccacaccgccctgtacacccccccccccgagatccccaccaccgtgttcaacatcccccaccccagcgtgatcagcagccccctgctgaagagcctgcacagcgccggcccccccctgctggccgtgaccgccgccccccccgcccagcccctggccaagaagaagggcgtgaagagaaaggccgacaccaccacccccacccccaccgccatcctgtag

SEQ ID NO: 42572 - DNA, 2424 bp, Artificial Sequence
  derived and/or modified sequence
tgaaacggcggcggcggcagcgccaccgccagaggcggcgagtacagactgcccggcgagggcaacgccggcctgctgggcctgggccccgaggccgccgcccccggcaagagaatcagaaagcccagcctgctgtacgagggcttcgagagccccaccatggccagcgtgcccgccctgcagctgacccccgccaacccccccccccccgaggtgagcaaccccaagaagcccggcagagtgaccaaccagctgcagtacctgcacaaggtggtgatgaaggccctgtggaagcaccagttcgcctggcccttcagacagcccgtggacgccgtgaagctgggcctgcccgactaccacaagatcatcaagcagcccatggacatgggcaccatcaagagaagactggagaacaactactactgggccgccagcgagtgcatgcaggacttcaacaccatgttcaccaactgctacatctacaacaagcccaccgacgacatcgtgctgatggcccagaccctggagaagatcttcctgcagaaggtggccagcatgccccaggaggagcaggagctggtggtgaccatccccaagaacagccacaagaagggcgccaagctggccgccctgcagggcagcgtgaccagcgcccaccaggtgcccgccgtgagcagcgtgagccacaccgccctgtacacccccccccccgagatccccaccaccgtgctgaacatcccccaccccagcgtgatcagcagccccctgctgaagagcctgcacagcgccggcccccccctgctggccgtgaccgccgccccccccgcccagcccctggccaagaagaagggcgtgaagagaaaggccgacaccaccacccccacccccaccgccatcctggcccccggcagccccgccagcccccccggcagcctggagcccaaggccgccagactgccccccatgagaagagagagcggcagacccatcaagccccccagaaaggacctgcccgacagccagcagcagcaccagagcagcaagaagggcaagctgagcgagcagctgaagcactgcaacggcatcctgaaggagctgctgagcaagaagcacgccgcctacgcctggcccttctacaagcccgtggacgccagcgccctgggcctgcacgactaccacgacatcatcaagcaccccatggacctgagcaccgtgaagagaaagatggagaacagagactacagagacgcccaggagttcgccgccgacgtgagactgatgttcagcaactgctacaagtacaacccccccgaccacgacgtggtggccatggccagaaagctgcaggacgtgttcgagttcagatacgccaagatgcccgacgagcccctggagcccggccccctgcccgtgagcaccgccatgccccccggcctggccaagagcagcagcgagagcagcagcgaggagagcagcagcgagagcagcagcgaggaggaggaggaggaggacgaggaggacgaggaggaggaggagagcgagagcagcgacagcgaggaggagagagcccacagactggccgagctgcaggagcagctgagagccgtgcacgagcagctggccgccctgagccagggccccatcagcaagcccaagagaaagagagagaagaaggagaagaagaagaagagaaaggccgagaagcacagaggcagagccggcgccgacgaggacgacaagggccccagagcccccagacccccccagcccaagaagagcaagaaggccagcggcagcggcggcggcagcgccgccctgggccccagcggcttcggccccagcggcggcagcggcaccaagctgcccaagaaggccaccaagaccgccccccccgccctgcccaccggctacgacagcgaggaggaggaggagagcagacccatgagctacgacgagaagagacagctgagcctggacatcaacaagctgcccggcgagaagctgggcagagtggtgcacatcatccaggccagagagcccagcctgagagacagcaaccccgaggagatcgagatcgacttcgagaccctgaagcccagcaccctgagagagctggagagatacgtgctgagctgcctgagaaagaagcccagaaagccctacaccatcaagaagcccgtgggcaagaccaaggaggagctggccctggagaagaagagagagctggagaagagactgcaggacgtgagcggccagctgaacagcaccaagaagccccccaagaaggccaacgagaagaccgagagcagcagcgcccagcaggtggccgtgagcagactgagcgccagcagcagcagcagcgacagcagcagcagcagcagcagcagcagcagcagcgacaccagcgacagcgacagcggctag

SEQ ID NO: 42573 - DNA, 1860 bp, Artificial Sequence
  derived and/or modified sequence
tgaaacggcggcggcggcagcgccaccgccagaggcggcgagtacagactgcccggcgagggcaacgccggcctgctgggcctgggccccgaggccgccgcccccggcaagagaatcagaaagcccagcctgctgtacgagggcttcgagagccccaccatggccagcgtgcccgccctgcagctgacccccgccaacccccccccccccgaggtgagcaaccccaagaagcccggcagagtgaccaaccagctgcagtacctgcacaaggtggtgatgaaggccctgtggaagcaccagttcgcctggcccttcagacagcccgtggacgccgtgaagctgggcctgcccgactaccacaagatcatcaagcagcccatggacatgggcaccatcaagagaagactggagaacaactactactgggccgccagcgagtgcatgcaggacttcaacaccatgttcaccaactgctacatctacaacaagcccaccgacgacatcgtgctgatggcccagaccctggagaagatcttcctgcagaaggtggccagcatgccccaggaggagcaggagctggtggtgaccatccccaagaacagccacaagaagggcgccaagctggccgccctgcagggcagcgtgaccagcgcccaccaggtgcccgccgtgagcagcgtgagccacaccgccctgtacacccccccccccgagatccccaccaccgtgctgaacatcccccaccccagcgtgatcagcagccccctgctgaagagcctgcacagcgccggcccccccctgctggccgtgaccgccgccccccccgcccagcccctggccaagaagaagggcgtgaagagaaaggccgacaccaccacccccacccccaccgccatcctggcccccggcagccccgccagcccccccggcagcctggagcccaaggccgccagactgccccccatgagaagagagagcggcagacccatcaagccccccagaaaggacctgcccgacagccagcagcagcaccagagcagcaagaagggcaagctgagcgagcagctgaagcactgcaacggcatcctgaaggagctgctgagcaagaagcacgccgcctacgcctggcccttctacaagcccgtggacgccagcgccctgggcctgcacgactaccacgacatcatcaagcaccccatggacctgagcaccgtgaagagaaagatggagaacagagactacagagacgcccaggagttcgccgccgacgtgagactgatgttcagcaactgctacaagtacaacccccccgaccacgacgtggtggccatggccagaaagctgcaggacgtgttcgagttcagatacgccaagatgcccgacgagcccctggagcccggccccctgcccgtgagcaccgccatgccccccggcctggccaagagcagcagcgagagcagcagcgaggagagcagcagcgagagcagcagcgaggaggaggaggaggaggacgaggaggacgaggaggaggaggagagcgagagcagcgacagcgaggaggagagagcccacagactggccgagctgcaggagcagctgagagccgtgcacgagcagctggccgccctgagccagggccccatcagcaagcccaagagaaagagagagaagaaggagaagaagaagaagagaaaggccgagaagcacagaggcagagccggcgccgacgaggacgacaagggccccagagcccccagacccccccagcccaagaagagcaagaaggccagcggcagcggcggcggcagcgccgccctgggccccagcggcttcggccccagcggcggcagcggcacctag

SEQ ID NO: 42574 - protein, 925 aa, Artificial Sequence
  derived and/or modified sequence
MPGEATETVPATEQELPQPQAETAVLPMSSALSVTAALGQPGPTLPPPCSPAPQQCPLSAANQASPFPSPSTIASTPLEVPFPQSSSGTALPLGTAPEAPTFLPNLIGPPISPAALALASPMIAPTLKGTPSSSAPLALVALAPHSVQKSSAFPPNLLTSPPSVAVAESGSVITLSAPIAPSEPKTNLNKVPSEVVPNPKGTPSPPCIVSTVPYHCVTPMASIQSGVASLPQTTPTTTLAIASPQVKDTTISSVLISPQNPGSLSLKGPVSPPAALSLSTQSLPVVTSSQKTAGPNTPPDFPISLGSHLAPLHQSSFGSVQLLGQTGPSALSDPTVKTISVDHSSTGASYPSQRSVIPPLPSRNEVVPATVAAFPVVAPSVDKGPSTISSITCSPSGSLNVATSFSLSPTTSLILKSSPNATYHYPLVAQMPVSSVGTTPLVVTNPCTIAAAPTTTFEVATCVSPPMSSGPISNIEPTSPAALVMAPVAPKEPSTQVATTLRIPVSPPLPDPEDLKNLPSSVLVKFPTQKDLQTVPASLEGAPFSPAQAGLTTKKDPTVLPLVQAAPKNSPSFQSTSSSPEIPLSPEATLAKKSLGEPLPIVAAFPLESADPAGVAPTTAKAAAFEKVLPKPESASVSAAPSPPVSLPLAPSPVPTLPPKQQFLPSSPGLVLESPSKPLAPADEDELLPLIPPEPISGGVPFQSVLVNMPTPKSAGIPVPTPSAKQPVTKNNKGSGTESDSDESVPELEEQDSTQATTQQAQLAAAAEIDEEPVSKAKQSRSEKKARKAMSKLGLRQVTGVTRVTIRKSKNILFVITKPDVYKSPASDTYIVFGEAKIEDLSQQAQLAAAEKFKVQGEAVSNIQENTQTPTVQEESEEEEVDETGVEVKDIELVMSQANVSRAKAVRALKNNSNDIVNAIMELTM

SEQ ID NO: 42575 - DNA, 2778 bp, Artificial Sequence
  derived and/or modified sequence
atgcccggggaagcaacagagaccgtgccagcaacagagcaggaactgcctcaaccacaagccgagacagcggttttaccaatgagcagcgctctgagtgtcactgcagcactggggcagcctggtcccacactaccaccgccatgctcccctgccccccagcaatgccctctgtcagccgcgaaccaggccagtccgttcccatcccctagcacaattgcctctacccctttggaagtaccattcccacagagttcctctggaaccgccctccccctggggactgcccctgaggcccctacctttctgcccaacttgatcggtcctcctatatccccagccgcactggcccttgcatcgcctatgattgctcctactctaaagggaaccccaagctcctccgccccgttggctctcgtagcgctcgccccacattcggtgcagaaatctagcgcattcccccccaatctactcacgtccccaccatccgtcgccgtggcggagagtgggagtgttattactctaagtgcccccatcgccccatctgaaccaaagactaacctgaataaggtgccctccgaggttgtccccaatccgaaagggacgccatccccaccttgtatagtgagcacggtaccctatcactgcgtgaccccaatggccagtatccagtccggagtggcttccctgccacagactactcccactaccacgctggctatcgcgagtccccaagtgaaggataccacaatctcttccgttctcatcagcccgcagaaccccggcagtctgagcctgaagggaccggtctcaccaccagcagccctttcactgtctactcaatcactgcctgttgtgactagctcccaaaagacagccggcccgaacaccccacctgactttcctatttccctggggtctcacctagcccctttacatcagtcctccttcggttctgtccagctgcttggccagacgggtcctagcgccctctcagacccaacagtgaagacaattagtgttgaccattcatctactggagcctcctacccgtcccagaggagcgtcataccccctctgccgtcacgcaatgaggtcgtacctgccaccgttgcggcattcccagtggtagcgccctcagtggataagggccctagcacaatttcatcaatcacttgtagccctagcggcagcctgaacgtggccacaagtttctcactgtcccccactacatctctgatactgaaaagttccccgaacgccacctatcactacccccttgtggcccagatgccagtcagctccgtgggtacaacaccgctggtggtgaccaatccatgtacgatcgcggctgctccaaccaccacctttgaggtcgccacatgtgtgagcccacccatgtccagcggaccaattagtaacatcgagcctacatcgcctgctgctttagtgatggcgccggttgcgccaaaggagcccagcacccaggtcgccacaacattgagaattccagtttcccccccattgccagatcccgaggatctgaaaaatttaccatcatccgtgctcgtcaaattccccacccagaaggatctgcagaccgtccccgccagtctggagggagctcctttctcccccgctcaagccggtctgactacgaaaaaagatcccacggtgctcccactggtccaggctgctcccaagaattcccccagctttcaaagcacgtcaagttcacccgagatcccgctgtcacctgaagcaacactggctaagaaatcactaggggagccattgcccatagttgccgcttttcctctcgagtcagccgatcctgccggggttgccccgaccaccgcaaaggccgcagcctttgagaaggtcctgccaaaacctgagtcagcaagcgtgagtgcggctccctccccgccagtgtccctgcccctggccccctcacctgtgccaactctgcctccgaagcagcagtttctgccctcttctccaggattagttctcgagagtccaagtaagccgctggcccctgctgacgaggatgagttgctccctctgattccccctgagccaattagcggcggtgtcccttttcaatcagtcctggtcaacatgcccaccccaaaaagtgccgggattcctgttccaactcctagcgcaaagcaacctgtgactaagaataacaagggatcaggaacggaatccgacagcgatgaatccgtgcctgaactggaggaacaggatagcacgcaggcgaccacgcaacaggcccaactagctgcagcagccgaaattgacgaggagcctgtgagcaaagcaaaacagagccgctcagaaaaaaaggccagaaaagctatgtcaaagctgggcttgagacaagtgactggggtgactcgagtgaccatccgaaaatccaagaatatcctgtttgttatcacgaagcctgacgtttataaatcgccagccagcgacacctatatcgtctttggcgaagctaaaatagaggatctttcacaacaggcccagttggcagcagctgagaaattcaaagtgcagggggaggcggtgagcaacattcaagagaatactcagacacctacagtgcaggaggagagcgaagaagaagaggtggatgagactggcgtcgaagtgaaggatatcgagctggtgatgtcccaggcaaacgtgagcagggcaaaagctgtgagggccctgaaaaacaacagtaatgatatcgtaaatgctataatggaacttaccatgtag

SEQ ID NO: 42576 - DNA, 2778 bp, Artificial Sequence
  derived and/or modified sequence
atgcctggagaggccacagagaccgtgcctgccacagagcaggagctgccccagccccaggccgagacagctgtgctgcccatgagcagcgccctgtctgtgacagctgccctgggccagcccggccccaccctgcccccaccctgcagccctgccccccagcagtgccccctgtctgctgccaaccaggccagccccttccccagccccagcaccatcgccagcacccccctggaggtgcccttcccccagagcagcagcggcacagccctgcccctgggcacagcccctgaggcccccaccttcctgcccaacctgattggcccccccatcagccctgctgccctggccctggccagccccatgattgcccccaccctgaagggcacccccagcagcagcgcccccctggccctggtggccctggccccccacagcgtgcagaagagcagcgccttcccccccaacctgctgaccagccccccatctgtggccgtggccgagagcggcagcgtcatcaccctgagcgcccccatcgcccccagcgagcccaagaccaacctgaacaaggtgcccagcgaggtggtgcccaaccccaagggcacccccagccccccctgcatcgtgtccacagtgccctaccactgtgtgacccccatggccagcatccagagcggcgtggccagcctgccccagaccacccccaccaccaccctggccatcgccagcccccaggtgaaggacaccaccatcagctctgtgctgatcagcccccagaaccctggcagcctgagcctgaagggccctgtgagccccccagctgccctgagcctgagcacccagagcctgcctgtggtgaccagcagccagaagacagctggccccaacaccccaccagacttccccatcagcctgggcagccacctggcccccctgcaccagagcagctttggatctgtgcagctgctgggccagacaggccccagcgccctgagtgaccccaccgtgaagaccatctctgtggaccacagcagcactggagccagctaccccagccagaggagcgtcatcccccccctgcccagcagaaatgaggtggtgcctgccaccgtggccgccttccctgtggtggcccccagcgtggacaagggccccagcaccatcagcagcatcacctgcagccccagcggcagcctgaatgtggccaccagcttcagcctgagccccaccaccagcctcatcctgaagagcagccccaatgccacctaccactaccccctggtggcccagatgcctgtgtcctctgtgggcaccacccccctggtggtgaccaacccctgcaccatcgctgctgcccccaccaccacctttgaggtggccacctgtgtgtccccacccatgagcagcggccccatcagcaacatcgagcccaccagccctgctgccctggtgatggcccctgtggcccccaaggagcccagcacccaggtggccaccaccctgcgcatccctgtgtccccacccctgcctgaccctgaggacctgaagaacctgcccagctctgtgctggtgaagttccccacccagaaggacctgcagacagtgcctgccagcctggagggcgcccccttcagccctgcccaggccggcctgaccaccaagaaggaccccaccgtgctgcccctggtgcaggccgcccccaagaacagccccagcttccagagcaccagcagcagccctgagatccccctgagccctgaggccaccctggccaagaagagcctgggggagcccctgcccatcgtggccgccttccccctggagagcgctgaccctgctggggtggcccccaccacagccaaggctgctgcctttgagaaggtgctgcccaagccagagagcgcctctgtgtctgctgcccccagcccccctgtgtccctgcccctggcccccagccctgtgcccaccctgccccccaagcagcagttcctgcccagcagccctggcctggtgctggagagccccagcaagcccctggccccagcagatgaagatgagctgctgcccctcatccccccagagcccatctctggaggagtgcccttccagagcgtgctggtgaacatgcccacccccaagtctgctggcatccctgtgcccaccccatctgccaagcagcctgtgaccaagaacaacaagggcagcggcacagaaagtgacagtgatgagagcgtgcctgagctggaggagcaggacagcacccaggccaccacccagcaggcccagctggccgctgctgctgagattgatgaggagcctgtgtccaaggccaagcagagccgctctgagaagaaggccaggaaggccatgagcaagctgggcctgcggcaggtgactggagtgaccagggtgaccatcaggaagagcaagaacatcctcttcgtcatcaccaagccagatgtgtacaagagccctgccagtgacacctacatcgtgtttggagaggccaagattgaggacctgagccagcaggcccagctggccgctgctgagaagttcaaggtgcagggcgaggccgtgagcaacatccaggagaacacccagacccccaccgtgcaggaggagagcgaggaggaggaggtggatgagaccggggtggaggtgaaggacatcgagctggtgatgagccaggccaacgtgtcccgggccaaggctgtgcgggccctgaagaacaacagcaatgacatcgtgaatgccatcatggagctgaccatgtag

SEQ ID NO: 42577 - DNA, 2922 bp, Artificial Sequence
  derived and/or modified sequence
ctttctgccgccatcttggttccgcgttccctgcacaaaatgcccggcgaagccacagaaaccgtccctgctacagagcaggagttgccgcagccccaggctgagacagctgtgctacctatgtcttcagccttgagtgtcactgctgccttagggcagcctggacctaccctcccccctccttgctctcctgccccacaacagtgccctctctcagctgctaaccaggcttccccattcccttccccctctactattgcctcgacccctttagaagttccttttccccagtcatcctctggaacagccctacctttgggaactgcccctgaagccccaaccttcctaccaaacctaatagggcctcccatctccccagctgccttagctctagcctctcccatgatagctccaactctgaaagggaccccttcctcttcagctcccttagctctggttgccctggctccccactcagttcagaagagttctgcttttccacctaaccttcttacttcacctccttcagtggctgtagctgagtcagggtcagtgataactctgtcagctcccattgctccctcagaaccaaagactaatcttaataaagttccctctgaggtagtccctaatccaaaaggcacccccagccctccatgtatagtcagtactgttccttaccactgtgtgactcccatggcctctattcaatctggagtggcctcccttcctcagacaacacccacaactaccctagccatcgcttcccctcaagtcaaagataccaccatttcctcagttctgatttctccacaaaacccaggaagcctcagcctgaaggggcctgttagtccacctgctgccttatctctttcaactcagtctcttcctgtggtgacctcttctcaaaagactgcgggtcccaacacccccccagattttcccatttctctgggctctcatcttgcacctttacatcagagttcttttggttctgtccaacttttaggtcaaacaggtcctagtgctttgtcagaccctacagtgaagaccatttctgtagatcattcttccacaggggcctcttatccttctcagagatctgtaattcctccccttccttccagaaatgaggtagttcctgctactgtggctgcctttccagtggtggctccatctgttgacaaaggtccctctaccatctctagcataacctgcagcccttctggctccttaaatgtagctacctctttttcattatctcctacaacctctctcattctcaaaagctctcctaatgccacttatcattatcctttagtggcccaaatgcccgtttcttctgttggaaccaccccacttgtggtgactaacccctgtacaattgctgcagcacctactactacctttgaggtagctacttgtgtttctcctccaatgtcatcaggtcccataagtaacatagaaccaacttcccctgctgccttggttatggcacctgtggctcccaaagagccttctactcaagtagcaaccactctgaggataccagtctctcctcctctgccagaccctgaagacctcaaaaatctccccagttcagtattggttaaatttccaacacaaaaagacctccaaactgtacctgcctctcttgaaggagcccctttctctccagcccaagcaggactcaccaccaagaaagaccctactgtattaccgttagtccaggcagcccctaaaaattccccttctttccaaagtacatcctcttctccagagatacctctttctcctgaagccaccctagcaaagaaaagccttggggagcctctccctatagtggctgcatttcctttggaaagtgctgaccctgccggggtggctcccacaactgccaaagcagctgcctttgagaaggtccttcctaaacctgaatcagcatctgtctctgcagcaccctccccaccagtctctctgcctcttgctccctccccagttcccactctgcctcctaaacagcaatttctgccgtcctctcctgggctggtgttggaatcaccctctaaaccccttgcccctgctgatgaggatgagctgctgcctctgattcccccggaaccaatctctgggggagtgcctttccagtcggtcctcgtcaacatgcccacccctaaatctgctggaatccctgtcccaaccccctctgccaagcaacctgttacgaagaacaacaaggggtctggaacagaatctgacagtgatgaatcagtaccagagcttgaagaacaggattccacccaggcaaccacacaacaagcccagctggcggcagcagctgaaattgatgaagaaccagtcagtaaagcaaaacagagtcggagtgaaaagaaggcacggaaggctatgtccaaactgggtcttcggcaggttacaggagttactagagtcactatccggaaatctaagaatatcctctttgtcatcacaaaaccagatgtctacaagagccctgcttcagatacttacatagtttttggggaagccaagatcgaagatttatcccagcaagcacaactagcagctgctgagaaattcaaagttcaaggtgaagctgtctcaaacattcaagaaaacacacagactccaactgtacaagaggagagtgaagaggaagaggtcgatgaaacaggtgtagaagttaaggacattgaattggtcatgtcacaagcaaatgtgtcgagagcaaaggcagtccgagccctgaagaacaacagtaatgatattgtaaatgcgattatggaattaacaatgtaaccatatggaagcaactttttttggtgtctcaaaggagtaactgcagcttggtttgaaatttgtactgtttctatcataaataaagttatggcttcttgttggatg

SEQ ID NO: 42578 - DNA, 2778 bp, Artificial Sequence
  derived and/or modified sequence
atgcccggcgaggccaccgagaccgtgcccgccaccgagcaggagttgccccagccccaagccgagacagccgtgctcccgatgagctctgcattaagcgtgactgcagcgttaggacaacccggccccaccctacctccaccctgttctccagccccccagcagtgccccctctccgccgcaaaccaggcctcgcccttcccaagtcccagcacaattgctagcaccccgctggaagtcccctttccacagagcagttccgggactgccctccctcttggtaccgcacccgaagcccctacatttctgccaaacctgattggaccaccaatctccccagctgcactcgccttagcttctcccatgatcgcccccaccctcaaaggaactcccagcagtagtgcgccactggctttggtagcattagctccacactccgtgcaaaaatcctcggcgttcccgcctaatcttttgacttctcctccttccgtagctgtcgcggagtctggatcagtcatcacactgagcgccccaatagcgccctctgagcccaagactaacctcaacaaggtcccaagcgaagtggttcccaatcccaaggggacaccctctcctccctgcattgtctcaacagtcccctaccactgcgttacccctatggcttcgatccagagcggagtggcctccctaccacagactacccccaccacgacactggccatagcaagcccccaagtcaaagacaccacaatctcatctgtcctcattagtccccagaatccggggtcactgtcactgaaggggcctgtatccccacctgcagccctctctctttccacacagtcacttcctgtcgtcacctcctcccagaagactgccggaccaaatacaccacccgatttccctatttctctgggatcccatctagctccactccaccagagctctttcggttccgtccaactgctcgggcaaacagggccttccgccctgtctgatccgacagtaaaaaccatttccgtcgaccatagcagcaccggtgcctcttacccttcccagagaagcgtgatccctcccctgccctctagaaacgaagtggtccccgccacagtcgctgcgtttcctgttgttgcccccagcgtggacaaaggaccaagtacaatcagtagtatcacatgttctccctccggctctctgaacgttgctacctccttctcactgtcccctaccacctctctcatcttgaaatcttctccaaatgccacctatcactatcctctggtggcccagatgcccgtttcaagcgtggggaccactcccctagttgtgacaaacccctgtacaatcgccgcggccccaacaaccaccttcgaagtcgctacatgtgtctcaccccccatgtcctctggcccaattagcaatatcgagcccacaagccccgccgctcttgtcatggctccagtggcccctaaggagcccagcacccaagtggctaccacccttagaatccctgtaagcccacctcttccagaccctgaggacttgaagaatctgccctcctctgtgctcgtgaagttccctacccagaaagaccttcagacggtgcctgccagtctcgagggagcgcccttctctccagcacaggccgggcttacaaccaagaaagaccccacagtcctgccattagtccaggctgcccccaagaattcccccagcttccagagcaccagctcttcacctgaaataccgctttctccagaagccaccctcgcaaagaagtcactgggtgagccactgccaattgtggccgcgtttccactggagagcgctgatcctgcgggcgtagctcccactactgcgaaggctgctgctttcgaaaaggtattgccaaagccagagtctgctagtgtctcggcagcccccagcccaccagtctcattgcctctggcacctagccctgtcccaacccttcctcccaaacagcagttcctgccgtcgagccccggtctagtactggaatcccccagcaagcctctggcacccgccgatgaggacgaattgctccctctgatccccccagaacccatcagcggcggtgtaccattccagagcgtgctggtcaatatgcctactcctaaatctgctgggatccccgtgccaactcctagcgccaagcagcctgtgactaagaataacaaggggtcagggacagagagcgactcagacgagtccgtgccagaactggaagaacaggattcaacccaagccacaacccagcaggcacagctcgctgcagccgccgagatagacgaggagccggtgtctaaagcgaagcagtctcggtccgagaagaaggctcgaaaggctatgtccaagctagggttgagacaggtgacaggcgtcacccgggttacaataaggaaatccaagaacattctgtttgtcataactaaacccgacgtgtacaagagtcctgcctctgacacatatatcgtctttggcgaggctaaaattgaagacctgtcccaacaagcccaactggccgccgcggagaagtttaaggtgcagggggaagccgtttcgaatatccaggagaacacccagaccccaactgtgcaggaggaaagcgaagaggaagaagtggatgagaccggggtcgaagtgaaagatatcgagcttgtaatgtctcaggccaatgtaagtagagcgaaggcagtaagggcgctgaagaataatagcaatgacatcgtgaatgctattatggaattgactatgtag

SEQ ID NO: 42579 - DNA, 2778 bp, Artificial Sequence
  derived and/or modified sequence
atgcccggagaggccactgagaccgtcccagcaactgagcaggaactgccgcaacctcaggccgagactgcagtgctccccatgagcagtgctcttagcgtcacagcagccctcggccagcctggaccaactctacctcctccatgttcacccgctccccaacagtgccctttgtccgcagccaaccaggcctcacctttcccgtcacctagcacaattgctagcaccccgctcgaggtgcccttcccacagagctcttccgggacagctttacctttggggacggcgcctgaagctcctacgttcctacctaatttgataggccctccgattagcccagcagccctcgccctcgcttcacccatgattgccccaaccctaaaaggaaccccctcctccagtgcgcctctggctctggtggccctggcacctcattccgtgcagaagtcctcagcttttcctcccaatcttctaacctccccccctagtgtggccgttgctgagtcagggagcgtcattacactcagtgcccctatcgcacctagcgaaccaaaaacgaatttaaataaggtgccctccgaggtcgtaccaaatccaaaaggtactccaagccctccgtgcatcgtgtccacagtgccctaccattgcgtgaccccaatggcttctattcagtccggggtcgctagcctgccccagacaacaccaacgacaacacttgcgattgccagtcctcaagtgaaggatacgaccatatcaagcgtcctgataagcccccagaatcccggtagcctgagtcttaaggggccagtctcaccccctgctgccctcagcctcagcactcagagccttcctgtggtgaccagcagccagaagaccgctgggcctaacacacccccagatttccctattagcctcggcagccatctagcccctcttcaccagagttcttttgggagcgtgcagctcctcggtcagaccggtccatccgctctctcagatcctacagtcaagacaatcagcgtcgaccattctagcacaggcgcttcctaccccagtcagcgcagcgtcatcccccctctgccttctcgaaatgaggttgtaccagccaccgtggcagccttcccagttgtggctcctagtgtcgataagggcccatctactatctcttctatcacctgtagtcctagcggatcgcttaacgtggcgacttctttctcattgagtcccaccacttcactcatcctgaagtcatcccccaacgctacttaccattaccccttggttgctcagatgccagtttcaagtgttggcacgaccccacttgtcgtcactaacccatgtaccatagccgcagctcctacaactacctttgaggtggctacgtgtgtgagcccgcctatgtcgtctggacctatcagcaatatcgagcctacctctccagcagcgctcgtcatggctcccgtcgccccaaaggaacccagtacccaagtcgccacaactctgaggatacccgtgagtcccccactccccgatccagaggacttgaagaatctgccttcttccgtcctggtcaaattcccaacccagaaggacctgcagactgtgcctgcgtccttagaaggcgcaccattttcgccagctcaggctggcctgacgactaagaaagacccaacagtgcttccgctcgtgcaggccgctcctaagaatagcccaagttttcagagtacaagctctagtccagagattccactaagcccagaagcaacgctcgccaaaaagtctctgggtgaacctctgccaatcgttgcagcttttccactagagagcgccgacccagcaggggtggcacctacaactgctaaggcagcggcatttgaaaaggtcctgccaaagcccgagagcgcctctgtatcggcggcaccatccccacccgtgagcctgcctctggccccatctcctgtacccacgttgcccccaaaacagcagtttctgcccagctctcccggacttgtactggagtcacccagcaaacccttggcccctgccgatgaggacgagctattgcccttgattcccccagagcctattagcggaggcgtcccttttcaatcagtgctcgtcaatatgcccacccctaagtcagccggaattccagtacccacacctagcgctaaacagcccgtcactaaaaataataaaggtagtgggaccgagagcgacagcgacgaatcagtgcctgagcttgaagagcaggactccacacaggccaccacacagcaggctcaactggctgcagcagcagaaattgacgaagagcctgtgtccaaggcgaagcagtccagatccgaaaagaaagccaggaaggccatgtccaagttgggcctgcggcaagtcacaggggttacccgggtgacaatccggaaaagtaagaatatcctcttcgtaatcaccaaacccgatgtttataaaagccccgcaagcgatacgtatattgtgtttggtgaggctaagatcgaggacttgagtcaacaggcacagcttgccgcagcagagaagtttaaggtgcagggggaggccgtctccaatattcaagagaacactcagactccaaccgtgcaggaggagtctgaagaggaagaggtcgacgagaccggggtcgaggtaaaggacatcgaattggtgatgtcccaagcgaacgtttctagggctaaagcagtgagggccctgaagaacaactcaaacgacattgtcaacgccataatggagctgactatgtag

SEQ ID NO: 42580 - DNA, 2778 bp, Artificial Sequence
  derived and/or modified sequence
atgcccggcgaggccaccgagaccgtgcccgccaccgagcaggagctgccccagccccaggccgagaccgccgtgctgcccatgagcagcgccctgagcgtgaccgccgccctgggccagcccggccccaccctgccccccccctgcagccccgccccccagcagtgccccctgagcgccgccaaccaggccagccccttccccagccccagcaccatcgccagcacccccctggaggtgcccttcccccagagcagcagcggcaccgccctgcccctgggcaccgcccccgaggcccccaccttcctgcccaacctgatcggcccccccatcagccccgccgccctggccctggccagccccatgatcgcccccaccctgaagggcacccccagcagcagcgcccccctggccctggtggccctggccccccacagcgtgcagaagagcagcgccttcccccccaacctgctgaccagcccccccagcgtggccgtggccgagagcggcagcgtgatcaccctgagcgcccccatcgcccccagcgagcccaagaccaacctgaacaaggtgcccagcgaggtggtgcccaaccccaagggcacccccagccccccctgcatcgtgagcaccgtgccctaccactgcgtgacccccatggccagcatccagagcggcgtggccagcctgccccagaccacccccaccaccaccctggccatcgccagcccccaggtgaaggacaccaccatcagcagcgtgctgatcagcccccagaaccccggcagcctgagcctgaagggccccgtgagcccccccgccgccctgagcctgagcacccagagcctgcccgtggtgaccagcagccagaagaccgccggccccaacaccccccccgacttccccatcagcctgggcagccacctggcccccctgcaccagagcagcttcggcagcgtgcagctgctgggccagaccggccccagcgccctgagcgaccccaccgtgaagaccatcagcgtggaccacagcagcaccggcgccagctaccccagccagagaagcgtgatcccccccctgcccagcagaaacgaggtggtgcccgccaccgtggccgccttccccgtggtggcccccagcgtggacaagggccccagcaccatcagcagcatcacctgcagccccagcggcagcctgaacgtggccaccagcttcagcctgagccccaccaccagcctgatcctgaagagcagccccaacgccacctaccactaccccctggtggcccagatgcccgtgagcagcgtgggcaccacccccctggtggtgaccaacccctgcaccatcgccgccgcccccaccaccaccttcgaggtggccacctgcgtgagcccccccatgagcagcggccccatcagcaacatcgagcccaccagccccgccgccctggtgatggcccccgtggcccccaaggagcccagcacccaggtggccaccaccctgagaatccccgtgagcccccccctgcccgaccccgaggacctgaagaacctgcccagcagcgtgctggtgaagttccccacccagaaggacctgcagaccgtgcccgccagcctggagggcgcccccttcagccccgcccaggccggcctgaccaccaagaaggaccccaccgtgctgcccctggtgcaggccgcccccaagaacagccccagcttccagagcaccagcagcagccccgagatccccctgagccccgaggccaccctggccaagaagagcctgggcgagcccctgcccatcgtggccgccttccccctggagagcgccgaccccgccggcgtggcccccaccaccgccaaggccgccgccttcgagaaggtgctgcccaagcccgagagcgccagcgtgagcgccgcccccagcccccccgtgagcctgcccctggcccccagccccgtgcccaccctgccccccaagcagcagttcctgcccagcagccccggcctggtgctggagagccccagcaagcccctggcccccgccgacgaggacgagctgctgcccctgatcccccccgagcccatcagcggcggcgtgcccttccagagcgtgctggtgaacatgcccacccccaagagcgccggcatccccgtgcccacccccagcgccaagcagcccgtgaccaagaacaacaagggcagcggcaccgagagcgacagcgacgagagcgtgcccgagctggaggagcaggacagcacccaggccaccacccagcaggcccagctggccgccgccgccgagatcgacgaggagcccgtgagcaaggccaagcagagcagaagcgagaagaaggccagaaaggccatgagcaagctgggcctgagacaggtgaccggcgtgaccagagtgaccatcagaaagagcaagaacatcctgttcgtgatcaccaagcccgacgtgtacaagagccccgccagcgacacctacatcgtgttcggcgaggccaagatcgaggacctgagccagcaggcccagctggccgccgccgagaagttcaaggtgcagggcgaggccgtgagcaacatccaggagaacacccagacccccaccgtgcaggaggagagcgaggaggaggaggtggacgagaccggcgtggaggtgaaggacatcgagctggtgatgagccaggccaacgtgagcagagccaaggccgtgagagccctgaagaacaacagcaacgacatcgtgaacgccatcatggagctgaccatgtag

SEQ ID NO: 42581 - protein, 109 aa, Artificial Sequence
  derived and/or modified sequence
MAGAPTVSLPELRSLLASGRARLFDVRSREEAAAGTIPGALNIPVSELESALQMEPAAFQALYSAEKPKLEDEHLVFFCQMGKRGLQATQLARSLGYTGYGEVWLLAGR

SEQ ID NO: 42582 - DNA, 330 bp, Artificial Sequence
  derived and/or modified sequence
atggccggcgctcctactgtctctctccccgagttgaggtctctccttgccagcggccgagcacgactattcgacgtgcgttcacgggaagaagcagctgctggaacaattcctggggcactgaacatacccgtctctgaactagagtcggccctgcaaatggagcccgcagccttccaggctctctacagtgccgagaagccgaagttggaagatgagcatttggtctttttctgccagatgggcaagaggggccttcaggctacacagctggcacgctcactggggtacactgggtatggcgaagtttggttgcttgcaggccgatag

SEQ ID NO: 42583 - DNA, 330 bp, Artificial Sequence
  derived and/or modified sequence
atggccggggcccccaccgtgtccctgcctgagctgcggagcctgctggccagcggccgggcccggctgtttgatgtgcgcagccgggaggaggccgccgccggcaccatccctggggccctgaacatccctgtgtctgagctggagagcgccctgcagatggagcctgctgccttccaggccctgtacagcgctgagaagcccaagctggaggatgagcacctggtgttcttctgccagatgggcaagaggggcctgcaggccacccagctggcccggagcctgggctacacaggctacggggaggtgtggctgctggccggccgctag

SEQ ID NO: 42584 - DNA, 330 bp, Artificial Sequence
  derived and/or modified sequence
atggccggcgcccccaccgtgagcctgcccgagctgcggagcctgctcgcgtcaggccgcgccaggctgtttgacgtgcggtccagagaggaagcagccgcagggacaattccaggcgccctgaatatccctgtgagcgaactggagtccgcactgcagatggaaccagccgcctttcaggccctctatagtgccgaaaaacccaagctagaagacgaacacttggtgttcttttgtcaaatgggtaaacggggcctccaagctacccaactggctcggtctctggggtacactggttacggagaagtatggcttctggctggccgttag

SEQ ID NO: 42585 - DNA, 330 bp, Artificial Sequence
  derived and/or modified sequence
atggctggtgccccaaccgtttcactgccagagctgcgatccctattagcatcaggacgcgctaggcttttcgatgttagatctagggaggaggcggctgcagggacaattcccggtgctctgaatatacccgtctctgaactcgaaagcgctctccagatggaacccgctgcctttcaggctctctattctgccgaaaagcccaagctggaggacgaacacctggtgttcttttgccaaatggggaagaggggactccaagccacccagctggcccgtagcctcggatatactggatatggcgaggtgtggctgctcgcaggccgatag

SEQ ID NO: 42586 - DNA, 626 bp, Artificial Sequence
  derived and/or modified sequence
gggcgggccagggccgcactccggagactcgcggttgctacgcgcaccatggctggagcgcccacggtctcgcttcctgaactccgttcactcctagcctccggacgggcccggctcttcgacgtgcgctctcgcgaggaggcggcagctgggaccatcccaggggcgctcaacatcccggtgtccgagttggagagtgctctgcagatggagccagctgccttccaggctttatattctgctgagaagccaaagctggaagatgagcatctcgttttcttctgtcagatgggcaagcggggcctccaggccacgcagctggcccggagtcttggatacactgggtacggggaggtgtggctgctagctgggaggtgatggggactgcctgtcattcctgtcagtctctcacgcttctttgtctccacagggctcgcaactacgctggagcctatagagaatggttggagaaagagagttaggcaggaggcagcttactgattgccaccccctggccccttaatggccaccttaactaagggtgtgaacgggctgacttggtgaattgggcaactccttatagtgttgtgcacacaaaagcatcaaataaagaacatttaatcaaa

SEQ ID NO: 42587 - DNA, 330 bp, Artificial Sequence
  derived and/or modified sequence
atggccggcgcccccaccgtgagcctgcccgagctgagaagcctgctggccagcggcagagccagactgttcgacgtgagaagcagagaggaggccgccgccggcaccatccccggcgccctgaacatccccgtgagcgagctggagagcgccctgcagatggagcccgccgccttccaggccctgtacagcgccgagaagcccaagctggaggacgagcacctggtgttcttctgccagatgggcaagagaggcctgcaggccacccagctggccagaagcctgggctacaccggctacggcgaggtgtggctgctggccggcagatag

SEQ ID NO: 42588 - protein, 74 aa, Artificial Sequence
  derived and/or modified sequence
MAGVSELESALQMEPAAFQALYSAEKPKLEDEHLVFFCQMGKRGLQATQLARSLGYTGARNYAGAYREWLEKES

SEQ ID NO: 42589 - DNA, 225 bp, Artificial Sequence
  derived and/or modified sequence
atggccggcgtgagcgagctggagagcgccctgcagatggagcccgccgccttccaggccctgtacagcgccgagaagcccaagctggaggacgagcacctggtgttcttctgccagatgggcaagagaggcctgcaggccacccagctggccagaagcctgggctacaccggcgccagaaactacgccggcgcctacagagagtggctggagaaggagagctag

SEQ ID NO: 42590 - DNA, 225 bp, Artificial Sequence
  derived and/or modified sequence
atggcaggggttagtgagttggagtccgccctgcaaatggagcccgctgcctttcaagcactctatagcgctgagaagccaaagctggaggacgaacatctagtgtttttttgccaaatgggaaagcgggggttacaagctacccagctcgcccgatccttaggctataccggcgcccgtaactatgctggagcctatcgcgagtggctcgaaaaggaatcttag

SEQ ID NO: 42591 - DNA, 457 bp, Artificial Sequence
  derived and/or modified sequence
cagctctgggagggaacgggagatgttgcaggcgccgagagggcgggccagggccgcactccggagactcgcggttgctacgcgcaccatggctggagtgtccgagttggagagtgctctgcagatggagccagctgccttccaggctttatattctgctgagaagccaaagctggaagatgagcatctcgttttcttctgtcagatgggcaagcggggcctccaggccacgcagctggcccggagtcttggatacactggggctcgcaactacgctggagcctatagagaatggttggagaaagagagttaggcaggaggcagcttactgattgccaccccctggccccttaatggccaccttaactaagggtgtgaacgggctgacttggtgaattgggcaactccttatagtgttgtgcacacaaaagcatcaaataaagaacatttaatcaaa

SEQ ID NO: 42592 - DNA, 225 bp, Artificial Sequence
  derived and/or modified sequence
atggccggcgtgtctgagctggagagcgccctgcagatggagcctgctgccttccaggccctgtacagcgctgagaagcccaagctggaggatgagcacctggtgttcttctgccagatgggcaagaggggcctgcaggccacccagctggcccggagcctgggctacacaggagccaggaactatgctggggcctaccgggagtggctggagaaggagagctag

SEQ ID NO: 42593 - DNA, 225 bp, Artificial Sequence
  derived and/or modified sequence
atggccggcgtgagcgagctggagagcgccctgcagatggagcccgctgcatttcaggccttatattcagcggaaaagcctaaattggaagatgagcacctagtcttcttttgtcagatgggcaaacggggcctgcaagctacccagctcgctcggtccctgggctacacgggggccagaaattatgcaggcgcttaccgcgaatggttggaaaaggaaagctag

SEQ ID NO: 42594 - DNA, 225 bp, Artificial Sequence
  derived and/or modified sequence
atggctggcgtgtcagagctggaatcggccctccaaatggaacccgctgcttttcaggctctctatagcgccgaaaagcccaagttggaggatgagcacctggtattcttctgccagatgggcaaaaggggactgcaggccacgcagcttgcacggtcattaggatatactggagcccgtaactacgccggtgcctatcgggagtggctggagaaggagtcctag

SEQ ID NO: 42595 - protein, 122 aa, Artificial Sequence
  derived and/or modified sequence
MAGGCRAPSSAPTVSLPELRSLLASGRARLFDVRSREEAAAGTIPGALNIPVSELESALQMEPAAFQALYSAEKPKLEDEHLVFFCQMGKRGLQATQLARSLGYTGARNYAGAYREWLEKES

SEQ ID NO: 42596 - protein, 115 aa, Artificial Sequence
  derived and/or modified sequence
MAGAPTVSLPELRSLLASGRARLFDVRSREEAAAGTIPGALNIPVSELESALQMEPAAFQALYSAEKPKLEDEHLVFFCQMGKRGLQATQLARSLGYTGARNYAGAYREWLEKES

SEQ ID NO: 42597 - DNA, 369 bp, Artificial Sequence
  derived and/or modified sequence
atggccggcggctgcagagcccccagcagcgcccccaccgtgagcctgcccgagctgagaagcctgctggccagcggcagagccagactgttcgacgtgagaagcagagaggaggccgccgccggcaccatccccggcgccctgaacatccccgtgagcgagctggagagcgccctgcagatggagcccgccgccttccaggccctgtacagcgccgagaagcccaagctggaggacgagcacctggtgttcttctgccagatgggcaagagaggcctgcaggccacccagctggccagaagcctgggctacaccggcgccagaaactacgccggcgcctacagagagtggctggagaaggagagctag

SEQ ID NO: 42598 - DNA, 348 bp, Artificial Sequence
  derived and/or modified sequence
atggccggcgcccccaccgtgagcctgcccgagctgagaagcctgctggccagcggcagagccagactgttcgacgtgagaagcagagaggaggccgccgccggcaccatccccggcgccctgaacatccccgtgagcgagctggagagcgccctgcagatggagcccgccgccttccaggccctgtacagcgccgagaagcccaagctggaggacgagcacctggtgttcttctgccagatgggcaagagaggcctgcaggccacccagctggccagaagcctgggctacaccggcgccagaaactacgccggcgcctacagagagtggctggagaaggagagctag

SEQ ID NO: 42599 - DNA, 369 bp, Artificial Sequence
  derived and/or modified sequence
atggcaggtggttgtcgcgctcccagctcggcgcccacagtcagcttgccagaattgaggagcttactggcaagtggtcgggcaaggctcttcgacgtgcgctcacgagaggaggccgccgcgggcaccatccccggggcactcaacatccccgtttcagagctcgagtccgcattgcagatggagcctgctgccttccaagccctgtactcagccgaaaagccgaaacttgaagacgaacatttagtattcttttgccagatgggcaaaaggggccttcaagcaactcagctggcacgcagtttgggatacaccggggcacggaactatgcaggggcttacagggagtggctggaaaaggaaagctag

SEQ ID NO: 42600 - DNA, 574 bp, Artificial Sequence
  derived and/or modified sequence
gcaggcgccgagagggcgggccagggccgcactccggagactcgcggttgctacgcgcaccatggctggaggctgtcgcgccccttcctcagcgcccacggtctcgcttcctgaactccgttcactcctagcctccggacgggcccggctcttcgacgtgcgctctcgcgaggaggcggcagctgggaccatcccaggggcgctcaacatcccggtgtccgagttggagagtgctctgcagatggagccagctgccttccaggctttatattctgctgagaagccaaagctggaagatgagcatctcgttttcttctgtcagatgggcaagcggggcctccaggccacgcagctggcccggagtcttggatacactggggctcgcaactacgctggagcctatagagaatggttggagaaagagagttaggcaggaggcagcttactgattgccaccccctggccccttaatggccaccttaactaagggtgtgaacgggctgacttggtgaattgggcaactccttatagtgttgtgcacacaaaagcatcaaataaagaacatttaatcaaa

SEQ ID NO: 42601 - DNA, 348 bp, Artificial Sequence
  derived and/or modified sequence
atggccggcgcccccacagtctccttgcccgagctgaggagtctgctcgcaagcgggagggcaagactctttgacgtgaggtctcgggaggaggctgctgctggcactattccgggtgccctgaatattccggtgagcgaactggagagcgcgctccaaatggagccagcggcgttccaggccctttacagtgcggagaagccaaaattagaagacgaacatctcgtgttcttctgccagatgggcaagcggggcctgcaggccacacaactggctagatctttaggctatactggcgctagaaactacgctggagcttacagggagtggttggagaaagagtcgtag

SEQ ID NO: 42602 - DNA, 369 bp, Artificial Sequence
  derived and/or modified sequence
atggccggcggctgccgggcccccagcagcgcccccaccgtgtccctgcctgagctgcggagcctgctggccagcggccgggcccggctgtttgatgtgcgcagccgggaggaggccgctgctggcaccatccctggggccctgaacatccctgtgtctgagctggagagcgccctgcagatggagcctgctgccttccaggccctgtacagcgctgagaagcccaagctggaggatgagcacctggtgttcttctgccagatgggcaagaggggcctgcaggccacccagctggcccggagcctgggctacacaggagccaggaactatgctggggcctaccgggagtggctggagaaggagagctag

SEQ ID NO: 42603 - DNA, 348 bp, Artificial Sequence
  derived and/or modified sequence
atggccggggcccccaccgtgtccctgcctgagctgcggagcctgctggccagcggccgggcccggctgtttgatgtgcgcagccgggaggaggccgccgccggcaccatccctggggccctgaacatccctgtgtctgagctggagagcgccctgcagatggagcctgctgccttccaggccctgtacagcgctgagaagcccaagctggaggatgagcacctggtgttcttctgccagatgggcaagaggggcctgcaggccacccagctggcccggagcctgggctacaccggggccagaaattatgctggggcctaccgggagtggctggagaaggagagctag

SEQ ID NO: 42604 - DNA, 369 bp, Artificial Sequence
  derived and/or modified sequence
atggccggcggctgccgggcccccagcagcgcccccaccgtgagcctcccagagttgagatcgctgttggcgagtggacgggccaggctgttcgacgtcagatcccgagaagaagcggccgccggcaccatcccaggagccctgaacatccctgtgtccgagctggagtcggctctgcagatggagccagctgccttccaggcgctgtatagcgccgagaagccaaaattggaggacgaacacctcgttttcttctgtcagatgggtaagcgggggctccaggccacacagctggccagaagcctggggtatactggcgctcgcaactatgcaggagcctatcgcgagtggctcgagaaagagagctag

SEQ ID NO: 42605 - DNA, 348 bp, Artificial Sequence
  derived and/or modified sequence
atggccggcgcccccaccgtgagcctgcccgagctgcggagcctgcttgccagtggccgcgcaagattatttgatgtcagaagtcgggaggaagccgcagccgggaccatacctggcgccctgaatatcccagttagtgaactagaaagcgctctacagatggagcccgcagcattccaggctctgtactcggcggaaaagcctaagttggaggatgaacacctggtctttttctgtcagatgggcaagcgaggcttgcaagccacccagttggctcggtctctggggtatacaggcgccaggaattacgccggggcatatcgagagtggttggagaaagaatcatag

SEQ ID NO: 42606 - DNA, 369 bp, Artificial Sequence
  derived and/or modified sequence
atggccggaggctgtagagcaccctctagcgctcccactgtaagtctgcctgagctacggtcactactggcctccggcagggccaggctctttgatgtcaggtccagggaagaggcagcagcgggtaccatccccggagctttgaacattcctgtctcggagcttgagtctgccctgcagatggagcctgcagcattccaggcactgtacagcgccgagaagcctaagctggaggacgagcatctggtgttcttttgccagatgggaaagaggggactccaggccactcaactcgccagatctctgggctacaccggcgcaagaaactacgcaggagcttatcgcgagtggctggagaaagagagctag

SEQ ID NO: 42607 - DNA, 593 bp, Artificial Sequence
  derived and/or modified sequence
ccggatccggtctcagctctgggagggaacgggagatgttgcaggcgccgagagggcgggccagggccgcactccggagactcgcggttgctacgcgcaccatggctggagcgcccacggtctcgcttcctgaactccgttcactcctagcctccggacgggcccggctcttcgacgtgcgctctcgcgaggaggcggcagctgggaccatcccaggggcgctcaacatcccggtgtccgagttggagagtgctctgcagatggagccagctgccttccaggctttatattctgctgagaagccaaagctggaagatgagcatctcgttttcttctgtcagatgggcaagcggggcctccaggccacgcagctggcccggagtcttggatacactggggctcgcaactacgctggagcctatagagaatggttggagaaagagagttaggcaggaggcagcttactgattgccaccccctggccccttaatggccaccttaactaagggtgtgaacgggctgacttggtgaattgggcaactccttatagtgttgtgcacacaaaagcatcaaataaagaacatttaatcaaa

SEQ ID NO: 42608 - DNA, 348 bp, Artificial Sequence
  derived and/or modified sequence
atggccggtgcccctaccgtcagtctgcccgaacttaggtccctgctggctagcggcagggctcgcctttttgacgtccggagcagagaggaggctgccgcaggcacaattcctggtgctcttaacattccggtgtctgaactcgagtctgcgctccagatggagcccgcagcgttccaggctctgtatagtgccgaaaagcccaagctcgaggacgaacacctcgtcttcttctgccagatgggaaagcgcggacttcaggcaactcagctggcaaggtccctgggctacacaggagctcgtaattatgcaggggcatatcgggagtggcttgagaaggagtcctag

SEQ ID NO: 42609 - protein, 1171 aa, Artificial Sequence
  derived and/or modified sequence
MAPVYEGMASHVQVFSPHTLQSSAFCSVKKLKIEPSSNWDMTGYGSHSKVYSQSKNIPLSQPATTTVSTSLPVPNPSLPYEQTIVFPGSTGHIVVTSASSTSVTGQVLGGPHNLMRRSTVSLLDTYQKCGLKRKSEEIENTSSVQIIEEHPPMIQNNASGATVATATTSTATSKNSGSNSEGDYQLVQHEVLCSMTNTYEVLEFLGRGTFGQVVKCWKRGTNEIVAIKILKNHPSYARQGQIEVSILARLSTESADDYNFVRAYECFQHKNHTCLVFEMLEQNLYDFLKQNKFSPLPLKYIRPVLQQVATALMKLKSLGLIHADLKPENIMLVDPSRQPYRVKVIDFGSASHVSKAVCSTYLQSRYYRAPEIILGLPFCEAIDMWSLGCVIAELFLGWPLYPGASEYDQIRYISQTQGLPAEYLLSAGTKTTRFFNRDTDSPYPLWRLKTPDDHEAETGIKSKEARKYIFNCLDDMAQVNMTTDLEGSDMLVEKADRREFIDLLKKMLTIDADKRITPIETLNHPFVTMTHLLDFPHSTHVKSCFQNMEICKRRVNMYDTVNQSKTPFITHVAPSTSTNLTMTFNNQLTTVHNQPSAASMAAVAQRSMPLQTGTAQICARPDPFQQALIVCPPGFQGLQASPSKHAGYSVRMENAVPIVTQAPGAQPLQIQPGLLAQQAWPSGTQQILLPPAWQQLTGVATHTSVQHATVIPETMAGTQQLADWRNTHAHGSHYNPIMQQPALLTGHVTLPAAQPLNVGVAHVMRQQPTSTTSSRKSKQHQSSVRNVSTCEVSSSQAISSPQRSKRVKENTPPRCAMVHSSPACSTSVTCGWGDVASSTTRERQRQTIVIPDTPSPTVSVITISSDTDEEEEQKHAPTSTVSKQRKNVISCVTVHDSPYSDSSSNTSPYSVQQRAGHNNANAFDTKGSLENHCTGNPRTIIVPPLKTQASEVLVECDSLVPVNTSHHSSSYKSKSSSNVTSTSGHSSGSSSGAITYRQQRPGPHFQQQQPLNLSQAQQHITTDRTGSHRRQQAYITPTMAQAPYSFPHNSPSHGTVHPHLAAAAAAAHLPTQPHLYTYTAPAALGSTGTVAHLVASQGSARHTVQHTAYPASIVHQVPVSMGPRVLPSPTIHPSQYPAQFAHQTYISASPASTVYTGYPLSPAKVNQYPYI

SEQ ID NO: 42610 - DNA, 3516 bp, Artificial Sequence
  derived and/or modified sequence
atggcccccgtctatgaaggcatggcttctcacgtccaagtattttccccacatacgctgcagagttccgccttctgttcagtcaagaaattgaagattgaaccctccagtaattgggatatgacagggtatggttcacactcaaaggtatactctcagtccaagaatattcccttaagtcagcctgctaccactaccgtgtctacttcattgcctgttcccaatcccagcctgccttacgaacaaactatcgtattccctggatccaccggccatatcgtagtgacgtctgcgagctccacatctgtgactggacaagttctgggcggacctcacaatctgatgagacgctctacggtctcccttctggacacataccagaaatgcggattaaaacggaaatctgaggaaatcgaaaacactagctctgtccagattatagaagaacacccaccaatgatacagaacaacgccagtggcgcgacagtggctacagctaccacatcaactgctacttccaaaaactcgggatccaattctgagggggattatcaactggtgcagcatgaagtgttgtgttccatgacaaatacctacgaagtgctggaattccttggcagagggaccttcggtcaggttgtaaagtgctggaaacgagggacgaatgagatcgtagcaatcaagatccttaagaaccacccatcttacgcccggcaaggtcagatcgaggtctctatccttgcacgactctcgactgagtctgctgatgactataattttgtcagagcttacgaatgttttcagcataaaaatcatacctgcctcgtgttcgaaatgctggagcagaacctgtacgactttctgaagcagaacaagttcagtccgctaccgcttaaatatattcgccccgtgctccagcaggtcgccaccgcactgatgaaactgaagtccctcggtctaatccatgctgacctcaagcctgagaacatcatgctcgttgatcccagcagacagccctaccgggtgaaagtaatcgacttcggatctgcgtctcacgtatcaaaggctgtgtgctccacctaccttcaaagcaggtactatcgagcacctgagattatcttgggtttaccgttctgcgaagctattgacatgtggagcctggggtgcgtcatcgctgagctcttcttaggatggccactttaccccggtgcctccgagtacgaccagatacgctatatctcacagacacagggcctgccagcagagtatctcctctccgctggaacaaaaactacacggtttttcaaccgagacactgacagcccctacccactatggagactgaaaactcccgacgaccacgaggcagagaccggcattaagagtaaagaggcccggaagtatatctttaactgcctagacgacatggcacaagtcaacatgaccaccgacctggaagggagcgacatgctggttgagaaagcagataggagagaatttatcgatctgctgaaaaagatgctgaccatcgatgccgacaagcgcattacaccaattgagaccctgaaccatccattcgtgaccatgacacatttgctagacttcccgcatagcacacacgttaagtcctgtttccagaacatggaaatctgcaaacggcgtgttaacatgtacgatactgtcaaccagagcaagaccccttttattacacacgtcgccccttccaccagcacaaacttgaccatgacctttaacaaccagctgaccacagtccataatcagcccagcgccgcctcgatggctgcggtcgctcagaggagcatgcccctccaaacaggaacagcgcagatctgcgctcgtcctgacccatttcagcaggcactaattgtgtgccccccaggatttcagggactccaggcatccccatctaagcacgccggatactccgttagaatggagaacgcggtcccgattgtaactcaggctcccggggctcagcccctgcagatacaaccgggcttactggcacagcaggcgtggcctagtggcacccagcagatcttgctcccccccgcttggcagcagctgacaggagtggccacccacaccagtgtacagcatgccacagtgattcctgaaaccatggctggaacacagcagctggccgactggcgcaacacccacgcccacggcagccactacaacccgataatgcagcaaccagcccttctgaccggacacgtaacacttcccgcggcccagcctctgaatgtaggtgttgctcacgtgatgcgccagcagccgacttcgacaactagttctagaaaatccaaacagcatcagagctccgtacgaaacgtgtctacctgtgaagtcagctcgagtcaggcaatcagtagtcctcagcgttccaagcgcgtgaaagaaaatacgccacctcggtgcgccatggtccatagttcccctgcctgctccacatcagtaacctgcggctggggtgacgtggcttcaagcaccacccgcgagagacaaaggcaaacgatagtgatcccagacaccccctctcctacagttagtgtcattacaattagcagtgacacggatgaagaggaggagcagaagcacgcccccacaagcactgtgtccaagcagcgaaagaacgtgatctcctgtgtaacagtccacgatagtccttattccgattctagctccaatacctccccatatagcgttcagcagcgagccggacacaacaacgctaacgcctttgacacaaaggggtccctggaaaatcattgtacaggaaaccctcgaacaatcatagttccacccctgaaaacgcaggcttccgaagtcctggtggagtgcgatagtttagtgccagtaaataccagccaccacagtagcagctacaagagcaagtcatcatcaaatgtgacatccacatccggtcacagctcagggagcagctccggcgctattacctataggcaacaaagacctggcccacactttcagcagcagcagccactcaacctgtctcaggctcagcagcatatcactacggacagaacaggatcccataggcggcaacaagcttatatcacaccaacaatggctcaggccccctacagtttcccacacaactctccatctcacggaacagttcatcctcatctggcggccgccgctgcagctgcacacctgcctacccaaccgcatctgtatacttatactgccccagcagcattaggttcaactgggaccgtggcgcatctcgtggcgtcccaagggtctgcgcgccatacagtccagcacaccgcctaccccgctagcattgtccaccaagtccccgtgtctatggggccaagggttctaccttcgccaaccatccatccatcacagtatcctgcccaattcgcccaccagacatacatttccgcttctcccgccagcacagtgtatacaggatatcctctgagccccgccaaggtgaaccagtatccatacatctag

SEQ ID NO: 42611 - DNA, 3969 bp, Artificial Sequence
  derived and/or modified sequence
cacgggaggcggtgatgcgggcgcgggcggcctcggctgcgccgagagcggagacacaggctcaagatggcagattccgactgaggctgggggggccgagctcgcgcgccgctttcccgtccccgttgccatgaaccgcggacaccccggccccgatggcccccgtgtacgaaggtatggcctcacatgtgcaagttttctcccctcacacccttcaatcaagtgccttctgtagtgtgaagaaactgaaaatagagccgagttccaactgggacatgactgggtacggctcccacagcaaagtgtatagccagagcaagaacatccccctgtcgcagccagccaccacaaccgtcagcacctccttgccggtcccaaacccaagcctaccttacgagcagaccatcgtcttcccaggaagcaccgggcacatcgtggtcacctcagcaagcagcacttctgtcaccgggcaagtcctcggcggaccacacaacctaatgcgtcgaagcactgtgagcctccttgatacctaccaaaaatgtggactcaagcgtaagagcgaggagatcgagaacacaagcagcgtgcagatcatcgaggagcatccacccatgattcagaataatgcaagcggggccactgtcgccactgccaccacgtctactgccacctccaaaaacagcggctccaacagcgagggcgactatcagctggtgcagcatgaggtgctgtgctccatgaccaacacctacgaggtcttagagttcttgggccgagggacgtttgggcaagtggtcaagtgctggaaacggggcaccaatgagatcgtagccatcaagatcctgaagaaccacccatcctatgcccgacaaggtcagattgaagtgagcatcctggcccggttgagcacggagagtgccgatgactataacttcgtccgggcctacgaatgcttccagcacaagaaccacacgtgcttggtcttcgagatgttggagcagaacctctatgactttctgaagcaaaacaagtttagccccttgcccctcaaatacattcgcccagttctccagcaggtagccacagccctgatgaaactcaaaagcctaggtcttatccacgctgacctcaaaccagaaaacatcatgctggtggatccatctagacaaccatacagagtcaaggtcatcgactttggttcagccagccacgtctccaaggctgtgtgctccacctacttgcagtccagatattacagggcccctgagatcatccttggtttaccattttgtgaggcaattgacatgtggtccctgggctgtgttattgcagaattgttcctgggttggccgttatatccaggagcttcggagtatgatcagattcggtatatttcacaaacacagggtttgcctgctgaatatttattaagcgccgggacaaagacaactaggtttttcaaccgtgacacggactcaccatatcctttgtggagactgaagacaccagatgaccatgaagcagagacagggattaagtcaaaagaagcaagaaagtacattttcaactgtttagatgatatggcccaggtgaacatgacgacagatttggaagggagcgacatgttggtagaaaaggctgaccggcgggagttcattgacctgttgaagaagatgctgaccattgatgctgacaagagaatcactccaatcgaaaccctgaaccatccctttgtcaccatgacacacttactcgattttccccacagcacacacgtcaaatcatgtttccagaacatggagatctgcaagcgtcgggtgaatatgtatgacacggtgaaccagagcaaaacccctttcatcacgcacgtggcccccagcacgtccaccaacctgaccatgacctttaacaaccagctgaccactgtccacaaccagccctcagcggcatccatggctgcagtggcccagcggagcatgcccctgcagacaggaacagcccagatttgtgcccggcctgacccgttccagcaagctctcatcgtgtgtccccccggcttccaaggcttgcaggcctctccctctaagcacgctggctactcggtgcgaatggaaaatgcagttcccatcgtcactcaagccccaggagctcagcctcttcagatccaaccaggtctgcttgcccagcaggcttggccaagtgggacccagcagatcctgcttcccccagcatggcagcaactgactggagtggccacccacacatcagtgcagcatgccaccgtgattcccgagaccatggcaggcacccagcagctggcggactggagaaatacgcatgctcacggaagccattataatcccatcatgcagcagcctgcactattgaccggtcatgtgacccttccagcagcacagcccttaaatgtgggtgtggcccacgtgatgcggcagcagccaaccagcaccacctcctcccggaagagtaagcagcaccagtcatctgtgagaaatgtctccacctgtgaggtgtcctcctctcaggccatcagctccccacagcgatccaagcgtgtcaaggagaacacacctccccgctgtgccatggtgcacagtagcccggcctgcagcacctcggtcacctgtgggtggggcgacgtggcctccagcaccacccgggaacggcagcggcagacaattgtcattcccgacactcccagccccacggtcagcgtcatcaccatcagcagtgacacggacgaggaggaggaacagaaacacgcccccaccagcactgtctccaagcaaagaaaaaacgtcatcagctgtgtcacagtccacgactccccctactccgactcctccagcaacaccagcccctactccgtgcagcagcgtgctgggcacaacaatgccaatgcctttgacaccaaggggagcctggagaatcactgcacggggaacccccgaaccatcatcgtgccacccctgaaaacccaggccagcgaagtattggtggagtgtgatagcctggtgccagtcaacaccagtcaccactcgtcctcctacaagtccaagtcctccagcaacgtgacctccaccagcggtcactcttcagggagctcatctggagccatcacctaccggcagcagcggccgggcccccacttccagcagcagcagccactcaatctcagccaggctcagcagcacatcaccacggaccgcactgggagccaccgaaggcagcaggcctacatcactcccaccatggcccaggctccgtactccttcccgcacaacagccccagccacggcactgtgcacccgcatctggctgcagccgctgccgctgcccacctccccacccagccccacctctacacctacactgcgccggcggccctgggctccaccggcaccgtggcccacctggtggcctcgcaaggctctgcgcgccacaccgtgcagcacactgcctacccagccagcatcgtccaccaggtccccgtgagcatgggcccccgggtcctgccctcgcccaccatccacccgagtcagtatccagcccaatttgcccaccagacctacatcagcgcctcgccagcctccaccgtctacactggatacccactgagccccgccaaggtcaaccagtacccttacatataaacactggaggggagggagggagggagggagggagagaatggcccgagggaggagggagagaaggagggaggcgctcctgggaccgtgggcgctggccttttatactgaagatgccgcacacaaacaatgcaaacggggcaggggcgggggggggggggggggcagagggcagggggacgggtcgggacaccagtgaaacttgaaccgggaagtgggaggacgtagagcagagaagagaacatttttaaaaggaagggattaaagagggtgggaaatctatggtttttattttaaaaaa

SEQ ID NO: 42612 - DNA, 3516 bp, Artificial Sequence
  derived and/or modified sequence
atggcccctgtgtatgagggcatggccagccacgtgcaggtgttcagcccccacaccctgcagagcagcgccttctgcagcgtgaagaagctgaagattgagcccagcagcaactgggacatgacaggctacggcagccacagcaaggtgtacagccagagcaagaacatccccctgagccagcctgccaccaccaccgtgtccaccagcctgcctgtgcccaaccccagcctgccctatgagcagaccatcgtgtttcctggcagcacaggccacatcgtggtgaccagcgccagcagcacctctgtgacaggccaggtgctgggcggcccccacaacctgatgaggaggagcacagtgtccctgctggacacctaccagaagtgtggcctgaagaggaagtctgaggagattgagaacaccagctctgtgcagatcatcgaggagcacccccccatgatccagaacaatgccagcggggccaccgtggccacagccaccaccagcacagccaccagcaagaacagcggcagcaacagcgagggggactaccagctggtgcagcacgaggtgctgtgcagcatgaccaacacctatgaggtgctggagttcctgggccggggcaccttcggccaggtggtgaagtgctggaagaggggcaccaatgagatcgtggccatcaagatcctgaagaaccaccccagctatgcccggcagggccagatcgaggtgtccatcctggcccggctgagcacagagagcgcagatgactacaactttgtgcgggcctatgagtgcttccagcacaagaaccacacctgcctggtgtttgagatgctggagcagaacctgtatgacttcctgaagcagaacaagttcagccccctgcccctgaagtacatccggcctgtgctgcagcaggtggccacagccctgatgaagctgaagagcctgggcctcatccatgctgacctgaagccagagaacatcatgctggtggaccccagccggcagccctacagagtgaaggtgattgactttggaagtgccagccacgtgtccaaggctgtgtgcagcacctacctgcagagccgctactaccgggcccctgagatcatcctgggcctgcccttctgtgaggccatcgacatgtggagcctgggctgtgtgattgctgagctgttcctgggctggcccctgtacccaggggcctctgaatatgaccagatccgctacatcagccagacccagggcctgcctgctgagtacctgctgtctgctggcaccaagaccacccgcttcttcaacagagacacagacagcccctaccccctgtggaggctgaagaccccagatgaccacgaggccgagaccggcatcaagagcaaggaggccaggaagtacatcttcaactgcctggatgacatggcccaggtgaacatgaccacagacctggagggcagtgacatgctggtggagaaggctgacagaagagagttcatcgacctgctgaagaagatgctgaccattgatgctgacaagaggatcacccccatcgagaccctgaaccacccctttgtgaccatgacccacctgctggacttcccccacagcacccacgtgaagagctgcttccagaacatggagatctgcaagagaagagtgaacatgtatgacacagtgaaccagagcaagacccccttcatcacccacgtggcccccagcaccagcaccaacctgaccatgaccttcaacaaccagctgaccaccgtgcacaaccagcccagcgctgcctccatggctgctgtggcccagaggtccatgcccctgcagacaggaacagcccagatctgtgcccggccagaccccttccagcaggccctgattgtgtgccccccaggcttccagggcctgcaggccagccccagcaagcacgccggctacagcgtgaggatggagaatgctgtgcccatcgtgacccaggcccctggggcccagcccctgcagatccagcccggcctgctggcccagcaggcctggcccagcggcacccagcagatcctgctgcccccagcctggcagcagctgactggagtggccacccacacctctgtgcagcacgccaccgtcatccctgagaccatggccggcacccagcagctggccgactggaggaacacccacgcccacggcagccactacaaccccatcatgcagcagcctgccctgctgactggacatgtgaccctgcctgctgcccagcccctgaatgtgggcgtggcccacgtgatgaggcagcagcccaccagcaccaccagcagcaggaagagcaagcagcaccagagctctgtgagaaatgtgtccacctgtgaggtgagcagcagccaggccatcagcagcccccagaggagcaagagggtgaaggagaacaccccaccccgctgtgccatggtgcacagcagccctgcctgcagcacctctgtgacctgtggctggggagatgtggccagcagcaccacccgggagcggcagaggcagaccatcgtcatcccagacacccccagccccaccgtgtctgtcatcaccatcagcagtgacacagatgaggaggaggagcagaagcacgcccccaccagcacagtgtccaagcagaggaagaatgtcatcagctgtgtgacagtgcatgacagcccctacagcgacagcagcagcaacaccagcccctacagcgtgcagcagagagctggccacaacaatgccaatgcctttgacaccaagggcagcctggagaaccactgcaccggcaaccccaggaccatcatcgtgccccccctgaagacccaggccagcgaggtgctggtggagtgtgacagcctggtgcctgtgaacaccagccaccacagcagcagctacaagagcaagagcagcagcaatgtgaccagcaccagcggccacagcagcggcagcagcagcggggccatcacctaccggcagcagaggcctggcccccacttccagcagcagcagcccctgaacctgagccaggcccagcagcacatcaccacagacagaacaggcagccaccggcggcagcaggcctacatcacccccaccatggcccaggccccctacagcttcccccacaacagccccagccatggaacagtgcacccccacctggccgctgctgctgctgctgcccacctgcccacccagccccacctgtacacctacacagccccagctgccctgggcagcactggaacagtggcccacctggtggccagccagggcagcgcccggcacacagtgcagcacacagcctacccagccagcatcgtgcaccaggtgcctgtgtccatgggcccccgggtgctgcccagccccaccatccaccccagccagtacccagcccagtttgcccaccagacctacatcagcgccagccctgccagcacagtgtacacaggctaccccctgagccctgccaaggtgaaccagtacccctacatctag

SEQ ID NO: 42613 - DNA, 3516 bp, Artificial Sequence
  derived and/or modified sequence
atggcccccgtgtacgagggcatggccagccacgtgcaggtgttctccccccacactctgcagtcttcagcattttgctccgtcaagaagctgaaaatcgagccctcctcaaactgggacatgacaggctacggtagccacagtaaggtttattcacaatcaaagaatattcccctgtcccaaccagcaactaccactgtgtcaacatcccttcccgtgccgaacccttctttgccttatgagcaaacaattgtgttccctggctcaacaggacatatcgtagtgacatcggcttcaagcacgagcgtcaccgggcaggttttaggaggccctcacaatttgatgcgccgctcaacagtgagtttgctggacacctatcagaaatgcggactgaagcgcaaatctgaagaaatagaaaacacctctagcgttcaaataatcgaagaacaccccccgatgatccagaataacgcaagcggggctactgttgccacggcgaccactagcacggcaacgagcaaaaatagtggaagcaacagtgaaggcgactaccagttggtacagcacgaggttctctgcagcatgacgaatacctacgaagtgctcgagtttttaggacgtgggactttcggtcaggtggtgaagtgctggaaacggggtacgaacgagatagtcgccattaagattctgaagaaccaccctagctacgccagacaaggacagatcgaggttagcatactggcacgactgtctactgaaagcgctgatgactacaactttgtgagggcatatgagtgtttccagcacaaaaatcacacctgtttagtctttgagatgctcgaacagaatctatatgattttctgaagcagaacaaattctccccattacctctgaagtatattcggcccgtactacaacaggtggcaaccgctctgatgaagctgaaatcactaggcctcattcatgccgatctcaagcccgagaacataatgctggtggacccatctcgccaaccctatagggttaaagtgatcgattttgggagcgctagccatgtctccaaggcagtctgttccacatacctgcagagccggtactacagggctccagagatcatcttaggacttccattctgtgaggcaattgatatgtggagccttggttgcgtgattgccgagctgtttttgggctggcccctgtatccaggcgcctccgaatacgaccagattcgatacatcagccagactcagggtctacccgccgaatatttactgagtgctggtaccaaaactacccgattcttcaatagggacactgactctccctatccgctgtggaggttgaaaactcccgatgaccatgaagccgagacagggattaaaagtaaagaggctcgcaagtatatcttcaactgtttggacgatatggcgcaagtaaatatgacaacagatctggagggtagcgacatgctcgtggagaaagccgatcggagagaatttatcgacctgctgaagaagatgctaacaatcgacgcggacaaacggattaccccaattgagactctgaaccaccctttcgtcaccatgacacacctcctggattttccacactccactcatgtgaagtcttgtttccagaatatggagatctgtaaaagaagggtgaatatgtatgacacagttaatcagtctaagacaccttttattacacatgtcgctccctcaacttcaaccaatctgactatgaccttcaacaaccagctgacaactgttcacaaccaaccttctgctgcctccatggctgccgtcgcacagcgctctatgccattacaaaccggaacagcccagatttgcgctagacctgacccctttcaacaggcactcatagtgtgcccccccggttttcagggactgcaggccagcccctcaaaacatgcaggctactctgtcagaatggaaaacgctgtgccgattgtcacacaggcacccggggcccagcccttgcagatacagcccgggctccttgcacagcaggcctggccaagcggaacccaacagattcttctgccccccgcgtggcagcaactgacaggcgttgcaacccatacctccgtgcagcacgccaccgtgatccccgaaactatggcaggtacacagcagctcgccgattggagaaacacccacgcccacggcagccattataatcctatcatgcaacagcctgccctgctgacaggacatgtgacgttgcctgccgcacagcccctgaacgtgggtgtcgcacacgtgatgcggcagcagcctacttccaccacaagcagccggaaatccaagcagcaccagagcagtgttagaaatgtgtccacctgtgaggtttccagtagccaagcgatttcttcaccacagaggtccaaacgggttaaggagaatacacccccccgatgtgcaatggtgcactcaagtccagcttgttcaacctccgtaacttgcgggtggggtgacgtagctagcagcacgacacgggaacgacagcggcaaacaattgttatacctgatacaccctctcctacggtgagcgtgatcacaatctcttcagataccgatgaagaggaggaacagaagcacgcccctacctctaccgtgagtaaacagagaaagaacgtaatctcatgtgtgacagtgcatgattccccttatagtgacagcagctccaacacgtccccatactcagtgcaacagcgagcagggcacaacaacgccaacgcttttgatacaaaggggtctttggaaaatcactgcactggcaacccaagaactattatcgtgccccctctcaaaactcaggccagcgaagtgctggtggagtgcgacagcctcgtcccagtgaacacttcccaccattcttccagctataagagtaagtctagttcaaatgtgacaagcacaagcggccacagcagtgggagcagttcaggagcaattacttacaggcaacaaaggccaggccctcactttcagcaacagcagcccctcaatttgagtcaggcccaacagcatatcaccactgatagaactgggagtcatcggaggcagcaagcatacataactcccaccatggctcaggcaccttacagtttcccgcataattcaccttcccacggcaccgtgcacccccacctggctgctgccgccgccgccgcacatttgccgactcagcctcatctgtatacatacactgccccagccgccctcggctccacaggtaccgtcgctcatcttgttgccagccaaggttcagcccggcatacagtgcaacacaccgcatatcccgcctctatcgttcaccaggtgccagtatccatgggaccaagggtcctaccttctcccactattcaccctagtcagtaccctgcccagttcgcacaccaaacctatatttctgccagccccgcctcgacagtatacaccgggtatcccctttcgcccgccaaggtgaaccagtacccatacatctag

SEQ ID NO: 42614 - DNA, 3516 bp, Artificial Sequence
  derived and/or modified sequence
atggccccagtctatgagggtatggcttctcacgtgcaggtgtttagccctcataccctgcagtccagcgcgttctgctccgtgaagaagctgaagatagagcctagtagcaactgggacatgactggctacggttcccactctaaggtctatagccagtcgaaaaacattcccctaagccagccagcaactacaaccgtcagcacttctctgccggtcccaaatccgagcctgccttacgaacaaactatcgtgtttccgggaagcacgggacacattgtggttaccagtgcttcctccacctctgtcacaggccaggtactcggtggaccgcataatctaatgcgacgttccaccgtctccctcctggatacataccaaaaatgtggtctcaagcgcaaaagtgaagaaattgagaacacatccagcgtgcagatcatagaggaacatcccccaatgatccagaacaatgcatccggcgcaactgtggctacagcaaccaccagcacggctaccagtaagaactccggcagtaactcagaaggggactatcagctcgtgcagcatgaagtcctgtgttctatgactaacacctatgaagtgctagagtttctggggagggggacattcggacaggtggtgaagtgctggaagagaggcaccaatgagattgttgcgatcaaaatcctgaaaaatcatccttcttatgcccgtcaaggccagattgaggtatcaatccttgctaggctatccactgaatctgcagacgattataacttcgtgcgggcttacgaatgtttccagcataagaaccacacttgccttgtgtttgaaatgctcgagcaaaatctctacgatttccttaaacagaacaagttctcccccttgcccttgaaatacatacgccctgtgctgcagcaggtcgctacagccctcatgaaactgaagtcgcttggcctcatccacgcagacctaaagcccgagaacataatgcttgtggatccctccaggcagccgtaccgcgtgaaagtaattgacttcggcagcgccagtcatgtttcaaaagctgtgtgttctacatacctgcagtctagatattatcgagctcctgaaattatcctgggactgcctttctgcgaggcaatcgatatgtggtctctgggctgtgtgattgcagagttgttcttggggtggcccttgtaccccggtgctagcgagtacgatcagatcagatatataagccagacgcaggggttgccagccgaatatctgttgagcgcaggcaccaagaccaccaggttcttcaaccgggatacagattcaccttacccactatggcggctgaagactccagatgaccatgaggctgagaccggtattaaaagtaaagaagccagaaagtatatattcaactgtctcgatgacatggcccaggttaacatgactaccgatctcgaaggctctgacatgctggtcgagaaggccgaccgccgagagtttattgacctactaaagaaaatgttaaccattgatgctgataaaagaatcacacccattgaaaccttgaaccatccattcgtgacgatgacacacttgttagactttccccattccacacacgtgaaaagctgctttcagaacatggagatctgtaagcggagagtgaatatgtacgacaccgtcaatcagagtaagacacccttcatcacgcatgtcgccccatctacctctacgaaccttaccatgacctttaataaccagctgactactgtccataaccagccttccgctgccagcatggcagcagtggcccaaaggagcatgcccttgcagaccgggaccgcccagatttgcgccagaccagacccctttcaacaagctctgatcgtgtgtcccccaggtttccagggactccaggcatcaccatcaaagcacgcgggttactccgtgcggatggagaatgcggtacccatagtgacgcaggcacccggagctcagcctctgcagatccagcctggtttacttgcccagcaggcttggccgagcggcacccagcagatattgctgcctcctgcgtggcagcagctgaccggggtggctacccacacgagcgtgcaacacgccactgtcatccctgaaaccatggcgggtacccagcagcttgccgactggaggaatactcacgcccacggatcacactataatccaattatgcagcagcccgcactacttacaggacatgtcacactgccagctgctcaaccactgaatgttggtgtggcccacgttatgcgccaacagcccacctcgaccacgtctagcagaaaatctaagcaacatcaatcctccgtacgcaacgtttcgacttgtgaggtcagttcatcgcaggccattagttcaccgcaaagatcaaaacgagtgaaggaaaacacaccacccaggtgcgcaatggtacactcctcgccagcctgtagtacaagcgtgacatgcggctggggggatgtggccagcagcactacgagggagagacaaaggcagacaatcgtcattccagacaccccctccccgaccgtcagcgtcattactatctctagcgacactgacgaagaagaggagcagaagcacgccccaaccagcacggtgagcaaacagagaaagaatgtgatctcctgtgtcacagttcacgactctccctattctgattcctcaagcaatacatcaccctactctgtgcagcagagagccggacataacaacgcaaatgcattcgataccaagggatctttggagaatcactgtaccgggaacccgcgtacgattatagtgcccccattgaagactcaggcaagcgaggtcctggtggaatgcgattccctcgtaccggtgaacacatcacatcattcatcctcatataagtcaaaaagcagcagcaatgtgacttccaccagcggccacagttctggaagtagctcaggagcaatcacctatcgccagcagagacccggaccacacttccagcagcaacagcccctgaacctctcccaggcccagcaacacatcacaactgaccggacgggctcccataggcgtcaacaggcctatatcacacctactatggctcaggcgccttattcgtttccgcataactccccgagtcatggaaccgtgcatccccacttggcggctgccgctgctgccgcacatttacctactcagccacacttgtacacctacaccgcccctgctgcccttgggagcacagggacagtggcccacctggttgcctctcagggctcggccaggcatactgtacagcacacagcgtatccggcatccatcgttcatcaggtaccggtgagtatgggacccagggtcctgccatcgcccaccatacacccttcccagtatccagctcagttcgcccaccagacttatatctctgcctccccggcttccactgtttataccggctaccctttaagccctgccaaagtgaaccagtacccctacatttag

SEQ ID NO: 42615 - DNA, 3516 bp, Artificial Sequence
  derived and/or modified sequence
atggcccccgtgtacgagggcatggccagccacgtgcaggtgttcagcccccacaccctgcagagcagcgccttctgcagcgtgaagaagctgaagatcgagcccagcagcaactgggacatgaccggctacggcagccacagcaaggtgtacagccagagcaagaacatccccctgagccagcccgccaccaccaccgtgagcaccagcctgcccgtgcccaaccccagcctgccctacgagcagaccatcgtgttccccggcagcaccggccacatcgtggtgaccagcgccagcagcaccagcgtgaccggccaggtgctgggcggcccccacaacctgatgagaagaagcaccgtgagcctgctggacacctaccagaagtgcggcctgaagagaaagagcgaggagatcgagaacaccagcagcgtgcagatcatcgaggagcacccccccatgatccagaacaacgccagcggcgccaccgtggccaccgccaccaccagcaccgccaccagcaagaacagcggcagcaacagcgagggcgactaccagctggtgcagcacgaggtgctgtgcagcatgaccaacacctacgaggtgctggagttcctgggcagaggcaccttcggccaggtggtgaagtgctggaagagaggcaccaacgagatcgtggccatcaagatcctgaagaaccaccccagctacgccagacagggccagatcgaggtgagcatcctggccagactgagcaccgagagcgccgacgactacaacttcgtgagagcctacgagtgcttccagcacaagaaccacacctgcctggtgttcgagatgctggagcagaacctgtacgacttcctgaagcagaacaagttcagccccctgcccctgaagtacatcagacccgtgctgcagcaggtggccaccgccctgatgaagctgaagagcctgggcctgatccacgccgacctgaagcccgagaacatcatgctggtggaccccagcagacagccctacagagtgaaggtgatcgacttcggcagcgccagccacgtgagcaaggccgtgtgcagcacctacctgcagagcagatactacagagcccccgagatcatcctgggcctgcccttctgcgaggccatcgacatgtggagcctgggctgcgtgatcgccgagctgttcctgggctggcccctgtaccccggcgccagcgagtacgaccagatcagatacatcagccagacccagggcctgcccgccgagtacctgctgagcgccggcaccaagaccaccagattcttcaacagagacaccgacagcccctaccccctgtggagactgaagacccccgacgaccacgaggccgagaccggcatcaagagcaaggaggccagaaagtacatcttcaactgcctggacgacatggcccaggtgaacatgaccaccgacctggagggcagcgacatgctggtggagaaggccgacagaagagagttcatcgacctgctgaagaagatgctgaccatcgacgccgacaagagaatcacccccatcgagaccctgaaccaccccttcgtgaccatgacccacctgctggacttcccccacagcacccacgtgaagagctgcttccagaacatggagatctgcaagagaagagtgaacatgtacgacaccgtgaaccagagcaagacccccttcatcacccacgtggcccccagcaccagcaccaacctgaccatgaccttcaacaaccagctgaccaccgtgcacaaccagcccagcgccgccagcatggccgccgtggcccagagaagcatgcccctgcagaccggcaccgcccagatctgcgccagacccgaccccttccagcaggccctgatcgtgtgcccccccggcttccagggcctgcaggccagccccagcaagcacgccggctacagcgtgagaatggagaacgccgtgcccatcgtgacccaggcccccggcgcccagcccctgcagatccagcccggcctgctggcccagcaggcctggcccagcggcacccagcagatcctgctgccccccgcctggcagcagctgaccggcgtggccacccacaccagcgtgcagcacgccaccgtgatccccgagaccatggccggcacccagcagctggccgactggagaaacacccacgcccacggcagccactacaaccccatcatgcagcagcccgccctgctgaccggccacgtgaccctgcccgccgcccagcccctgaacgtgggcgtggcccacgtgatgagacagcagcccaccagcaccaccagcagcagaaagagcaagcagcaccagagcagcgtgagaaacgtgagcacctgcgaggtgagcagcagccaggccatcagcagcccccagagaagcaagagagtgaaggagaacaccccccccagatgcgccatggtgcacagcagccccgcctgcagcaccagcgtgacctgcggctggggcgacgtggccagcagcaccaccagagagagacagagacagaccatcgtgatccccgacacccccagccccaccgtgagcgtgatcaccatcagcagcgacaccgacgaggaggaggagcagaagcacgcccccaccagcaccgtgagcaagcagagaaagaacgtgatcagctgcgtgaccgtgcacgacagcccctacagcgacagcagcagcaacaccagcccctacagcgtgcagcagagagccggccacaacaacgccaacgccttcgacaccaagggcagcctggagaaccactgcaccggcaaccccagaaccatcatcgtgccccccctgaagacccaggccagcgaggtgctggtggagtgcgacagcctggtgcccgtgaacaccagccaccacagcagcagctacaagagcaagagcagcagcaacgtgaccagcaccagcggccacagcagcggcagcagcagcggcgccatcacctacagacagcagagacccggcccccacttccagcagcagcagcccctgaacctgagccaggcccagcagcacatcaccaccgacagaaccggcagccacagaagacagcaggcctacatcacccccaccatggcccaggccccctacagcttcccccacaacagccccagccacggcaccgtgcacccccacctggccgccgccgccgccgccgcccacctgcccacccagccccacctgtacacctacaccgcccccgccgccctgggcagcaccggcaccgtggcccacctggtggccagccagggcagcgccagacacaccgtgcagcacaccgcctaccccgccagcatcgtgcaccaggtgcccgtgagcatgggccccagagtgctgcccagccccaccatccaccccagccagtaccccgcccagttcgcccaccagacctacatcagcgccagccccgccagcaccgtgtacaccggctaccccctgagccccgccaaggtgaaccagtacccctacatctag

SEQ ID NO: 42616 - protein, 1328 aa, Artificial Sequence
  derived and/or modified sequence
MDQKILSLAAEKTADKLQEFLQTLREGDLTNLLQNQAVKGKVAGALLRAIFKGSPCSEEAGTLRRRKIYTCCIQLVESGDLQKEIASEIIGLLMLEAHHFPGPLLVELANEFISAVREGSLVNGKSLELLPIILTALATKKENLAYGKGVLSGEECKKQLINTLCSGRWDQQYVIQLTSMFKDVPLTAEEVEFVVEKALSMFSKMNLQEIPPLVYQLLVLSSKGSRKSVLEGIIAFFSALDKQHNEEQSGDELLDVVTVPSGELRHVEGTIILHIVFAIKLDYELGRELVKHLKVGQQGDSNNNLSPFSIALLLSVTRIQRFQDQVLDLLKTSVVKSFKDLQLLQGSKFLQNLVPHRSYVSTMILEVVKNSVHSWDHVTQGLVELGFILMDSYGPKKVLDGKTIETSPSLSRMPNQHACKLGANILLETFKIHEMIRQEILEQVLNRVVTRASSPISHFLDLLSNIVMYAPLVLQSCSSKVTEAFDYLSFLPLQTVQRLLKAVQPLLKVSMSMRDCLILVLRKAMFANQLDARKSAVAGFLLLLKNFKVLGSLSSSQCSQSLSVSQVHVDVHSHYNSVANETFCLEIMDSLRRCLSQQADVRLMLYEGFYDVLRRNSQLANSVMQTLLSQLKQFYEPKPDLLPPLKLEACILTQGDKISLQEPLDYLLCCIQHCLAWYKNTVIPLQQGEEEEEEEEAFYEDLDDILESITNRMIKSELEDFELDKSADFSQSTSIGIKNNICAFLVMGVCEVLIEYNFSISSFSKNRFEDILSLFMCYKKLSDILNEKAGKAKTKMANKTSDSLLSMKFVSSLLTALFRDSIQSHQESLSVLRSSNEFMRYAVNVALQKVQQLKETGHVSGPDGQNPEKIFQNLCDITRVLLWRYTSIPTSVEESGKKEKGKSISLLCLEGLQKIFSAVQQFYQPKIQQFLRALDVTDKEGEEREDADVSVTQRTAFQIRQFQRSLLNLLSSQEEDFNSKEALLLVTVLTSLSKLLEPSSPQFVQMLSWTSKICKENSREDALFCKSLMNLLFSLHVSYKSPVILLRDLSQDIHGHLGDIDQDVEVEKTNHFAIVNLRTAAPTVCLLVLSQAEKVLEEVDWLITKLKGQVSQETLSEEASSQATLPNQPVEKAIIMQLGTLLTFFHELVQTALPSGSCVDTLLKDLCKMYTTLTALVRYYLQVCQSSGGIPKNMEKLVKLSGSHLTPLCYSFISYVQNKSKSLNYTGEKKEKPAAVATAMARVLRETKPIPNLIFAIEQYEKFLIHLSKKSKVNLMQHMKLSTSRDFKIKGNILDMVLREDGEDENEEGTASEHGGQNKEPAKKKRKK

SEQ ID NO: 42617 - protein, 73 aa, Artificial Sequence
  derived and/or modified sequence
MFKDVPLTAEEVEFVVEKALSMFSKMNLQEIPPLVYQLLVLSSKGSRKSVLEGIIAFFSALDKQHNEEQSGDE

SEQ ID NO: 42618 - DNA, 4749 bp, Artificial Sequence
  derived and/or modified sequence
tcttgttgttacgggtaacggaagtgtggcggcgttgggttgagcgggctttttggaagtttgtggcggagttctgtgatatgagcaacaatggaccagaagattttatctctagcagcagaaaaaacagcagacaaactgcaagaatttcttcaaaccctgagagaaggtgatttgactaatctccttcagaatcaagcagtgaaaggaaaagttgctggagcactcctgagagccatcttcaaaggttccccctgctctgaggaagctggaacacttaggagacgtaagatatacacttgttgtatccagttggtggaatcgggggatttgcagaaagaaatagcgtctgagatcataggattactgatgctggaggctcaccattttccaggaccattattggttgaattagccaatgagtttattagtgctgtcagagaaggcagcctagtgaatggaaaatctttggagttactacctatcattctcactgccctggctacgaaaaaggaaaatctggcttatggaaaaggtgtactgagtggggaagaatgtaagaaacagttgattaacaccctgtgttctggcaggtgggatcagcaatatgtaatccaactcacctccatgttcaaggatgtccctctgactgcagaagaggtggaatttgtggtggaaaaagcattgagcatgttctccaagatgaatcttcaagaaataccacctttggtctatcagcttctggttctctcctccaagggaagcagaaagagtgttttggaaggaatcatagccttcttcagtgcactagataagcagcacaatgaggaacagagtggtgacgagctattggatgttgtcactgtgccatcaggtgaacttcgtcatgtggaaggcaccattattctacacattgtgtttgccatcaaattggactatgaactaggcagagaactcgtgaaacacttaaaggtaggacagcaaggagattccaataataacttaagtcccttcagcattgctcttcttctgtctgtaacaagaatacaaagatttcaggaccaggtgcttgatcttttaaagacttcggttgtaaagagctttaaggatcttcaactcctccaaggctcaaaatttcttcagaatctagttcctcatagatcttatgtttcaaccatgatcttggaagtagtgaagaatagcgttcatagctgggaccatgttactcagggcctcgtagaacttggtttcattttgatggattcatatgggccaaagaaggttcttgatggaaaaactattgaaaccagcccaagtctttctagaatgccaaaccagcatgcatgtaagctcggagctaatatcctgttggaaacttttaagatccatgagatgatcagacaagaaattttggagcaggtcctcaacagggttgttaccagagcatcttctcccatcagtcatttcttagacctgctttcaaatatcgtcatgtatgcacccttagttcttcaaagttgttcttctaaagtcacagaagcttttgactatttgtcctttctgccccttcagactgtacaaaggctgcttaaggcagtgcagccccttctcaaagtcagcatgtcaatgagagactgcttgatacttgtccttcggaaagctatgtttgccaaccagcttgatgcccgaaaatctgcagttgctgggtttttgctgctcctgaagaactttaaagttttaggcagcctgtcatcctctcagtgcagtcagtctctcagtgtcagtcaggttcatgtggatgttcacagccattacaattctgtcgccaatgaaactttttgccttgagatcatggatagtttgaggagatgcttaagccagcaagctgatgttcgactcatgctttatgaggggttttatgatgttcttcgaaggaactctcagctggctaattcagtcatgcaaactctgctctcacagttaaaacagttctatgagccaaaacctgatctgctgcctcctctgaaattagaagcttgtattctgacccaaggagataagatctctctacaagaaccactggattatctgctgtgttgtattcagcattgtttggcctggtataagaatacagtcatacccttacagcagggagaggaggaagaggaggaggaagaggcattctacgaagacctagatgatatattggagtccattactaatagaatgattaagagtgagctggaagactttgaactggataaatcagcagatttttctcagagcaccagtattggcataaaaaataatatctgtgcttttcttgtgatgggagtttgtgaggttttaatagaatacaatttctccataagtagtttcagtaagaataggtttgaggacattctgagcttatttatgtgttacaaaaaactctctgacattcttaatgaaaaagcgggtaaagccaaaactaaaatggccaacaagacaagtgatagtcttttgtccatgaaatttgtgtccagtcttctcactgctcttttcagggatagtatccaaagccaccaagaaagcctttctgttctcaggtccagcaatgagtttatgcgctatgcagtgaatgtagctctgcagaaggtacagcagctaaaggaaacagggcatgtgagtggccctgatggccaaaacccagaaaagatctttcagaacctctgtgacataactcgagtcttgctatggagatacacttcaattcctacttcagtggaagagtcgggaaagaaagagaaaggaaagagcatctcactgctgtgcttggagggtttacagaaaatattcagtgctgtgcaacagttctatcagcccaagattcagcagtttctcagagctctggatgtcacagataaggaaggagaagagagagaagatgcagatgtcagtgtcactcagagaacagcattccagatccggcaatttcagaggtccttgttgaatttacttagcagtcaagaggaagattttaatagcaaagaagccctcctgctagtcacggttcttaccagtttgtccaagttactggagccctcctctcctcagtttgtgcagatgttatcctggacatcaaagatttgcaaggaaaacagccgggaggatgccttgttttgcaagagcttgatgaacttgctcttcagcctgcatgtttcgtataagagtcctgtcattctgctgcgtgacttgtcccaggatatccacgggcatctgggagatatagaccaggatgtagaggtggagaaaacaaaccactttgcaatagtgaatttgagaacggctgcccccactgtctgtttacttgttctgagtcaggccgagaaggttctagaagaagtggactggctaatcaccaagcttaagggacaagtgagccaagaaaccttatcagaagaggcctcttctcaggcaaccctaccaaatcagcctgttgagaaagctatcatcatgcaactgggaactctgcttacatttttccacgagctggtgcagacagctctgccatcaggcagctgtgtggacaccttgttaaaggacttgtgcaaaatgtacaccacacttacagcccttgtcagatattatctccaggtgtgtcagagctccggaggaattccaaaaaatatggaaaagctggtgaagctgtctggttctcatctgacccccctgtgttattctttcatttcttacgtacagaataagagtaagagcctgaactatacgggagagaaaaaggagaaacctgctgccgttgccacagccatggccagagttcttcgggaaaccaagccaatccctaacctcatctttgccatagaacagtatgaaaaatttctcatccacctttctaagaagtccaaggtgaacctgatgcagcacatgaagctcagcacctcacgagacttcaagatcaaaggaaacatcctagacatggttcttcgagaggatggtgaagatgaaaatgaagagggcactgcatcagagcatgggggacagaacaaagaaccagccaagaagaaaaggaaaaaataaatgaaatgcctgagttaatgtgaactttggggcttctgcttcatttttacccaacaagcaacaatgccccttgtcctgtagtccacaccgatgttggcatcttggttctgaacccactgaattcaactgcaccttcagttagaaggaatcttcttggcaggtcctgctactgaaaaatggctggccttaggcaagcccttttgcaaaaagcacagctgaaagcctgagtttgggagcctgcaccaccccgatgaagctccacgggagcaaatacagagcctccaggcagtgctatggtccaggctggcttcgtttttccaaggagcctttggtgagttcaattatctggtaaatatccagcgcttcacctgaaagatagtgcaaattggttaggatgccacctcaagaactgtaactgagagctcagaagtgagcaaaggagcttaatgctaaggtcaaaaggagagtgaaaggttgagaacaattgccacgaacggtaatgttacatgttaggagggtctgttttctttttatataagtgtgtcttagatatattttaaatagaaaataagctttctgatttacttgtttggtatttaaagcacagtttgtttttctgtcacctatagagtgcaagaatgcactctatagaataaattatctttaaacatt

SEQ ID NO: 42619 - DNA, 3987 bp, Artificial Sequence
  derived and/or modified sequence
atggatcaaaagatactctctctggccgccgagaagactgccgacaaactacaggaatttctgcaaactttgcgggagggagatcttactaacctgctccaaaatcaagcggtgaaagggaaggtagcgggagcacttctccgggcaatctttaaaggtagcccttgttctgaagaagctggtaccctgagacgtcggaagatttacacttgttgtattcagctggtagagagcggagacttgcagaaagaaatcgcttcagaaattattgggttgctgatgctcgaagctcatcactttccggggcccctgcttgtagagctggccaatgaatttatatctgccgttagagaggggtccttggtgaatggcaagagtctggaactgctgcccatcattttgaccgcactggctacaaagaaagagaacctggcatatggaaagggtgtgttatctggcgaagaatgtaagaagcaactcatcaataccctctgttctgggcgctgggatcagcagtatgttatccaactcacgtctatgtttaaggacgtgcccctcaccgcagaggaagtggagtttgtcgtcgagaaggccctgagtatgttctcaaaaatgaacctgcaggaaataccccccctcgtataccagttgctggttctgtctagcaaggggagtcgaaaatctgttttggaaggtatcatcgccttttttagcgccctagacaaacagcataatgaagagcagagcggggatgagctgttggacgtggtgaccgtgccaagcggtgagcttaggcatgtcgaggggactatcatactccacatcgtgttcgccattaaattggactatgagctgggacgagagctcgtaaaacacctgaaagtggggcagcagggggactcaaataacaacttgtccccctttagcatcgctctcttgctgtctgtcacgcgcatacagcgattccaagatcaggtgctggatcttttaaaaacatctgtagtcaagtccttcaaggacttgcagctgctacaggggtccaaatttctgcagaatcttgtgcctcatcggtcatacgtcagtactatgatcttagaggtggtgaagaattctgttcacagttgggaccacgttacacagggactggttgaactggggtttatcctgatggacagttatggaccaaagaaggtgttagatggcaaaaccattgagacatctccctcactgtctaggatgccaaaccagcacgcttgtaaattgggcgctaacatccttctagagactttcaagatacacgagatgatacgacaggaaatcctcgaacaggtccttaacagggtggttacacgggcctcgtctcctatctcccactttttggatctgctgtcgaacatcgttatgtacgctcccctcgtgttgcagtcctgcagtagtaaggtgacagaagctttcgactatctgagcttcttgccccttcagactgttcaaaggttacttaaggctgtccagccactgcttaaggtgtcaatgtccatgcgagattgtctgatcctagtgctgaggaaggcgatgttcgcaaatcagcttgatgcccgcaagtcagccgtggctggttttctgctgctgctaaaaaactttaaagtgctgggttccctcagcagctcccaatgcagtcaatccctctcagtgtcccaggtccacgtggatgtgcactctcactataattcagttgcaaatgagaccttttgtttagaaatcatggactctctgagacgatgtctatcccagcaggcggacgtccgtttgatgctgtacgagggattttatgacgtcctacggcggaattcgcagttggccaatagtgtgatgcaaaccttgctatctcagttaaagcaattctatgagcccaagccagacctgttgcctccactgaaactggaggcctgtatcctcactcagggcgacaaaattagccttcaggaaccccttgattacctgctgtgttgcatacaacactgtctcgcctggtacaaaaacaccgtgatacctttgcagcaaggcgaggaggaggaggaagaggaggaggctttctatgaggatctcgacgatatacttgaatcaattactaacaggatgattaagtctgagctcgaggacttcgaactggacaagtcggcggactttagccagtcgacttcaattggaatcaagaataatatttgtgcctttctggtaatgggggtctgcgaagtgttgatcgagtataactttagcatctcaagcttttcaaagaacaggtttgaagatatcctttctctgttcatgtgctacaagaaactgagtgacatcctgaatgagaaagcaggcaaagccaagacaaaaatggccaataagacgtccgatagccttctctcgatgaagtttgtttcatcactgctgaccgctctctttagggacagcattcaaagccatcaggagtccctgtccgttctgcggtctagtaatgagtttatgagatatgctgtcaatgtggcgctgcaaaaggttcagcagctgaaggaaacaggccatgtgtccgggcccgacggtcaaaacccagagaaaatattccagaacctatgtgacatcaccagggtgctcctctggcggtacacctcgattccgacctcagtggaagagtccgggaaaaaagagaagggtaaatccattagcctgctatgcctggagggtctgcaaaaaattttttccgccgttcagcagttttaccagccaaagatccagcagtttttgagagccctcgatgtgaccgataaggaaggcgaagaacgagaggatgcagatgtttcggtaactcagcgaacggcttttcagatacggcagtttcagaggtctctgctgaatcttctgagtagtcaggaagaagatttcaactccaaggaagccctcctccttgtgaccgtcttgacctcactgtccaagctgctggagccgtccagcccccaatttgttcagatgctctcttggacgagtaagatttgcaaggaaaactccagagaggatgccctcttctgcaagagcctgatgaatctcctgttctctctccacgtgagctacaagagccctgtgatcctgttgagagacctcagccaagacattcacgggcatctgggagatatcgaccaagacgtggaggtggaaaaaaccaatcatttcgccattgtgaatctgaggacagctgctcctacagtttgcctgcttgttctttcccaggccgagaaggtgctggaggaagttgattggctcattacaaaactcaagggccaggtctcccaggaaaccctcagtgaagaggcatcttcccaggccacgctacccaatcagcccgtcgagaaagccatcatcatgcaactggggaccttactgacgttttttcacgaactggtccagaccgctctgcccagcggctcctgcgtcgatacactgcttaaagacctgtgcaagatgtacaccacactgacagccttggtgcgctactaccttcaagtgtgccaatctagtgggggaattcccaagaacatggagaaactggtgaagctaagtggtagtcacctgacccctttgtgttacagctttatctcttacgtgcagaacaaatctaagagcttgaattatacaggcgagaagaaagagaagcctgctgccgtggcaacagcaatggcacgagtgctcagggaaacgaaacccatccccaatctaatatttgctattgagcagtacgagaaattcttgatacacctgagtaagaagagcaaggtcaacctcatgcagcatatgaagctgtcaacctctcgggactttaaaatcaagggtaatatcctggacatggtcctgcgtgaagatggggaagacgaaaacgaggaagggacagccagcgaacacggggggcagaataaagagccagcaaagaagaagaggaagaagtag

SEQ ID NO: 42620 - DNA, 3987 bp, Artificial Sequence
  derived and/or modified sequence
atggaccagaagatcctgagcctggccgctgagaagacagctgacaagctgcaggagttcctgcagaccctgcgggagggggacctgaccaacctgctgcagaaccaggccgtgaagggcaaggtggccggggccctgctgcgggccatcttcaagggcagcccctgcagcgaggaggccggcaccctgcggcggaggaagatctacacctgctgcatccagctggtggagagcggggacctgcagaaggagatcgccagcgagatcatcggcctgctgatgctggaggcccaccacttccctggccccctgctggtggagctggccaatgagttcatctctgctgtgcgggagggcagcctggtgaatggcaagagcctggagctgctgcccatcatcctgacagccctggccaccaagaaggagaacctggcctacggcaagggcgtgctgagcggggaggagtgcaagaagcagctgatcaacaccctgtgcagcggccgctgggaccagcagtatgtgatccagctgacctccatgttcaaggatgtgcccctgacagctgaggaggtggagtttgtggtggagaaggccctgtccatgttcagcaagatgaacctgcaggagatcccccccctggtgtaccagctgctggtgctgagcagcaagggcagcaggaagtctgtgctggagggcatcatcgccttcttcagcgccctggacaagcagcacaatgaggagcagagcggagatgagctgctggatgtggtgacagtgcccagcggggagctgcggcacgtggagggcaccatcatcctgcacatcgtgtttgccatcaagctggactatgagctgggccgggagctggtgaagcacctgaaggtgggccagcagggcgacagcaacaacaacctgagccccttcagcatcgccctgctgctgtctgtgacccgcatccagcgcttccaggaccaggtgctggacctgctgaagacctctgtggtgaagagcttcaaggacctgcagctgctgcagggcagcaagttcctgcagaacctggtgccccacaggagctatgtgtccaccatgatcctggaggtggtgaagaacagcgtgcacagctgggaccacgtgacccagggcctggtggagctgggcttcatcctgatggacagctatggccccaagaaggtgctggatggcaagaccatcgagaccagccccagcctgagcaggatgcccaaccagcacgcctgcaagctgggcgccaacatcctgctggagaccttcaagatccacgagatgatccggcaggagatcctggagcaggtgctgaacagagtggtgacccgggccagcagccccatcagccacttcctggacctgctgagcaacatcgtgatgtatgcccccctggtgctgcagagctgcagcagcaaggtgacagaggcctttgactacctgtccttcctgcccctgcagacagtgcagaggctgctgaaggctgtgcagcccctgctgaaggtgtccatgtccatgagggactgcctgatcctggtgctgaggaaggccatgtttgccaaccagctggatgccaggaagtctgctgtggccggcttcctgctgctgctgaagaacttcaaggtgctgggcagcctgagcagcagccagtgcagccagagcctgtctgtgtcccaggtgcacgtggatgtgcacagccactacaacagcgtggccaatgagaccttctgcctggagatcatggacagcctgcggcgctgcctgagccagcaggctgatgtgcggctgatgctgtatgagggcttctatgatgtgctgcggaggaacagccagctggccaacagcgtgatgcagaccctgctgagccagctgaagcagttctatgagcccaagccagacctgctgccccccctgaagctggaggcctgcatcctgacccagggcgacaagatcagcctgcaggagcccctggactacctgctgtgctgcatccagcactgcctggcctggtacaagaacacagtcatccccctgcagcagggcgaggaggaggaggaggaggaggaggccttctatgaggacctggatgacatcctggagagcatcaccaacaggatgatcaagtctgagctggaggactttgagctggacaagtctgctgacttcagccagagcaccagcatcggcatcaagaacaacatctgtgccttcctggtgatgggcgtgtgtgaggtgctgattgagtacaacttcagcatcagcagcttcagcaagaacagatttgaggacatcctgagcctcttcatgtgctacaagaagctgagtgacatcctgaatgagaaggccggcaaggccaagaccaagatggccaacaagaccagtgacagcctgctgtccatgaagtttgtgagcagcctgctgacagccctcttccgggacagcatccagagccaccaggagagcctgtctgtgctgcggagcagcaatgagttcatgagatatgctgtgaatgtggccctgcagaaggtgcagcagctgaaggagaccggccacgtgtctggcccagatggccagaaccctgagaagatcttccagaacctgtgtgacatcaccagggtgctgctgtggagatacaccagcatccccacctctgtggaggagagcggcaagaaggagaagggcaagagcatcagcctgctgtgcctggagggcctgcagaagatcttctctgctgtgcagcagttctaccagcccaagatccagcagttcctgcgggccctggatgtgacagacaaggagggggaggagagagaagatgctgatgtgtctgtgacccagaggacagccttccagatccggcagttccagaggagcctgctgaacctgctgagcagccaggaggaggacttcaacagcaaggaggccctgctgctggtgacagtgctgaccagcctgagcaagctgctggagcccagcagcccccagtttgtgcagatgctgtcctggaccagcaagatctgcaaggagaacagccgggaggatgccctcttctgcaagagcctgatgaacctgctcttcagcctgcacgtgtcctacaagagccctgtgatcctgctgcgggacctgagccaggacatccacggccacctgggggacatcgaccaggatgtggaggtggagaagaccaaccactttgccatcgtgaacctgaggacagctgcccccaccgtgtgcctgctggtgctgagccaggccgagaaggtgctggaggaggtggactggctgatcaccaagctgaagggccaggtgtcccaggagaccctgtctgaggaggccagcagccaggccaccctgcccaaccagcctgtggagaaggccatcatcatgcagctgggcaccctgctgaccttcttccacgagctggtgcagacagccctgcccagcggcagctgtgtggacaccctgctgaaggacctgtgcaagatgtacaccaccctgacagccctggtgcgctactacctgcaggtgtgccagagcagcggcggcatccccaagaacatggagaagctggtgaagctgagcggcagccacctgacccccctgtgctacagcttcatctcctatgtgcagaacaagagcaagagcctgaactacaccggggagaagaaggagaagccagctgctgtggccacagccatggcccgggtgctgcgggagaccaagcccatccccaacctgatctttgccatcgagcagtatgagaagttcctgatccacctgagcaagaagagcaaggtgaacctgatgcagcacatgaagctgagcaccagccgggacttcaagatcaagggcaacatcctggacatggtgctgcgggaggatggagaagatgaaaatgaggagggcacagccagcgagcacggcggccagaacaaggagcccgccaagaagaagaggaagaagtag

SEQ ID NO: 42621 - DNA, 3987 bp, Artificial Sequence
  derived and/or modified sequence
atggaccagaagatcctgagcctggccgccgagaagaccgccgacaagttgcaggaatttcttcagactctccgggagggggatctgacaaacctccttcaaaatcaggccgttaagggaaaggtggccggcgccctgctgagagccatcttcaagggatccccctgctccgaggaggccggcacattaagaagacgtaaaatttatacatgctgtattcaactggttgaaagcggggatctccaaaaggagatcgcaagtgagattatcggcctgcttatgctagaagcccaccactttcctgggcctctacttgtcgagcttgctaatgagtttatctccgctgtgcgcgagggttctctcgtcaatgggaagtcactggaattgttacctatcatcctgactgctcttgccaccaagaaggaaaacctcgcgtacggaaaaggtgtattgagcggagaggagtgcaagaagcagcttattaatacgttgtgttccggtcgctgggatcaacagtacgtcattcaactgacttccatgttcaaggacgtcccccttactgcagaagaggtggagtttgtcgtagagaaagccttatccatgttcagcaaaatgaacctgcaggagattccgcctctcgtctaccagctgctggttctgtcgtccaagggcagtcgaaagagtgtactagaaggaatcatcgcattcttctctgcactcgataaacaacacaatgaagaacaaagtggagatgagctcctggatgtggtcacagtgccgtctggcgagctaaggcatgttgaagggactatcattttacacattgtctttgccataaagctggactacgagttaggacgtgaactggtgaagcacctaaaggtggggcaacagggggattccaacaacaatctgtcaccattctccatcgcactcttattgagcgtgacaaggatccagaggttccaggatcaggtgctagatctccttaaaacctctgttgtgaaaagctttaaagaccttcagctgttgcaggggtctaaattcctgcagaacttagtgccccatagaagctacgtctcaaccatgatcttggaggtcgtaaaaaactccgtccactcttgggatcatgtgacgcagggattggttgaactgggctttattctgatggattcctacgggcctaagaaagtcctggatggtaagactattgagacgagcccctctctgtcccggatgccaaatcagcacgcatgcaagctgggagctaacatactgctagaaacattcaaaattcatgaaatgatccggcaagagatactcgagcaggtcctcaaccgcgtggtgactcgggcgtcctctccaatcagccacttcttagacctcctgtccaacatcgtcatgtacgccccgctcgtattacagtcatgcagctcgaaagtcactgaggcttttgactatttatcatttctgcccttacaaaccgtgcagcgtctgttaaaagcggtgcagcccctgctaaaggtaagcatgtcgatgcgggattgcctcattctcgtgttacgcaaggccatgtttgcaaatcagttggatgcaaggaagagcgcagttgcgggctttttgctactgctgaaaaacttcaaggttttagggtccctctccagttcccagtgtagccaaagtctgtccgtgtcccaagtgcacgttgacgttcacagccactataattccgtggcaaacgagactttttgtcttgagattatggatagcctgagacggtgcctgtcgcaacaggctgatgtaaggctcatgctgtacgagggtttttacgatgtgctgcggagaaatagccaactcgcaaatagtgtgatgcaaacactgctgtcacagctcaagcaattctacgagcccaaacccgacctgctacctcctctcaagttagaagcctgcattctcacccagggggataagatatcacttcaggaacccctcgactatctgctctgctgtatccagcactgtctcgcatggtacaaaaataccgtgatcccattgcagcagggtgaggaggaagaggaagaagaggaggcattctatgaggatcttgatgatattctcgaatcaataaccaaccgcatgattaagagcgaattagaggattttgaattagataagtctgcagactttagtcagagtacatcaatcggcattaaaaataatatatgtgcctttctggtcatgggagtttgtgaggtgttaatcgaatataactttagcatttcttcgtttagtaagaatcggtttgaggatattctgtccttgtttatgtgttacaagaaactcagcgacattttgaacgagaaagccggcaaagctaaaacaaagatggctaacaagacatccgatagtctgctctctatgaagttcgtcagctccctcctcaccgccttgtttcgggatagtattcagagccaccaggaatccctatctgttcttagaagctctaatgaatttatgcgttacgccgtcaacgtggcgttacagaaagtgcagcagcttaaagagactggacacgtgtccggccccgacggccagaatcctgagaagatcttccaaaatctatgcgatattacccgggtgctcttgtggagatatactagcattcccacatccgttgaagagtcaggcaaaaaagagaaagggaaaagcatcagcttactctgtctggaagggctacagaagattttttcagctgtgcagcagttctaccagcccaaaattcagcaattcctcagggctttagacgtgaccgacaaggagggtgaggagcgggaggacgcggacgttagcgtaacccagcgaacggctttccagattcggcagtttcaacggtcgctgctgaatctgctgagcagccaggaggaggacttcaactctaaagaggctctgctgctagtaacagttctgacgagcttgtcaaaactgctcgagccctcctcaccacaatttgtgcagatgttatcgtggacatccaagatttgtaaggaaaacagtagggaagatgctttgttctgtaagagtcttatgaatctcctgttcagcctgcacgtcagttacaaaagccctgtcatcctcttaagagacctctctcaggacatacacgggcacttgggcgatatagaccaggacgtggaagttgagaagactaatcattttgccattgttaacttaaggacggccgcaccgacggtgtgtctgctggtcttgagtcaggccgagaaggtacttgaggaagtggactggctgattacaaaactgaaaggccaagtcagccaagaaactctgtccgaggaggctagctcccaagccactttgccaaaccagccggtggaaaaggctattatcatgcaactgggcacactactgactttcttccacgagctggtccaaaccgcgctgcccagtggctcgtgcgtggacaccctgctgaaagacctctgtaaaatgtatacgacccttacagctttagtacggtattatctgcaggtctgtcagtcatccggagggatcccaaaaaatatggagaagttggtgaaactctccgggtctcacttaacccccctgtgctactcattcattagctatgtccaaaacaagtcgaagtccctcaattatacgggggagaagaaagagaaacccgccgccgtcgccaccgctatggcaagggtgctcagagagaccaagccgatccccaatctgatctttgcaattgaacagtatgagaagtttctcatccacctaagcaaaaaatcaaaagtgaatctgatgcagcacatgaaactcagcactagtcgagattttaaaatcaagggcaatatcctggatatggtgctgcgagaggacggagaagatgagaacgaagaggggactgccagcgaacatggcggccaaaacaaggagcccgcaaaaaaaaagaggaagaagtag

SEQ ID NO: 42622 - DNA, 3987 bp, Artificial Sequence
  derived and/or modified sequence
atggatcagaagatcttgtcactggctgcagagaagactgccgataaactgcaggagttcctgcaaacgctgagagagggcgatctgaccaatcttctgcagaatcaggccgtgaaaggaaaggttgctggcgctctgctgagggccatttttaaggggtcaccgtgctcagaagaagctggcacattacgaaggcgcaaaatttacacatgttgtattcagttggtggagtctggtgatctgcaaaaagagatcgctagcgagattatcggcctcctgatgttagaagcacaccacttccccggacctcttttagtggaactggccaatgaattcatttctgccgttagggagggcagcctagtcaacgggaaatctctagagctgctgcctatcattctcacggccctcgccactaagaaggagaacctagcctatgggaaaggcgtgctgagcggggaagaatgcaaaaagcaactgatcaacaccctctgttccgggagatgggatcagcagtacgtcattcagctcacctccatgttcaaggacgtgcctctgaccgcagaggaggtcgagttcgtggttgaaaaagcgctgtcaatgttttccaaaatgaatttgcaggaaatcccccctctcgtgtaccaattgcttgttctgtcatcaaaaggcagcaggaagagtgtgttggaaggaatcatcgccttcttcagtgcgttggataagcagcataacgaggagcagtctggagatgagcttctggatgtggtaactgtgccctcaggagaactcagacatgtggaagggaccattattctacacattgtgttcgccataaagctggactatgagctgggcagggaattggttaagcacttaaaagtagggcagcagggagattcaaataataatctgagtcccttctctatagccctccttctgtctgtgacaaggatccagaggtttcaggaccaagtgctcgacctcctaaagacgagcgtagtgaagtcgtttaaggatcttcaactcttacaagggagtaagtttctgcagaacctggtacctcaccgcagttacgtaagtacgatgattcttgaggtggtgaaaaatagtgtgcactcttgggatcacgttacgcagggcctggtggaactaggatttatcctcatggattcctacggcccaaaaaaggtgctcgacgggaaaacaattgagacttccccctcactgtctagaatgccaaatcagcatgcctgcaaactcggcgcaaatatcctacttgagacattcaagatccatgagatgatccggcaggagatcctggagcaagtgctgaaccgggtcgtgacaagggcaagctccccaatctcccatttcctggatctcctgagtaacatcgtgatgtatgctccattggtcctccagagctgctcatcgaaggtgactgaggcttttgattatctttcctttttgccattgcagaccgtgcagcggctgctcaaagctgtgcagcctcttttgaaggtgtcaatgagcatgagggattgcctgatactggttctgaggaaggccatgtttgccaatcagcttgacgctaggaagtccgccgtggctggatttctccttttgttgaagaatttcaaggtgttgggcagcctttcctcaagccaatgttcccagtctcttagcgtgagtcaagtacacgtcgacgttcacagccattataattccgttgccaatgagacgttctgcttggaaatcatggactctctaagacggtgcctgtcccagcaagctgatgttagattgatgctttatgagggattttatgatgtgctacgaagaaatagtcagctcgccaactcggtcatgcagacactcctctcccagctgaaacagttctacgaaccaaaacctgatctgttgcctcccctcaagctggaggcctgcatcttgacacaaggggataagattagtctgcaagagcctctcgattatctgctgtgctgcattcaacattgtctcgcttggtataaaaacacagttatcccgctgcaacaaggggaggaagaagaggaagaggaagaagccttttatgaagacctggatgatatcttggaaagcattaccaacaggatgatcaaaagtgagctagaagactttgagttagataaaagcgcggatttctcccagtccacctccattggcattaaaaataacatttgcgccttcctcgtgatgggcgtatgcgaggtcctgatcgaatacaatttttctatcagttcgttctccaaaaataggtttgaagatattcttagcttgttcatgtgctacaagaagctgtcagatatcctgaacgaaaaagccggaaaggccaaaactaagatggctaacaagaccagcgactccctgctgagcatgaagtttgtgagctccttattaaccgcactatttcgtgatagcatccagagccatcaggagtccctctccgtcttacgaagctctaatgagttcatgcggtatgcggtgaacgtggctcttcagaaggtgcagcagctcaaagagactggacatgtgtcaggtcccgacggccagaatccagaaaaaatttttcagaatctgtgcgacatcacgcgggtccttctctggcgatacacaagtatccccacatcagtggaggagagcggaaaaaaagaaaagggcaagtcgatcagtctactgtgcctagagggccttcagaaaatatttagcgcagttcaacagttctatcagccgaagatccagcagtttctgagggcactggatgtcaccgacaaagaaggtgaggagagagaggacgcagacgtgtctgtgacacagaggactgctttccagatccgacagtttcagagatcacttctcaatctgttgagttcacaagaggaagactttaactcgaaggaggcccttctcttagtgaccgtgctgacaagcctttccaagctgctcgaaccttcttcaccccagttcgtccagatgctaagttggacttctaaaatttgcaaggagaacagccgcgaggatgccctgttttgcaaaagccttatgaacctgctattttccctccatgttagttacaaatcaccagtgatcttgctgagggacttatcacaggacatccatggtcacttaggggatattgaccaggacgtggaagtggagaagaccaatcatttcgcaatcgtaaatttgcgcactgcggcaccaaccgtttgtctgctggtgctgagtcaagccgaaaaggtgctcgaagaagttgattggttaatcacaaaactgaaaggccaagtgtcgcaggagactttgagcgaagaagcttccagccaggccacactgcctaaccagcccgttgagaaggccattatcatgcagctggggacccttctcacattctttcatgagctggtccagacggcattgccgagcgggtcgtgcgttgacaccctgcttaaggatctgtgcaaaatgtatactaccttaacagccctggtgagatactatctccaggtgtgtcaatcttctgggggaatccccaagaacatggagaagctggtcaagttgagcggatcccacctcacacctctgtgctactcatttatctcatacgtccagaacaagtccaagagccttaactacaccggcgaaaagaaggagaagcccgctgccgttgcgacggcaatggcacgagtgctgagggagaccaaacccatacccaaccttatcttcgccatagaacagtatgagaagtttctgattcacctaagcaagaaatccaaggttaacctcatgcagcacatgaaactgagcacttccagagacttcaagataaaagggaacatcctggatatggtgcttagggaggacggtgaggatgaaaacgaggagggaacggcctccgagcacggtggtcagaacaaagagcctgcgaagaagaagaggaaaaaatag

SEQ ID NO: 42623 - DNA, 3987 bp, Artificial Sequence
  derived and/or modified sequence
atggaccagaagatcctgagcctggccgccgagaagaccgccgacaagctgcaggagttcctgcagaccctgagagagggcgacctgaccaacctgctgcagaaccaggccgtgaagggcaaggtggccggcgccctgctgagagccatcttcaagggcagcccctgcagcgaggaggccggcaccctgagaagaagaaagatctacacctgctgcatccagctggtggagagcggcgacctgcagaaggagatcgccagcgagatcatcggcctgctgatgctggaggcccaccacttccccggccccctgctggtggagctggccaacgagttcatcagcgccgtgagagagggcagcctggtgaacggcaagagcctggagctgctgcccatcatcctgaccgccctggccaccaagaaggagaacctggcctacggcaagggcgtgctgagcggcgaggagtgcaagaagcagctgatcaacaccctgtgcagcggcagatgggaccagcagtacgtgatccagctgaccagcatgttcaaggacgtgcccctgaccgccgaggaggtggagttcgtggtggagaaggccctgagcatgttcagcaagatgaacctgcaggagatcccccccctggtgtaccagctgctggtgctgagcagcaagggcagcagaaagagcgtgctggagggcatcatcgccttcttcagcgccctggacaagcagcacaacgaggagcagagcggcgacgagctgctggacgtggtgaccgtgcccagcggcgagctgagacacgtggagggcaccatcatcctgcacatcgtgttcgccatcaagctggactacgagctgggcagagagctggtgaagcacctgaaggtgggccagcagggcgacagcaacaacaacctgagccccttcagcatcgccctgctgctgagcgtgaccagaatccagagattccaggaccaggtgctggacctgctgaagaccagcgtggtgaagagcttcaaggacctgcagctgctgcagggcagcaagttcctgcagaacctggtgccccacagaagctacgtgagcaccatgatcctggaggtggtgaagaacagcgtgcacagctgggaccacgtgacccagggcctggtggagctgggcttcatcctgatggacagctacggccccaagaaggtgctggacggcaagaccatcgagaccagccccagcctgagcagaatgcccaaccagcacgcctgcaagctgggcgccaacatcctgctggagaccttcaagatccacgagatgatcagacaggagatcctggagcaggtgctgaacagagtggtgaccagagccagcagccccatcagccacttcctggacctgctgagcaacatcgtgatgtacgcccccctggtgctgcagagctgcagcagcaaggtgaccgaggccttcgactacctgagcttcctgcccctgcagaccgtgcagagactgctgaaggccgtgcagcccctgctgaaggtgagcatgagcatgagagactgcctgatcctggtgctgagaaaggccatgttcgccaaccagctggacgccagaaagagcgccgtggccggcttcctgctgctgctgaagaacttcaaggtgctgggcagcctgagcagcagccagtgcagccagagcctgagcgtgagccaggtgcacgtggacgtgcacagccactacaacagcgtggccaacgagaccttctgcctggagatcatggacagcctgagaagatgcctgagccagcaggccgacgtgagactgatgctgtacgagggcttctacgacgtgctgagaagaaacagccagctggccaacagcgtgatgcagaccctgctgagccagctgaagcagttctacgagcccaagcccgacctgctgccccccctgaagctggaggcctgcatcctgacccagggcgacaagatcagcctgcaggagcccctggactacctgctgtgctgcatccagcactgcctggcctggtacaagaacaccgtgatccccctgcagcagggcgaggaggaggaggaggaggaggaggccttctacgaggacctggacgacatcctggagagcatcaccaacagaatgatcaagagcgagctggaggacttcgagctggacaagagcgccgacttcagccagagcaccagcatcggcatcaagaacaacatctgcgccttcctggtgatgggcgtgtgcgaggtgctgatcgagtacaacttcagcatcagcagcttcagcaagaacagattcgaggacatcctgagcctgttcatgtgctacaagaagctgagcgacatcctgaacgagaaggccggcaaggccaagaccaagatggccaacaagaccagcgacagcctgctgagcatgaagttcgtgagcagcctgctgaccgccctgttcagagacagcatccagagccaccaggagagcctgagcgtgctgagaagcagcaacgagttcatgagatacgccgtgaacgtggccctgcagaaggtgcagcagctgaaggagaccggccacgtgagcggccccgacggccagaaccccgagaagatcttccagaacctgtgcgacatcaccagagtgctgctgtggagatacaccagcatccccaccagcgtggaggagagcggcaagaaggagaagggcaagagcatcagcctgctgtgcctggagggcctgcagaagatcttcagcgccgtgcagcagttctaccagcccaagatccagcagttcctgagagccctggacgtgaccgacaaggagggcgaggagagagaggacgccgacgtgagcgtgacccagagaaccgccttccagatcagacagttccagagaagcctgctgaacctgctgagcagccaggaggaggacttcaacagcaaggaggccctgctgctggtgaccgtgctgaccagcctgagcaagctgctggagcccagcagcccccagttcgtgcagatgctgagctggaccagcaagatctgcaaggagaacagcagagaggacgccctgttctgcaagagcctgatgaacctgctgttcagcctgcacgtgagctacaagagccccgtgatcctgctgagagacctgagccaggacatccacggccacctgggcgacatcgaccaggacgtggaggtggagaagaccaaccacttcgccatcgtgaacctgagaaccgccgcccccaccgtgtgcctgctggtgctgagccaggccgagaaggtgctggaggaggtggactggctgatcaccaagctgaagggccaggtgagccaggagaccctgagcgaggaggccagcagccaggccaccctgcccaaccagcccgtggagaaggccatcatcatgcagctgggcaccctgctgaccttcttccacgagctggtgcagaccgccctgcccagcggcagctgcgtggacaccctgctgaaggacctgtgcaagatgtacaccaccctgaccgccctggtgagatactacctgcaggtgtgccagagcagcggcggcatccccaagaacatggagaagctggtgaagctgagcggcagccacctgacccccctgtgctacagcttcatcagctacgtgcagaacaagagcaagagcctgaactacaccggcgagaagaaggagaagcccgccgccgtggccaccgccatggccagagtgctgagagagaccaagcccatccccaacctgatcttcgccatcgagcagtacgagaagttcctgatccacctgagcaagaagagcaaggtgaacctgatgcagcacatgaagctgagcaccagcagagacttcaagatcaagggcaacatcctggacatggtgctgagagaggacggcgaggacgagaacgaggagggcaccgccagcgagcacggcggccagaacaaggagcccgccaagaagaagagaaagaagtag

SEQ ID NO: 42624 - DNA, 564 bp, Artificial Sequence
  derived and/or modified sequence
atgaagcacaggctcggctttttgctgcagaagtctgattcctgtgaacacaattcatcccataataaaaaagacaaggtggtgatttgtcagagggtctcccaagaggaagtgaaaaagtgggctgaaagcctcgaaaaccttatctcccacgagtgcggcctggcagccttcaaggccttcctcaagagcgagtactcagaagagaatatcgacttttggatatcctgcgaagaatacaaaaaaatcaaaagccctagcaaactttccccaaaagccaagaagatttacaatgaatttatcagcgtccaggctactaaggaggtgaacctggattcttgcacccgggaggagaccagccgaaatatgctggaacctaccataacatgctttgatgaagcccagaagaagatcttcaacttaatggaaaaggactcttatcgacgtttcctgaagtctcgattctatctcgacctggtcaatccaagcagctgtggagctgagaaacaaaagggggcgaagagctccgctgattgcgccagtctggtgccgcagtgcgcatag

SEQ ID NO: 42625 - DNA, 564 bp, Artificial Sequence
  derived and/or modified sequence
atgaagcacaggttaggattccttctacagaagtcggactcatgtgagcataatagtagccacaacaagaaagacaaggtagtgatctgtcagcgggtatctcaggaggaggtaaagaaatgggccgaaagcttggagaatctgatctcccatgaatgtggcctggccgccttcaaagctttccttaaatccgaatatagtgaggagaacatagatttttggatttcatgcgaagaatataagaaaattaagagcccctcaaaactgtcgcctaaagccaaaaagatttacaatgagttcatatccgtccaggctaccaaagaggtcaatctggactcgtgcaccagggaggaaacaagcagaaatatgttagaacctactatcacctgtttcgatgaagcacaaaaaaaaatttttaacctgatggagaaagacagctacagaagattcctgaaatccagattctacctcgatttagtaaatccgagctcttgcggagccgagaagcagaagggtgcgaaatcatctgctgattgcgcatccctggttccgcaatgtgcctag

SEQ ID NO: 42626 - DNA, 432 bp, Artificial Sequence
  derived and/or modified sequence
atgaaacaccgattgggcttcctactccagaagagcgattcatgcgagcacaatagctcccacaataaaaaagataaggtcgtcatatgtcagagagtgagccaggaggaggtcaagaagtgggctgaaagtctcgagaacctgatctcccatgagtgcggattagccgcctttaaggcctttttgaaatccgagtactcagaggaaaacatcgatttctggatcagctgtgaggaatataagaaaataaaatctccgagtaagctgtcaccaaaggccaaaaaaatctacaacgagttcataagtgttcaggccaccaaagaggtgaaccttgatagctgcaccagagaagaaacctctagaaatatgttagaacctaccattacttgttttgacgaggctcagaaaaaaatattcaacctcatggagtag

SEQ ID NO: 42627 - DNA, 564 bp, Artificial Sequence
  derived and/or modified sequence
atgaagcaccggctgggcttcctgctgcagaagagtgacagctgtgagcacaacagcagccacaacaagaaggacaaggtggtgatctgccagagggtgtcccaggaggaggtgaagaagtgggccgagagcctggagaacctgatcagccatgaatgtggcctggccgccttcaaggccttcctgaagtctgagtacagtgaagaaaatattgacttctggatcagctgtgaggagtacaagaagatcaagagccccagcaagctgagccccaaggccaagaagatctacaatgagttcatctctgtgcaggccaccaaggaggtgaacctggacagctgcacccgggaggagaccagcaggaacatgctggagcccaccatcacctgctttgatgaggcccagaagaagatcttcaacctgatggagaaggacagctaccgccgcttcctgaagagccgcttctacctggacctggtgaaccccagcagctgtggggctgagaagcagaagggggccaagagcagcgctgactgtgccagcctggtgccccagtgtgcctag

SEQ ID NO: 42628 - DNA, 432 bp, Artificial Sequence
  derived and/or modified sequence
atgaagcaccggctgggcttcctgctgcagaagagtgacagctgtgagcacaacagcagccacaacaagaaggacaaggtggtgatctgccagagggtgtcccaggaggaggtgaagaagtgggccgagagcctggagaacctgatcagccatgaatgtggcctggccgccttcaaggccttcctgaagtctgagtacagtgaagaaaatattgacttctggatcagctgtgaggagtacaagaagatcaagagccccagcaagctgagccccaaggccaagaagatctacaatgagttcatctctgtgcaggccaccaaggaggtgaacctggacagctgcacccgggaggagaccagcaggaacatgctggagcccaccatcacctgctttgatgaggcccagaagaagatcttcaacctgatggagtag

SEQ ID NO: 42629 - DNA, 564 bp, Artificial Sequence
  derived and/or modified sequence
atgaagcaccggctgggcttcctgctgcagaagagcgacagctgcgagcacaattcttctcacaacaagaaagacaaggtggtgatttgccagcgcgtcagtcaggaggaggtcaaaaagtgggcggaatcgctggagaaccttatctcccacgaatgcggattggcagctttcaaagcattcttgaagtccgagtactcagaggagaacattgatttctggatctcatgcgaagagtacaagaaaatcaagagcccctcaaagcttagccccaaagctaaaaagatttataatgagtttatcagtgtgcaggcaaccaaggaggtcaatctcgacagctgcaccagggaagaaactagtcgaaatatgttggaaccaacaataacatgtttcgacgaagcccagaagaagatattcaatctgatggaaaaggactcatataggcgctttttgaagtcccggttctacctggatcttgtgaatccctcctcatgtggcgccgagaagcagaagggggctaagagctccgccgattgcgcgtctctcgtaccccagtgcgcctag

SEQ ID NO: 42630 - DNA, 564 bp, Artificial Sequence
  derived and/or modified sequence
atgaagcaccggctgggcttcctgctgcagaagagcgacagctgcgagcacaatagcagccacaacaaaaaggataaggtggtcatatgccagcgcgtctcccaggaggaagtcaagaagtgggccgaaagtctagagaacctgatctctcatgaatgcggcctggctgcttttaaggctttccttaagtccgagtactctgaggagaacatcgacttctggatctcatgtgaagaatacaaaaaaataaagtcccctagcaagctttccccaaaggcaaaaaagatctacaacgaattcataagtgttcaggccaccaaagaggtgaatctagacagctgtacgcgggaggaaacatcacggaacatgctggagcctacaatcacttgcttcgatgaggctcaaaagaaaatctttaacctcatggaaaaggatagttatcgaagattcctcaaaagtcgattttatttggatctcgtgaaccccagttcctgcggcgccgaaaagcaaaagggggccaaatcatctgcggattgcgccagcctggtacctcagtgtgcatag

SEQ ID NO: 42631 - DNA, 432 bp, Artificial Sequence
  derived and/or modified sequence
atgaagcaccggctgggcttcctgctgcagaagagcgacagctgcgaacacaattctagccacaacaaaaaggacaaggtggttatttgtcaacgagtgtcccaggaagaggtgaagaaatgggccgagtccctggagaatctgatttcccacgagtgtggtctggcagcttttaaagcgttcctcaaaagcgagtatagtgaggaaaatatcgatttttggattagctgtgaggagtataagaagataaagagcccctcgaagctttcgcccaaagctaaaaagatctacaacgagttcattagcgtccaagccaccaaagaagttaatctggactcctgcaccagggaagagacctctagaaacatgctggaaccaacgattacttgctttgacgaggctcagaaaaagatattcaatctgatggagtag

SEQ ID NO: 42632 - DNA, 564 bp, Artificial Sequence
  derived and/or modified sequence
atgaagcacaggctcggctttcttctccagaagtctgacagctgtgagcacaatagttcacataataaaaaggataaggtcgtcatctgccagagggtgtcccaggaggaggtgaagaagtgggccgaaagtctggagaatctgatttctcacgaatgcggtctggcagcattcaaggcattcttgaagtctgagtattccgaagagaatatcgatttttggatctcatgtgaagagtacaagaaaatcaagtctccatcaaagctgtcaccgaaggccaaaaagatctacaacgagttcattagcgttcaggcaaccaaagaggtgaacctggactcctgtacccgcgaagagacgtcccggaatatgctggaacctacaattacttgcttcgacgaagcccagaaaaagatattcaatttaatggagaaagatagctatcggcgatttctgaagagccggttctatctcgatctggtgaacccatcatcttgcggcgctgagaaacagaaaggcgctaagagctccgccgactgcgccagcctcgtgccacagtgcgcctag

SEQ ID NO: 42633 - DNA, 564 bp, Artificial Sequence
  derived and/or modified sequence
atgaagcacagactgggcttcttactgcagaaatccgactcatgcgagcataactcatcccacaacaaaaaggacaaggtggtcatctgccagcgtgtgagccaggaagaagtcaagaagtgggcggagtctcttgagaacttgatttcacacgaatgtggcctggcggcattcaaggccttcctcaagagcgagtatagcgaggaaaacatagacttttggatctcatgtgaggagtataagaaaatcaagtccccatccaaattgtctccaaaggcaaaaaagatttacaacgaatttatatccgtgcaagctaccaaggaggtgaacctagacagctgcacaagggaggaaacctcacgcaacatgctcgagccaaccattacatgtttcgacgaagctcaaaagaagatctttaacttaatggagaaggactcctaccgcaggttcttgaaatcccgattctatctggacctggttaacccatccagttgcggagcagaaaaacagaaaggagccaaaagcagtgctgactgtgcatcgttggttccccaatgcgcgtag

SEQ ID NO: 42634 - DNA, 432 bp, Artificial Sequence
  derived and/or modified sequence
atgaagcatcggctgggtttcctcttacagaagagtgattcttgcgagcacaactcttctcacaacaagaaagacaaagtcgtgatatgccagagagtctctcaggaggaggtgaaaaaatgggcagagtccctggagaatttgatcagtcatgagtgtgggcttgccgcattcaaggctttcttaaaatccgaatattctgaggagaatattgacttttggatttcatgtgaagagtacaaaaagatcaagagtcccagcaagttgtcccccaaggccaagaagatttacaacgaattcatcagcgtgcaggctactaaggaggtcaaccttgacagttgtaccagagaagagacaagtagaaatatgctcgagccgacgattacgtgcttcgacgaagcacagaagaagatttttaacctgatggagtag

SEQ ID NO: 42635 - DNA, 564 bp, Artificial Sequence
  derived and/or modified sequence
atgaagcacagactgggcttcctgctgcagaagagcgacagctgcgagcacaacagcagccacaacaagaaggacaaggtggtgatctgccagagagtgagccaggaggaggtgaagaagtgggccgagagcctggagaacctgatcagccacgagtgcggcctggccgccttcaaggccttcctgaagagcgagtacagcgaggagaacatcgacttctggatcagctgcgaggagtacaagaagatcaagagccccagcaagctgagccccaaggccaagaagatctacaacgagttcatcagcgtgcaggccaccaaggaggtgaacctggacagctgcaccagagaggagaccagcagaaacatgctggagcccaccatcacctgcttcgacgaggcccagaagaagatcttcaacctgatggagaaggacagctacagaagattcctgaagagcagattctacctggacctggtgaaccccagcagctgcggcgccgagaagcagaagggcgccaagagcagcgccgactgcgccagcctggtgccccagtgcgcctag

SEQ ID NO: 42636 - DNA, 432 bp, Artificial Sequence
  derived and/or modified sequence
atgaagcacagactgggcttcctgctgcagaagagcgacagctgcgagcacaacagcagccacaacaagaaggacaaggtggtgatctgccagagagtgagccaggaggaggtgaagaagtgggccgagagcctggagaacctgatcagccacgagtgcggcctggccgccttcaaggccttcctgaagagcgagtacagcgaggagaacatcgacttctggatcagctgcgaggagtacaagaagatcaagagccccagcaagctgagccccaaggccaagaagatctacaacgagttcatcagcgtgcaggccaccaaggaggtgaacctggacagctgcaccagagaggagaccagcagaaacatgctggagcccaccatcacctgcttcgacgaggcccagaagaagatcttcaacctgatggagtag

SEQ ID NO: 42637 - protein, 93 aa, Artificial Sequence
  derived and/or modified sequence
MCKGLAGLPASCLRSAKDMKHRLGFLLQKSDSCEHNSSHNKKDKVVICQRVSQEEVKKWAESLENLISHECEPGFLHQGRDKPEHARAYNNLL

SEQ ID NO: 42638 - DNA, 282 bp, Artificial Sequence
  derived and/or modified sequence
atgtgcaaggggttggccgggctgcccgcatcttgcctgagatctgctaaggatatgaaacaccggcttggcttcctgcttcagaaatccgactcttgcgaacacaattcctcccacaataagaaagacaaagtggtgatttgccagcgcgtttcacaggaagaagttaagaaatgggcagagtccctagagaatcttatttcacatgaatgcgagcctggatttctgcaccagggtagagacaagcctgagcacgccagagcctacaacaacctgctgtag

SEQ ID NO: 42639 - DNA, 282 bp, Artificial Sequence
  derived and/or modified sequence
atgtgcaagggcctggccggcctgcctgccagctgcctgcggagcgccaaggacatgaagcaccggctgggcttcctgctgcagaagagtgacagctgtgagcacaacagcagccacaacaagaaggacaaggtggtgatctgccagagggtgtcccaggaggaggtgaagaagtgggccgagagcctggagaacctgatcagccatgaatgtgagcccggcttcctgcaccagggccgggacaagccagagcacgcccgggcctacaacaacctgctgtag

SEQ ID NO: 42640 - DNA, 282 bp, Artificial Sequence
  derived and/or modified sequence
atgtgcaagggcctggccggcctgcccgccagctgcctgcggagcgccaaagatatgaagcaccggctgggatttctgctgcagaaaagtgactcctgcgagcacaatagtagccataacaagaaggacaaggtcgttatctgccagcgtgtctctcaggaagaagtgaaaaagtgggctgaatccctggaaaacctaattagccacgagtgtgagcccgggttcctgcatcagggccgcgataagccagaacatgcaagggcatataacaatctgttgtag

SEQ ID NO: 42641 - DNA, 282 bp, Artificial Sequence
  derived and/or modified sequence
atgtgtaaagggctagccggtttaccagcctcatgcctacgctctgccaaggatatgaaacacagactgggcttcctcctccagaaatcagatagctgcgagcacaactcatcccataataagaaagataaagtggttatttgccaacgggtgtcacaggaggaggttaagaagtgggccgaaagcttagaaaacttgattagccatgagtgtgaacccggttttttgcaccagggacgggataagcccgagcatgccagggcctacaacaacctcctctag

SEQ ID NO: 42642 - DNA, 2606 bp, Artificial Sequence
  derived and/or modified sequence
aagacgctcagaggattctgacaatatctttaccggagaagaggcaaagtacgctcaaagccgaagccacagctcctcctgccgcatttctttcctgcttgcgaattccaagctgttaaataagatgtgcaaagggcttgcaggtctgccggcttcttgcttgaggagtgcaaaagatatgaaacatcggctaggtttcctgctgcaaaaatctgattcctgtgaacacaattcttcccacaacaagaaggacaaagtggttatttgccagagagtgagccaagaggaagtcaagaaatgggctgaatcactggaaaacctgattagtcatgaatgtgaacctggattcttgcaccagggaagagacaagccggaacatgctagagcctacaataacctgctttgatgaggcccagaagaagattttcaacctgatggagaaggattcctaccgccgcttcctcaagtctcgattctatcttgatttggtcaacccgtccagctgtggggcagaaaagcagaaaggagccaagagttcagcagactgtgcttccctggtccctcagtgtgcctaattctcacctgaaggcagagggatgaaatgccaagactctatgctctggaaaacctgaggccaaatattgatctgtattaagctccagtgctttatccacattgtagcctaatattcatgctgcctgccatgtgtgagtcacttctacgcataaactagatatagcttttggtgtttgagtgttcatcagggtgggaccccattccagtccaattttcctaagtttctttgagggttccatgggagcaaatatctaaataatggcctggtaggtctggattttcaaagattgttggcagtttcctcctcccaacagttttacctcgggatggttggttagtgcatgtcacatgacatccacatgcacatgtattctgttggccagcacgttctccagactctagatgtttagatgaggttgagctatgatatgtgcttgtgtgtatgtctatgtgtatatattatatatacattagacacacatatacattatttctgtatatagatgtctgtgtatacatatgtatgtgtgagtgtatgtatacacacacacacacacacacacacacacttttgcaagagtgatgggaaagaccctaggtgctcataactagagtatgtgtatgtacttacatgggtgttttgatctctgttctttcatactacatttgaacagggcaaaatgaactaactgccatgtaggctaagaaagaaatgctaacctgtggaaagttggttttgtaaaattccatggatcttgctggagaagcatccaaggaacttcatgcttgatttgaccactgacagcctccaccttgagcactattctaaggagcaaataccttagctcccttgagctggttttctctgatggcacttttgagctcctaagctgccagccttcccttcttttcctgggtgctcagggcatgcttattagcagctgggttggtatggagttggcagacaggatgttcaacttaatgaagaaatacagctaaggccttgccagcaacacctgccgtaagttactggctgagtgagggcatagaagttaaaggttactgtttttatcctctatccttttttcctttcctgatcaaggtgctcttctcattttttcctgagaaccttagccatcagatgaggctccttagtttattgtggttggttgttttttctttataatggctctgggctatatgcctatatttataaaccagcagcaggggaaagattatattttataagagggaacaaattttcacaatttgaaaagcccacataagttttctcttttaaggtagaatcttgttaatttcattccaaacatcggggctaacagagactggaggcatttctttttaggctctgagactaaatgagaggaaaagaaaagaaaaaaaaaatgattgtctaaccaattgtgagaattactgtttgaaacttttcaaggcacattgaaatacttgaaaacttctcatttatgttatttatgatgttattttgtacgtgttattattattatattgttttataaatggaggtacaggatatcacctgaattattaatgaatgcccaggaagtaattttcttctcattcttctaaaactactgcctttcaaagtgcacacacacgcgtccacatacactgcattcgttgctccagtataaattacatgcatgagcacctttctggcttttaagccaatataatgggctgcaaaatgaagacaccagagtgtatgcatacaaatctcactgtattaaagatgcaggttttctaattgtacccttcttgtctctctggcaatcttgcccttaatatccctggagttcctcatcagtgtcattttctgttatacacagttccacaattttgtctctagttgacttcaaatgtgtaactttattggtcttgccctattataattgtcatgactttcagattgtatctgaactcacagactgctgtcttactaataggtctggaaggtcacgctgaatgagaagtaaattattttatgtaat

SEQ ID NO: 42643 - DNA, 282 bp, Artificial Sequence
  derived and/or modified sequence
atgtgcaagggcctggccggcctgcccgccagctgcctgagaagcgccaaggacatgaagcacagactgggcttcctgctgcagaagagcgacagctgcgagcacaacagcagccacaacaagaaggacaaggtggtgatctgccagagagtgagccaggaggaggtgaagaagtgggccgagagcctggagaacctgatcagccacgagtgcgagcccggcttcctgcaccagggcagagacaagcccgagcacgccagagcctacaacaacctgctgtag

SEQ ID NO: 42644 - protein, 369 aa, Artificial Sequence
  derived and/or modified sequence
MMQPSLDIKPFMSFPVDSSSAVGLFPNFNTMDPVQKAVINHTFGVSIPPKKKQVISCNVCQLRFNSDSQAEAHYKGSKHAKKVKALDATKNKPKMVPSKDSAKANPSCSITPITGNNSDKSEDKGKLKASSSSQPSSSESGSFLLKSGTTPLPPGAATSPSKSTNGAPGTVVESEEEKAKKLLYCSLCKVAVNSLSQLEAHNTGSKHKTMVEARNGAGPIKSYPRPGSRLKMQNGSKGSGLQNKTFHCEICDVHVNSEIQLKQHISSRRHKDRVAGKPLKPKYSPYNKLQRSPSILAAKLAFQKDMMKPLAPAFLSSPLAAAAAVSSALSLPPRPSASLFQAPAIPPALLRPGHGPIRATPASILFAPY

SEQ ID NO: 42645 - protein, 395 aa, Artificial Sequence
  derived and/or modified sequence
MWSGLPSRGSTCHTTTLPALVRTPTLMMQPSLDIKPFMSFPVDSSSAVGLFPNFNTMDPVQKAVINHTFGVSIPPKKKQVISCNVCQLRFNSDSQAEAHYKGSKHAKKVKALDATKNKPKMVPSKDSAKANPSCSITPITGNNSDKSEDKGKLKASSSSQPSSSESGSFLLKSGTTPLPPGAATSPSKSTNGAPGTVVESEEEKAKKLLYCSLCKVAVNSLSQLEAHNTGSKHKTMVEARNGAGPIKSYPRPGSRLKMQNGSKGSGLQNKTFHCEICDVHVNSEIQLKQHISSRRHKDRVAGKPLKPKYSPYNKLQRSPSILAAKLAFQKDMMKPLAPAFLSSPLAAAAAVSSALSLPPRPSASLFQAPAIPPALLRPGHGPIRATPASILFAPY

SEQ ID NO: 42646 - protein, 263 aa, Artificial Sequence
  derived and/or modified sequence
MMQPSLDIKPFMSFPVDSSSAVGLFPNFNTMDPVQKAVINHTFGVSIPPKKKQVISCNVCQLRFNSDSQAEAHYKGSKHAKKVKALDATKNKPKMVPSKDSAKANPSCSITPITGNNSDKSEDKGKLKASSSSQPSSSESGSFLLKSGTTPLPPGAATSPSKSTNGAPGTVVESEEEKAKKLLYCSLCKVAVNSLSQLEAHNTGSKHKTMVEARNGAGPIKSYPRPGSRLKMQNGSKGSGLQNKTFHCEICDVHVNSEIQLKQ

SEQ ID NO: 42647 - DNA, 1188 bp, Artificial Sequence
  derived and/or modified sequence
atgtggagcggcctgcccagcagaggcagcacctgccacaccaccaccctgcccgccctggtgagaacccccaccctgatgatgcagcccagcctggacatcaagcccttcatgagcttccccgtggacagcagcagcgccgtgggcctgttccccaacttcaacaccatggaccccgtgcagaaggccgtgatcaaccacaccttcggcgtgagcatcccccccaagaagaagcaggtgatcagctgcaacgtgtgccagctgagattcaacagcgacagccaggccgaggcccactacaagggcagcaagcacgccaagaaggtgaaggccctggacgccaccaagaacaagcccaagatggtgcccagcaaggacagcgccaaggccaaccccagctgcagcatcacccccatcaccggcaacaacagcgacaagagcgaggacaagggcaagctgaaggccagcagcagcagccagcccagcagcagcgagagcggcagcttcctgctgaagagcggcaccacccccctgccccccggcgccgccaccagccccagcaagagcaccaacggcgcccccggcaccgtggtggagagcgaggaggagaaggccaagaagctgctgtactgcagcctgtgcaaggtggccgtgaacagcctgagccagctggaggcccacaacaccggcagcaagcacaagaccatggtggaggccagaaacggcgccggccccatcaagagctaccccagacccggcagcagactgaagatgcagaacggcagcaagggcagcggcctgcagaacaagaccttccactgcgagatctgcgacgtgcacgtgaacagcgagatccagctgaagcagcacatcagcagcagaagacacaaggacagagtggccggcaagcccctgaagcccaagtacagcccctacaacaagctgcagagaagccccagcatcctggccgccaagctggccttccagaaggacatgatgaagcccctggcccccgccttcctgagcagccccctggccgccgccgccgccgtgagcagcgccctgagcctgccccccagacccagcgccagcctgttccaggcccccgccatcccccccgccctgctgagacccggccacggccccatcagagccacccccgccagcatcctgttcgccccctactag

SEQ ID NO: 42648 - DNA, 1188 bp, Artificial Sequence
  derived and/or modified sequence
atgtggtcaggcctcccttccagaggcagtacgtgccacacaacaacccttccggctctggtcagaacacccacactgatgatgcagcccagccttgatattaagcctttcatgtcgttccccgtcgactcctccagcgcagtgggactgtttcccaacttcaacaccatggatcctgtgcaaaaggccgtaattaaccacacattcggcgtgagcatacctcccaagaagaaacaagtaatctcctgtaacgtatgccagctgcgattcaactcagacagccaggctgaggcccattacaaaggtagcaaacatgccaagaaggtgaaagcactggacgccacgaaaaataaacctaagatggtcccaagtaaagactccgcaaaggctaatccatcttgctccattactcccatcactgggaacaattccgacaagtcagaggacaagggaaagttgaaagcctctagttcctcccaaccttcgagtagtgagtccggatcatttcttctgaagtccggaacaactcctttgcccccaggagccgctacgagcccatccaaatcaaccaacggcgcaccaggcaccgtagtcgagtctgaggaagaaaaggcgaagaagctgttatactgcagcctgtgcaaggtagcagtgaactcactgagccagctggaggctcacaatacagggagcaaacacaagacaatggtcgaagcacggaatggagcagggcctataaaatcgtatccacgaccaggctctagactcaagatgcaaaacggttctaaaggatccggcctgcaaaataagaccttccactgcgagatatgcgacgtgcacgttaactctgaaattcagctcaaacagcacatctctagccggcgtcataaggatagagtggcaggcaaacccttgaaacccaagtatagcccttataacaaactccagcgcagcccgtctattttggcagccaagctggccttccagaaggacatgatgaagcccttggcacccgcctttctgagtagccccctcgcggcggctgccgccgtgagttctgcacttagcctgccgcctagaccctctgcttccctttttcaagccccggctattccccctgccctcctgagaccaggtcacggccctattcgtgccacccccgcatctatcctgttcgcgccatattag

SEQ ID NO: 42649 - DNA, 1188 bp, Artificial Sequence
  derived and/or modified sequence
atgtggagcggcctgcccagccggggcagcacctgccacaccaccaccctgcctgccctggtgaggacccccaccctgatgatgcagcccagcctggacatcaagcccttcatgtccttccctgtggacagcagcagcgctgtgggcctcttccccaacttcaacaccatggaccctgtgcagaaggctgtgatcaaccacacctttggagtgtccatcccccccaagaagaagcaggtgatcagctgcaatgtgtgccagctgcgcttcaacagcgacagccaggccgaggcccactacaagggcagcaagcacgccaagaaggtgaaggccctggatgccaccaagaacaagcccaagatggtgcccagcaaggacagcgccaaggccaaccccagctgcagcatcacccccatcaccggcaacaacagcgacaagtctgaggacaagggcaagctgaaggccagcagcagcagccagcccagcagcagcgagagcggcagcttcctgctgaagagcggcaccacccccctgcccccaggggccgccaccagccccagcaagagcaccaatggagcccctggcaccgtggtggagagcgaggaggagaaggccaagaagctgctgtactgcagcctgtgcaaggtggccgtgaacagcctgagccagctggaggcccacaacacaggcagcaagcacaagaccatggtggaggccagaaatggagctggccccatcaagagctacccccggcccggcagccggctgaagatgcagaatggcagcaaaggaagtggcctgcagaacaagaccttccactgtgagatctgtgatgtgcacgtgaacagcgagatccagctgaagcagcacatcagcagccgccgccacaaggacagagtggccggcaagcccctgaagcccaagtacagcccctacaacaagctgcagaggagccccagcatcctggccgccaagctggccttccagaaggacatgatgaagcccctggccccagccttcctgagcagccccctggccgctgctgctgctgtgtcctctgccctgagcctgcccccccggcccagcgccagcctcttccaggccccagccatccccccagccctgctgcggcccggccacggccccatccgggccaccccagccagcatcctgtttgccccctactag

SEQ ID NO: 42650 - DNA, 1188 bp, Artificial Sequence
  derived and/or modified sequence
atgtggagcggcctgcccagccggggcagcacctgccacaccaccacactgcctgcgttggtccggactcccaccctgatgatgcaaccatcgctggacataaagccctttatgtcatttcccgtggatagcagctctgccgttggcctgtttcctaacttcaacaccatggaccccgtgcagaaggcagtgatcaatcacacttttggtgtgagcattcctccaaaaaagaaacaggtaataagctgcaacgtatgccaactgcggtttaactccgattcacaggcggaggctcactacaaaggaagcaaacacgccaaaaaggttaaggccctagatgcaacaaaaaataaacctaagatggtgccctctaaggatagtgcaaaagccaatccatcttgttcgataacacccatcaccggcaacaattccgacaagagcgaggataaaggaaaactgaaagcaagcagcagtagtcagccaagctcttctgagtccggaagcttcttattaaagtcgggtaccaccccactgcctcccggcgcagccaccagtccctccaagagtaccaatggagcccccggcacagtagtcgagtcagaagaagagaaagctaagaaactgctgtactgctctctgtgcaaagtagcggtgaattctctaagccagctggaagctcataatacagggtccaaacacaagaccatggtggaagcaaggaatggggcaggcccaattaagtcctacccacgacctggatcccgtctcaagatgcagaacgggagcaagggaagtggtctgcagaacaaaacctttcactgcgagatctgcgacgtgcatgtaaatagcgaaatccagctcaaacagcatatctctagtcgaaggcacaaggatagagtagcaggaaaaccattaaaacccaagtattcgccctacaacaaactccagaggagcccctcaatactcgcagccaaactcgcttttcagaaagacatgatgaagcctcttgccccggcctttctcagctctccactagcggcagccgccgcagttagtagtgccctttccctcccaccgcggccgagcgcctcactgttccaggctccagctatccctcccgctctgctccgaccaggtcacggccccatacgcgcgacacccgcaagcatcttattcgctccttactag

SEQ ID NO: 42651 - DNA, 1188 bp, Artificial Sequence
  derived and/or modified sequence
atgtggagcggacttccctctcggggttctacttgccacactacaacgcttcccgctttagtacgtaccccaacacttatgatgcagccctcgctggacatcaagccattcatgtcctttcctgttgacagctcttctgccgtcggtttgttccctaatttcaacacaatggacccggtgcagaaagccgtaataaaccacacgttcggggtatcaattccacctaagaagaagcaggtgattagctgtaatgtctgccagctccgcttcaattctgattctcaagctgaagctcattataaaggttcgaagcacgcaaaaaaagttaaggctttggacgcgacaaagaacaagcccaagatggtcccaagtaaggactccgctaaggccaacccatcttgttcaattactccaattaccggcaataattctgataaatccgaggacaagggcaagctcaaggcatcatcaagttctcaaccctcttcaagcgagagcggtagtttcctcctcaagagcggcacaacccccctaccacctggagccgcaacctccccatcaaagtccactaatggcgctcccggaaccgtagtcgagagcgaggaggagaaggcaaaaaagctcttatattgctcactctgcaaagtcgcagtcaattcgctctcccagttggaggcccacaacactggcagcaagcacaagacaatggtggaagccagaaatggtgccggaccgataaagtcttaccctcgccctgggtctagattgaagatgcagaacggatccaaaggctctgggcttcagaacaagacctttcactgcgagatctgcgacgtgcacgttaactctgagattcagctgaaacagcacatttccagccggcgtcacaaggaccgcgttgcaggtaagcccctcaagccaaagtactccccctataataaactgcaaaggagcccctcaatccttgctgccaaactcgccttccagaaggacatgatgaaaccactggcccctgcctttctttccagtccgttagcagcagctgccgcagtgagttctgctctgagtctgccccctagaccttcagcctcgctgtttcaggctccagctattccacctgcactcttgagaccaggacacggccctatcagagcaacccctgcatcaatcctattcgcaccttattag

SEQ ID NO: 42652 - DNA, 2610 bp, Artificial Sequence
  derived and/or modified sequence
agtaattagagctaagcggcaattacaggacgtatgatttgttcagaagcactgcctgccggctgtttcctagcaccacatttcacgggagcaccaggttgagatgatggaattatttacttttaaatgtaacatctcgtacagtgctcaaatgcagacgtgaacgtggactgtaaccttaaaaacaaaggcagtacatgccacactactacccttcctgctcttgtgcgcacacctaccctgatgatgcagccttcactggatatcaaaccatttatgtcttttccagtggacagtagttctgctgttgggctctttccaaattttaacacaatggatcctgtgcaaaaagcggttattaaccatacatttggagtatccattcccccaaagaagaaacaagttatttcttgtaatgtctgtcagcttcgctttaactcagatagccaggccgaggcccactacaaaggaagtaaacatgccaagaaggtcaaagcactagacgcaacgaaaaataaacccaaaatggttccttccaaggacagcgcaaaggctaatcccagctgctccatcactccaatcacaggcaacaactctgacaaatcagaagataaagggaagttaaaagccagcagttccagtcagccatcaagctctgaaagtggctcatttctcctcaaatctggcacaacacccctgccacctggagcagccacttctccctccaagagcacaaatggagctcccggtactgttgttgaatcagaagaagaaaaagccaaaaaattactttattgttcactatgcaaagtggctgtgaactccctgtcacagctagaggcacacaacacaggatctaaacacaagaccatggttgaagctcgtaatggggctggtccaattaaatcctatcctagacctggatcaagattaaagatgcagaatggcagtaaggggtcaggactacagaacaagacatttcattgtgaaatctgtgatgttcatgttaattcagaaattcaactcaaacagcacatttctagccgaaggcataaagatcgagttgcagggaaaccactgaagccaaaatacagcccttacaacaaactccagcggagcccgagtattctagcagcaaaacttgcattccagaaagatatgatgaagcctttggccccagccttcctgtcctcacctctcgcagcggcggcagccgtgtcctcagcgctgtcactcccaccccggccctctgcctcgctcttccaggctccagccattcctccagctcttctgaggcctgggcatgggcccatccgcgccactcctgcctccatcctctttgctccgtactaacgtctgcaaaccccaagacgtttgaggccagtaggaagttgagaaagaaagccacaaggattcagcaatttaagcagtttgtgttgcagtaccccccattcacccacaaaatgcagcccaccacccagtcccccaattccagagagaaacacatcactagattgacgagggcttttagagactgctcctataattgaggaatcagcagcataggctttatctccctacttcctcccccaccctaccgcgttcaatttgtgtatctcagatatttgatttcttgagcatgtattggtcagaaagaaaaagaaagaaaaccattctctatttttccatgggtatgatctggcttaaaacaatatggaatattttcctgacagacttgaaaactaggatcttcctcagatgtctgtaaataactctggtatccaactgggtgtattctagtgtggaacaaaaaacagtgaacacaagtgcttacttgtggatactatcttaccaacggatcacaaagttctctttttggtgtactgttgttgacagggattgtgtactgtttcgacccaagtactgctgtatcctgtgtagtactagatctgtatctcttgtctgaattaaacatttttagttgctgtgtaaatgttaggaagcaaagtagctttgaattttctctgtaagagaataaaagataaaataatgtattttctttatttcacattttatttggagatatttaaatgaaatagaaagccatataacatagctataattactacctgtttgctatttttgtttaacttattttgtagcttcctcactggtttgtgttgctaagcaaacgtatacaaacagaaaaagagcttcctaaattgcacatttttgcacctcttgtgcattctgcaagaagacaatgaatccatgtatttctatataagtatcttcttcatttttaacctgttttcatttgtaatgatgctacataattttgtggctccctaatgcaataatgtacagaagataaaaaaatttataattgaacaatttgtctttctgttcgctgaatatattgcaggtcatgctcccatgcccccctttctaagccgatatcaacaagactggaatgtttgtgatatcaggggcaagagttatcatagaacaacaaaatagagtggactcttttagagcatctatatctgcaacctgtaaatggtaaaatgtctgtgtatttttttaaatgtaccttttcaataaaagtac

SEQ ID NO: 42653 - DNA, 2750 bp, Artificial Sequence
  derived and/or modified sequence
agtgcttctggtttcagcacacatggagatatagaattgaaattgctctgctttctttacaaatgactcagagtgtgcttgtccttccctaaaatgttgccagcatgtaaaggattttcaatgagcagtgcaataagccagcaactgggaaggcttggagcggcactgatataacgtggtgctgtcacacagataatcagggctggagccaagtctcggtagcgctgtgcattatcctggtcacatactggaagttttgtttatccaacttggttgctcttgaagctggtgagagccctgccaggatgtggagtggacttcctagcagaggcagtacatgccacactactacccttcctgctcttgtgcgcacacctaccctgatgatgcagccttcactggatatcaaaccatttatgtcttttccagtggacagtagttctgctgttgggctctttccaaattttaacacaatggatcctgtgcaaaaagcggttattaaccatacatttggagtatccattcccccaaagaagaaacaagttatttcttgtaatgtctgtcagcttcgctttaactcagatagccaggccgaggcccactacaaaggaagtaaacatgccaagaaggtcaaagcactagacgcaacgaaaaataaacccaaaatggttccttccaaggacagcgcaaaggctaatcccagctgctccatcactccaatcacaggcaacaactctgacaaatcagaagataaagggaagttaaaagccagcagttccagtcagccatcaagctctgaaagtggctcatttctcctcaaatctggcacaacacccctgccacctggagcagccacttctccctccaagagcacaaatggagctcccggtactgttgttgaatcagaagaagaaaaagccaaaaaattactttattgttcactatgcaaagtggctgtgaactccctgtcacagctagaggcacacaacacaggatctaaacacaagaccatggttgaagctcgtaatggggctggtccaattaaatcctatcctagacctggatcaagattaaagatgcagaatggcagtaaggggtcaggactacagaacaagacatttcattgtgaaatctgtgatgttcatgttaattcagaaattcaactcaaacagcacatttctagccgaaggcataaagatcgagttgcagggaaaccactgaagccaaaatacagcccttacaacaaactccagcggagcccgagtattctagcagcaaaacttgcattccagaaagatatgatgaagcctttggccccagccttcctgtcctcacctctcgcagcggcggcagccgtgtcctcagcgctgtcactcccaccccggccctctgcctcgctcttccaggctccagccattcctccagctcttctgaggcctgggcatgggcccatccgcgccactcctgcctccatcctctttgctccgtactaacgtctgcaaaccccaagacgtttgaggccagtaggaagttgagaaagaaagccacaaggattcagcaatttaagcagtttgtgttgcagtaccccccattcacccacaaaatgcagcccaccacccagtcccccaattccagagagaaacacatcactagattgacgagggcttttagagactgctcctataattgaggaatcagcagcataggctttatctccctacttcctcccccaccctaccgcgttcaatttgtgtatctcagatatttgatttcttgagcatgtattggtcagaaagaaaaagaaagaaaaccattctctatttttccatgggtatgatctggcttaaaacaatatggaatattttcctgacagacttgaaaactaggatcttcctcagatgtctgtaaataactctggtatccaactgggtgtattctagtgtggaacaaaaaacagtgaacacaagtgcttacttgtggatactatcttaccaacggatcacaaagttctctttttggtgtactgttgttgacagggattgtgtactgtttcgacccaagtactgctgtatcctgtgtagtactagatctgtatctcttgtctgaattaaacatttttagttgctgtgtaaatgttaggaagcaaagtagctttgaattttctctgtaagagaataaaagataaaataatgtattttctttatttcacattttatttggagatatttaaatgaaatagaaagccatataacatagctataattactacctgtttgctatttttgtttaacttattttgtagcttcctcactggtttgtgttgctaagcaaacgtatacaaacagaaaaagagcttcctaaattgcacatttttgcacctcttgtgcattctgcaagaagacaatgaatccatgtatttctatataagtatcttcttcatttttaacctgttttcatttgtaatgatgctacataattttgtggctccctaatgcaataatgtacagaagataaaaaaatttataattgaacaatttgtctttctgttcgctgaatatattgcaggtcatgctcccatgcccccctttctaagccgatatcaacaagactggaatgtttgtgatatcaggggcaagagttatcatagaacaacaaaatagagtggactcttttagagcatctatatctgcaacctgtaaatggtaaaatgtctgtgtatttttttaaatgtaccttttcaataaaagtac

SEQ ID NO: 42654 - DNA, 2109 bp, Artificial Sequence
  derived and/or modified sequence
agtagactataagcttttggaaaacagggactatgtcttcttcaacaatgtgtacacaacaagtagcaggttgtttggcacatggcagatgctcgatacgttgatctggcagcggcatgggagatggatccaaagagattaaaactggagtgaaggagtccagtaatgatgtgaagagatgagggtctgaactaggacagaagtcagtcacagggatggatttgagacgttttggagggttacacatgcagtacatgccacactactacccttcctgctcttgtgcgcacacctaccctgatgatgcagccttcactggatatcaaaccatttatgtcttttccagtggacagtagttctgctgttgggctctttccaaattttaacacaatggatcctgtgcaaaaagcggttattaaccatacatttggagtatccattcccccaaagaagaaacaagttatttcttgtaatgtctgtcagcttcgctttaactcagatagccaggccgaggcccactacaaaggaagtaaacatgccaagaaggtcaaagcactagacgcaacgaaaaataaacccaaaatggttccttccaaggacagcgcaaaggctaatcccagctgctccatcactccaatcacaggcaacaactctgacaaatcagaagataaagggaagttaaaagccagcagttccagtcagccatcaagctctgaaagtggctcatttctcctcaaatctggcacaacacccctgccacctggagcagccacttctccctccaagagcacaaatggagctcccggtactgttgttgaatcagaagaagaaaaagccaaaaaattactttattgttcactatgcaaagtggctgtgaactccctgtcacagctagaggcacacaacacaggatctaaacacaagaccatggttgaagctcgtaatggggctggtccaattaaatcctatcctagacctggatcaagattaaagatgcagaatggcagtaaggggtcaggactacagaacaagacatttcattgtgaaatctgtgatgttcatgttaattcagaaattcaactcaaacagcacatttctagccgaaggcataaagatcgagttgcagggaaaccactgaagccaaaatacagcccttacaacaaactccagcggagcccgagtattctagcagcaaaacttgcattccagaaagatatgatgaagcctttggccccagccttcctgtcctcacctctcgcagcggcggcagccgtgtcctcagcgctgtcactcccaccccggccctctgcctcgctcttccaggctccagccattcctccagctcttctgaggcctgggcatgggcccatccgcgccactcctgcctccatcctctttgctccgtactaacgtctgcaaaccccaagacgtttgaggccagtaggaagttgagaaagaaagccacaaggattcagcaatttaagcagtttgtgttgcagtaccccccattcacccacaaaatgcagcccaccacccagtcccccaattccagagagaaacacatcactagattgacgagggcttttagagactgctcctataattgaggaatcagcagcataggctttatctccctacttcctcccccaccctaccgcgttcaatttgtgtatctcagatatttgatttcttgagcatgtattggtcagaaagaaaaagaaagaaaaccattctctatttttccatgggtatgatctggcttaaaacaatatggaatattttcctgacagacttgaaaactaggatcttcctcagatgtctgtaaataactctggtatccaactgggtgtattctagtgtggaacaaaaaacagtgaacacaagtgcttacttgtggatactatcttaccaacggatcacaaagttctctttttggtgtactgttgttgacagggattgtgtactgtttcgacccaagtactgctgtatcctgtgtagtactagatctgtatctcttgtctgaattaaacatttttagttgctgtgtaaatgttaggaagcaaagtagctttgaattttctctgtaagagaataaaagataaaataatg

SEQ ID NO: 42655 - DNA, 956 bp, Artificial Sequence
  derived and/or modified sequence
cccagtcagttgctgctgctggtcctagggcaggctatctgtgtcgggatgccgagcattactgccactataatcactgaggcatctgccagagatctcatggctgaaaactaggcagtacatgccacactactacccttcctgctcttgtgcgcacacctaccctgatgatgcagccttcactggatatcaaaccatttatgtcttttccagtggacagtagttctgctgttgggctctttccaaattttaacacaatggatcctgtgcaaaaagcggttattaaccatacatttggagtatccattcccccaaagaagaaacaagttatttcttgtaatgtctgtcagcttcgctttaactcagatagccaggccgaggcccactacaaaggaagtaaacatgccaagaaggtcaaagcactagacgcaacgaaaaataaacccaaaatggttccttccaaggacagcgcaaaggctaatcccagctgctccatcactccaatcacaggcaacaactctgacaaatcagaagataaagggaagttaaaagccagcagttccagtcagccatcaagctctgaaagtggctcatttctcctcaaatctggcacaacacccctgccacctggagcagccacttctccctccaagagcacaaatggagctcccggtactgttgttgaatcagaagaagaaaaagccaaaaaattactttattgttcactatgcaaagtggctgtgaactccctgtcacagctagaggcacacaacacaggatctaaacacaagaccatggttgaagctcgtaatggggctggtccaattaaatcctatcctagacctggatcaagattaaagatgcagaatggcagtaaggggtcaggactacagaacaagacatttcattgtgaaatctgtgatgttcatgttaattcagaaattcaactcaaacag

SEQ ID NO: 42656 - DNA, 1110 bp, Artificial Sequence
  derived and/or modified sequence
atgatgcagcccagcctggacatcaagcccttcatgagcttccccgtggacagcagcagcgccgtgggcctgttccccaacttcaacaccatggaccccgtgcagaaggccgtgatcaaccacaccttcggcgtgagcatcccccccaagaagaagcaggtgatcagctgcaacgtgtgccagctgagattcaacagcgacagccaggccgaggcccactacaagggcagcaagcacgccaagaaggtgaaggccctggacgccaccaagaacaagcccaagatggtgcccagcaaggacagcgccaaggccaaccccagctgcagcatcacccccatcaccggcaacaacagcgacaagagcgaggacaagggcaagctgaaggccagcagcagcagccagcccagcagcagcgagagcggcagcttcctgctgaagagcggcaccacccccctgccccccggcgccgccaccagccccagcaagagcaccaacggcgcccccggcaccgtggtggagagcgaggaggagaaggccaagaagctgctgtactgcagcctgtgcaaggtggccgtgaacagcctgagccagctggaggcccacaacaccggcagcaagcacaagaccatggtggaggccagaaacggcgccggccccatcaagagctaccccagacccggcagcagactgaagatgcagaacggcagcaagggcagcggcctgcagaacaagaccttccactgcgagatctgcgacgtgcacgtgaacagcgagatccagctgaagcagcacatcagcagcagaagacacaaggacagagtggccggcaagcccctgaagcccaagtacagcccctacaacaagctgcagagaagccccagcatcctggccgccaagctggccttccagaaggacatgatgaagcccctggcccccgccttcctgagcagccccctggccgccgccgccgccgtgagcagcgccctgagcctgccccccagacccagcgccagcctgttccaggcccccgccatcccccccgccctgctgagacccggccacggccccatcagagccacccccgccagcatcctgttcgccccctactag

SEQ ID NO: 42657 - DNA, 792 bp, Artificial Sequence
  derived and/or modified sequence
atgatgcagcccagcctggacatcaagcccttcatgagcttccccgtggacagcagcagcgccgtgggcctgttccccaacttcaacaccatggaccccgtgcagaaggccgtgatcaaccacaccttcggcgtgagcatcccccccaagaagaagcaggtgatcagctgcaacgtgtgccagctgagattcaacagcgacagccaggccgaggcccactacaagggcagcaagcacgccaagaaggtgaaggccctggacgccaccaagaacaagcccaagatggtgcccagcaaggacagcgccaaggccaaccccagctgcagcatcacccccatcaccggcaacaacagcgacaagagcgaggacaagggcaagctgaaggccagcagcagcagccagcccagcagcagcgagagcggcagcttcctgctgaagagcggcaccacccccctgccccccggcgccgccaccagccccagcaagagcaccaacggcgcccccggcaccgtggtggagagcgaggaggagaaggccaagaagctgctgtactgcagcctgtgcaaggtggccgtgaacagcctgagccagctggaggcccacaacaccggcagcaagcacaagaccatggtggaggccagaaacggcgccggccccatcaagagctaccccagacccggcagcagactgaagatgcagaacggcagcaagggcagcggcctgcagaacaagaccttccactgcgagatctgcgacgtgcacgtgaacagcgagatccagctgaagcagtag

SEQ ID NO: 42658 - DNA, 1110 bp, Artificial Sequence
  derived and/or modified sequence
atgatgcaaccatctttggacattaaacccttcatgtcattccctgtcgattcatccagcgcagtgggactcttcccaaacttcaacacaatggacccggtacagaaagctgtcataaaccatacgttcggagtcagtatccctcctaaaaaaaagcaggtgatctcctgcaacgtgtgccagctgcggttcaactctgacagccaggcagaggcccattataaagggtccaaacatgccaaaaaggtgaaggcattagacgcgaccaaaaacaagcctaaaatggtgcctagcaaggattcggctaaagcaaatccttcttgcagcataactccaatcacaggaaacaacagtgataaaagtgaagataagggaaagctcaaagccagctccagctctcagccttctagttctgaatcagggtcctttctgttaaagagcgggactacacctctgccacctggagccgccaccagccctagcaagtccaccaatggagcgccaggcaccgttgttgaatccgaagaggaaaaagcaaagaagctgctgtattgtagcctctgcaaggtcgcggtgaacagtttatcccagctggaggcccacaacacagggtccaagcacaaaactatggtggaggccaggaatggggcgggacccattaagagctaccctcgcccggggtcgcgccttaagatgcagaacggaagcaagggctctgggctgcagaacaagacctttcactgcgaaatatgcgacgttcatgtgaattcagagattcagctcaaacagcacatcagcagcaggcggcataaggacagagttgcaggcaagcctctgaaacctaaatactcaccatacaacaaattacaacgctcacctagtatcctagctgccaagctagcctttcaaaaagacatgatgaaaccactggctccagccttcctctcttcgcctttggccgccgctgcggccgtttcatctgcactgagtctgccaccccgacctagtgcttcccttttccaagcgcccgccatcccccctgccctgctccggcccggacacggccccatccgggctactccagcttctatcctgttcgctccgtattag

SEQ ID NO: 42659 - DNA, 1110 bp, Artificial Sequence
  derived and/or modified sequence
atgatgcagccgagtttggatataaagcctttcatgtcctttcctgttgacagctcaagtgcagtcggcctcttccctaattttaacaccatggaccccgtgcaaaaggccgttattaaccacacgtttggggtttccattccaccgaagaaaaaacaggtgatcagttgtaatgtgtgtcaacttcggttcaatagcgattcccaggcggaggcgcattacaagggatccaagcatgccaagaaggtcaaggccctggacgcaactaaaaacaaaccaaaaatggtgccgtcgaaagactcggccaaggctaatccctcctgcagtatcacccccatcacaggaaataatagtgataagtcagaggacaagggaaagctgaaggcctctagctctagccagcctagtagctctgagtcaggctccttccttctgaagtccggcacaaccccgttgccacctggcgccgccacctctccttctaagtccacaaatggcgcaccaggcactgtcgtagagagtgaagaggaaaaagcgaagaagcttttatactgttctctttgcaaggtggctgtcaactctctttcccagctcgaggctcataataccggcagcaaacacaaaacaatggtcgaggccagaaatggggcaggacccatcaagtcttaccccagaccaggctcgagactgaagatgcagaacggatccaagggctctggcctgcagaataaaactttccactgtgaaatttgcgacgtccatgttaactcggaaattcaactcaagcagcacatatcaagcaggcggcacaaagatagggtggctggcaagccacttaaaccgaaatatagtccttacaacaaactccagcgctcacccagcattctggccgccaagctggctttccagaaggacatgatgaaacccctggccccggcattcttatcaagtccgcttgcagccgcagctgctgtctcttcagcactgtcacttcctcccaggccttccgcctctctgtttcaagcccccgccatccccccagccctcctgcgaccgggacacgggcctattagagctacacccgcctcgattctcttcgcgccctattag

SEQ ID NO: 42660 - DNA, 792 bp, Artificial Sequence
  derived and/or modified sequence
atgatgcaaccttccctagacatcaaacctttcatgagtttccccgtggattcatctagtgccgtcgggctgttccctaactttaacaccatggatccggtgcaaaaggctgtcattaaccacacttttggcgtctcaataccgcccaaaaagaaacaggtgattagctgcaatgtgtgtcagctgagattcaattccgattctcaggccgaggcccactataaaggctctaagcatgccaagaaggtgaaagcactggatgccaccaaaaacaaaccaaagatggtaccatccaaggactccgcaaaagccaacccctcttgttctattactccaatcactggtaataacagcgacaaatctgaggataaaggcaaactaaaagcatcctcctccagccaacccagttcatcagagtcgggctcctttcttctgaagagcgggaccacgccgttaccacctggtgcagcaaccagcccttccaagtccacaaatggagctcccggcaccgtcgtcgaaagcgaggaagagaaggccaagaaactgctctattgcagcctctgcaaagtcgccgtcaactccctctcccagctggaggctcacaacacgggctcgaagcacaagacaatggtagaggccaggaacggcgctggccccattaaatcttatcccaggccaggaagcaggctcaagatgcagaatggttcgaagggttctgggctgcagaacaagaccttccattgcgaaatttgtgatgtccacgtgaattccgagatccagttgaagcaatag

SEQ ID NO: 42661 - DNA, 1110 bp, Artificial Sequence
  derived and/or modified sequence
atgatgcagcccagcctggacatcaagcccttcatgtccttccctgtggacagcagcagcgctgtgggcctcttccccaacttcaacaccatggaccctgtgcagaaggctgtgatcaaccacacctttggagtgtccatcccccccaagaagaagcaggtgatcagctgcaatgtgtgccagctgcgcttcaacagcgacagccaggccgaggcccactacaagggcagcaagcacgccaagaaggtgaaggccctggatgccaccaagaacaagcccaagatggtgcccagcaaggacagcgccaaggccaaccccagctgcagcatcacccccatcaccggcaacaacagcgacaagtctgaggacaagggcaagctgaaggccagcagcagcagccagcccagcagcagcgagagcggcagcttcctgctgaagagcggcaccacccccctgcccccaggggccgccaccagccccagcaagagcaccaatggagcccctggcaccgtggtggagagcgaggaggagaaggccaagaagctgctgtactgcagcctgtgcaaggtggccgtgaacagcctgagccagctggaggcccacaacacaggcagcaagcacaagaccatggtggaggccagaaatggagctggccccatcaagagctacccccggcccggcagccggctgaagatgcagaatggcagcaaaggaagtggcctgcagaacaagaccttccactgtgagatctgtgatgtgcacgtgaacagcgagatccagctgaagcagcacatcagcagccgccgccacaaggacagagtggccggcaagcccctgaagcccaagtacagcccctacaacaagctgcagaggagccccagcatcctggccgccaagctggccttccagaaggacatgatgaagcccctggccccagccttcctgagcagccccctggccgctgctgctgctgtgtcctctgccctgagcctgcccccccggcccagcgccagcctcttccaggccccagccatccccccagccctgctgcggcccggccacggccccatccgggccaccccagccagcatcctgtttgccccctactag

SEQ ID NO: 42662 - DNA, 792 bp, Artificial Sequence
  derived and/or modified sequence
atgatgcagcccagcctggacatcaagcccttcatgtccttccctgtggacagcagcagcgctgtgggcctcttccccaacttcaacaccatggaccctgtgcagaaggctgtgatcaaccacacctttggagtgtccatcccccccaagaagaagcaggtgatcagctgcaatgtgtgccagctgcgcttcaacagcgacagccaggccgaggcccactacaagggcagcaagcacgccaagaaggtgaaggccctggatgccaccaagaacaagcccaagatggtgcccagcaaggacagcgccaaggccaaccccagctgcagcatcacccccatcaccggcaacaacagcgacaagtctgaggacaagggcaagctgaaggccagcagcagcagccagcccagcagcagcgagagcggcagcttcctgctgaagagcggcaccacccccctgcccccaggggccgccaccagccccagcaagagcaccaatggagcccctggcaccgtggtggagagcgaggaggagaaggccaagaagctgctgtactgcagcctgtgcaaggtggccgtgaacagcctgagccagctggaggcccacaacacaggcagcaagcacaagaccatggtggaggccagaaatggagctggccccatcaagagctacccccggcccggcagccggctgaagatgcagaatggcagcaaaggaagtggcctgcagaacaagaccttccactgtgagatctgtgatgtgcacgtgaacagcgagatccagctgaagcagtag

SEQ ID NO: 42663 - DNA, 1110 bp, Artificial Sequence
  derived and/or modified sequence
atgatgcagcccagcctggacatcaagcccttcatgagcttccccgtcgacagttcttccgcagttggtttattcccaaattttaacacgatggacccagtgcagaaagcagtgatcaatcacactttcggcgtatcaatcccccccaaaaaaaagcaggtgatctcttgcaacgtctgtcagttgcgatttaattcagattcccaggccgaggctcattacaagggttccaagcatgctaagaaagtgaaagccctcgatgccacgaagaacaagcctaagatggtgcccagtaaagactctgccaaggcgaatccctcctgtagcatcaccccaatcacaggaaacaatagtgataagtctgaagacaagggaaagctcaaagcttcttcatccagtcagccatccagtagtgaaagcggatctttcctgctaaaatctgggactactccgctcccacctggcgccgcgacctccccgtcaaagagcacaaatggtgccccagggaccgtggttgagtccgaagaagaaaaggccaaaaagttgctctactgcagcctgtgcaaggtggccgtgaattcactgagccagctggaggctcataatactgggagtaagcacaaaaccatggtggaagcccgaaatggggctggccccatcaagtcttacccaagacctggatcgcgcctgaaaatgcagaacggttctaagggttctggactccagaacaaaacatttcactgtgaaatttgcgatgttcacgtgaactctgagatccagctgaagcagcatataagcagtagacgacataaggatcgcgttgccggaaagccactaaaaccaaaatacagtccctataacaaacttcagagaagcccctcgattctcgctgcaaaacttgccttccagaaggacatgatgaaacctctcgccccagcattcctgagttctcccctcgctgctgcagcagctgtctcaagcgctctgtcactgcccccaagacctagtgcgtcactgtttcaggccccggcaattccccccgccctgttgaggccaggacatggacccataagggctactcccgctagcatcctgttcgctccatactag

SEQ ID NO: 42664 - DNA, 1110 bp, Artificial Sequence
  derived and/or modified sequence
atgatgcagcccagcctggacatcaagcccttcatgagcttccccgtagattctagctcagccgttggactttttccaaactttaacaccatggatcccgttcagaaggcggtgattaaccacaccttcggtgtgagtataccacccaagaagaagcaggtaatttcttgtaatgtgtgtcagctaagattcaatagcgattcacaggccgaagcgcattacaaaggatccaaacacgcgaagaaggtgaaggccttggatgccaccaagaacaaacctaagatggtgccctccaaggattctgctaaggctaacccaagttgtagcattactcctattactggaaacaatagtgataagtccgaggataagggcaaactgaaggcgtcgagtagttctcagcctagttcttcagagagcggaagcttcctgctgaagtctggtaccacacctctccctcccggtgcggcgacatcaccctccaaatctaccaatggtgcgccaggtaccgtcgtcgagtctgaggaagaaaaagctaagaaactgctatattgctctctttgcaaggtcgctgtcaacagcttaagtcagctcgaagcccacaatacgggcagcaaacataagactatggttgaagcccgcaatggagccgggcctattaagtcataccctcggcctggctcccggcttaaaatgcagaacggctctaaggggtccgggctgcagaataaaacattccactgcgagatatgcgatgtgcacgtgaattccgaaattcagctcaagcagcacatatccagtcggcggcacaaagaccgtgtggcaggaaagcctttgaaaccgaaatatagcccatataataaattgcagaggagccccagcattttggctgcgaaactggctttccaaaaagacatgatgaaaccgctggcgccagcttttttgtcctctcccctggccgcggctgccgcagtgtcttccgctctgagcctgcctcctaggccatccgcatccctgttccaggcaccagccattccacctgcattacttaggccgggccacggaccgatcagggccaccccagcctcaattcttttcgccccatactag

SEQ ID NO: 42665 - DNA, 792 bp, Artificial Sequence
  derived and/or modified sequence
atgatgcagcccagcctggacatcaagcccttcatgagcttccccgtcgactcgtctagtgccgtgggcctctttccgaatttcaatacaatggaccctgtccagaaggcagtcatcaatcacacttttggtgtgtcgatccccccaaaaaaaaagcaagtcatttcctgcaatgtgtgtcagcttagattcaactcggactcccaggctgaagcacactacaagggtagtaagcacgccaaaaaggttaaggcacttgatgccacaaagaacaagcctaagatggtgccatcaaaggactcagccaaggctaaccctagttgctcaatcacaccaataaccggcaacaattctgataagagtgaggacaaagggaaactcaaggcatcctcttctagccagcctagttccagcgaatcaggtagcttcctccttaagagtgggaccaccccgctgcccccaggagcagcaacgagcccgagcaagtccacaaacggcgcccctggcaccgtcgttgaatcggaagaagaaaaggctaaaaagctattgtattgttctttatgcaaagtggccgtcaacagcctgagtcaactcgaggcgcataatacgggcagtaagcacaaaaccatggtcgaggcacgaaacggggctgggcctattaagagctaccctcggcccggttcaagactcaagatgcagaatgggagcaagggatcgggccttcagaacaagaccttccactgcgagatttgcgatgtccatgtgaattcagaaatccagttgaagcagtag

SEQ ID NO: 42666 - DNA, 1110 bp, Artificial Sequence
  derived and/or modified sequence
atgatgcagcccagcctggatataaaaccatttatgtctttcccagtggacagctcctccgccgtggggctgttccctaacttcaatactatggaccccgtgcaaaaagctgttatcaaccatacttttggggtgagtattccacctaaaaaaaagcaggtcatctcatgcaacgtatgtcaacttcggttcaacagtgatagccaagcagaggcccattacaaaggttccaaacacgccaaaaaggttaaggccctggacgctactaagaataagcctaagatggtgcctagcaaagattcggctaaggccaatcccagttgcagtataactcccatcactggcaataacagcgacaagtccgaggacaagggaaagttgaaagctagttcatcaagtcagccttccagtagcgaatctggttcattcctgctgaagagtggtactacaccgctccccccaggagcggctacaagccctagcaagtcaacgaatggagcgccaggtaccgtggtggagtcggaggaagagaaggctaaaaaactgctgtactgtagcctatgtaaagtggccgtcaatagtctatctcaactagaggctcacaatactggctcaaaacacaaaacaatggtggaggccaggaatggcgcaggccctataaagtcctaccccagacccggaagtagactcaaaatgcaaaatggaagtaagggctctgggctccagaacaagactttccactgtgagatctgcgacgtgcatgtaaactctgagattcaactgaagcagcatattagcagccgcagacataaagacagggtagccggaaaacctctgaaaccaaaatacagtccgtataataagctgcagagatccccgtctattcttgccgcaaagctggcattccagaaagacatgatgaagcccctcgcacccgcatttctgtcgtcacctttggccgctgcagctgctgtgtccagtgccttatccctgcctccacgcccatcggcctcattattccaggctccggcaatccccccagcgcttcttagacctgggcatggtccaatcagggccactcctgccagcatattattcgccccatactag

SEQ ID NO: 42667 - DNA, 1110 bp, Artificial Sequence
  derived and/or modified sequence
atgatgcagccttcactggatatcaagccgtttatgtcgtttcccgtagactcctccagtgccgtcggcctatttccgaattttaacaccatggatccagtgcagaaggccgtgattaaccatacttttggtgtttctataccaccgaaaaagaagcaggtcatcagttgtaatgtgtgccagttgcgttttaattctgacagtcaagccgaggcccattataaaggcagcaaacacgccaagaaggtcaaggctcttgacgctaccaagaataagcccaaaatggttccttcaaaggactccgcaaaggccaaccctagctgtagtatcaccccgatcacgggcaacaacagtgacaagagcgaggacaaggggaagctcaaagccagcagttccagtcaaccatcttctagtgagagtggtagcttcctgttgaagtccgggaccaccccccttccgcctggggctgctacctccccttctaaatcaaccaatggggctcccggaactgtcgtggaatccgaggaagagaaggcaaaaaagctgctttactgttctctttgtaaggtggctgtgaattctctgtcacaattagaagcacacaatactggttcaaaacataagacaatggttgaagcacggaatggcgctggcccaatcaagtcttatccacggccaggcagcaggctcaagatgcagaacggcagtaaggggagcggactgcaaaacaaaacattccattgcgaaatctgtgatgtgcacgtcaattctgagattcagttgaaacagcacattagctctaggcgacacaaggatagagtggccggtaagcccttgaaacctaaatacagcccgtataacaaactccaaaggagccccagtattctggccgcaaaactggcatttcagaaggatatgatgaaaccactcgctccagcgttcctctctagcccacttgctgccgcagcagccgtgagcagcgccctgagcttgcctcctagaccatctgccagcctcttccaggccccagcaatcccacctgcgctgcttcggccaggacacggtcctataagagcgaccccagcttcgatcctctttgcaccgtactag

SEQ ID NO: 42668 - DNA, 792 bp, Artificial Sequence
  derived and/or modified sequence
atgatgcaaccatcactggacataaaaccattcatgagctttccagttgattctagcagcgccgtcggtttattcccgaatttcaataccatggaccctgtgcagaaggctgtcataaaccatacattcggagtgtccattccacccaagaagaaacaagtgatctcatgtaacgtgtgtcagctgcgtttcaactcagattcccaggcagaggcccattataaggggtcgaagcatgccaaaaaggtgaaagcccttgatgccacaaaaaacaagccaaaaatggtcccatctaaggatagcgctaaggccaaccctagttgctctataactcctatcacgggcaacaattcagacaaaagcgaggacaaagggaagctgaaggccagtagttcctcacagccctccagctctgagagtggatcttttttgttgaagagcggcacaacaccgctgccacccggtgcggctacttctccatctaagtccaccaatggtgccccaggcacggttgtagaatctgaagaggaaaaagccaagaagctgctttactgcagcttgtgcaaagtcgccgtgaattctttgtcacagttagaggctcacaataccggctctaagcacaagaccatggtggaagctcggaatggcgcagggcctatcaaaagctaccctcgacccggatcaagactgaaaatgcaaaacgggagtaaaggctcggggctgcagaataagaccttccactgcgaaatctgtgacgtgcacgttaattcagagattcagttgaagcaatag

SEQ ID NO: 42669 - protein, 411 aa, Artificial Sequence
  derived and/or modified sequence
MSVGCACPGCSSKSFKLYSPKEPPNGNAFPPFHPGTMLDRDVGPTPMYPPTYLEPGIGRHTPYGNQTDYRIFELNKRLQNWTEECDNLWWDAFTTEFFEDDAMLTITFCLEDGPKRYTIGRTLIPRYFRSIFEGGATELYYVLKHPKEAFHSNFVSLDCDQGSMVTQHGKPMFTQVCVEGRLYLEFMFDDMMRIKTWHFSIRQHRELIPRSILAMHAQDPQMLDQLSKNITRCGLSNSTLNYLRLCVILEPMQELMSRHKTYSLSPRDCLKTCLFQKWQRMVAPPAEPTRQQPSKRRKRKMSGGSTMSSGGGNTNNSNSKKKSPASTFALSSQVPDVMVVGEPTLMGGEFGDEDERLITRLENTQFDAANGIDDEDSFNNSPALGANSPWNSKPPSSQESKSENPTSQASQ

SEQ ID NO: 42670 - DNA, 2305 bp, Artificial Sequence
  derived and/or modified sequence
gagggaggcagggagagaaagggagaaaggcaggcagccggcgggcgctgcgtgtgtgtttgagtgtgcgagtgtgagtgagtgtgagtgccgggtcctgcctctcctggtgcccccagcagaggggcccggtggcctggggagggcgggcgggctgctcggaggcagaggcagcaagaggcggcggcggggagagccgagaaggaggaggaggagagaggaaagagcggagcagccattgttgagggaaaccttgcaaacaaagaaggctccggactccccgcggccccccgccccccaggccggccccctggcccccggcccccggcccagtggccattgtaactttcccccgggacagcggccgccgcggggcgggccgaggcagtgcgtgcgagtctttgtgcggccggcggactggagctcccagtcgggcctgcccgtcccactcgggacatgagctgctgaagttgtccccccgtcagccctcacccctgccaggactcctctgggcttgcagtcgctcccccgtacctctcctggccccctcagttctcccaggttgttcctcaaagtcattcaagctgtactcgccgaaggagcccccgaacggcaacgcctttccccccttccatcccggcaccatgctggatagggatgtgggcccaactcccatgtatccgcctacatacctggagccagggattgggaggcacacaccatatggcaaccaaactgactacagaatatttgagcttaacaaacggcttcagaactggacagaggagtgtgacaatctctggtgggatgcattcacgactgagttctttgaggatgatgccatgttgaccatcactttctgcctggaggatggaccaaagagatataccattggccggaccctgatcccacgctacttccgcagcatctttgaggggggtgctacggagctgtactatgttcttaagcaccccaaggaggcattccacagcaactttgtgtccctcgactgtgaccagggcagcatggtgacccagcatggcaagcccatgttcacccaggtgtgtgtggagggccggttgtacctggagttcatgtttgacgacatgatgcggataaagacgtggcacttcagcatccggcagcaccgagagctcatcccccgcagcatccttgccatgcatgcccaagacccccagatgttggatcagctctccaaaaacatcactcggtgtgggctgtccaattccactctcaactacctccgactctgtgtgatactcgagcccatgcaagagctcatgtcacgccacaagacctacagcctcagcccccgcgactgcctcaagacctgccttttccagaagtggcagcgcatggtagcaccccctgcggagcccacacgtcagcagcccagcaaacggcggaaacggaagatgtcagggggcagcaccatgagctctggtggtggcaacaccaacaacagcaacagcaagaagaagagcccagctagcaccttcgccctctccagccaggtacctgatgtgatggtggtgggggagcccaccctgatgggcggggagttcggggacgaggacgagaggctcatcacccggctggagaacacccagtttgacgcagccaacggcattgacgacgaggacagctttaacaactcccctgcactgggcgccaacagcccctggaacagcaagcctccgtccagccaagaaagcaaatcggagaaccccacgtcacaggcctcccagtaaaaggccctgctgtggccacccagtgctctgcctacctgccccacccctcacagccccagggagcagaagacagaatgaagagactgagcatctaaaatgggcagcctccatccacccgcttcagggaggaactggactctctgggggcaggtgccaagatttgcccccccagtggccctgggctgggcctggcctctacagagccttttagggggagggggtactcatgtggatgcctacttggaacctgggcctctgagacatgtcctgaccaccccccagggcatttgcctccatcttcaccccagattgtgggtttcccatccccctgactttacccctttcaagcctggggttgtctatacccacagcccttagggacttaaagttacggggcttcgttgaatgctccttcccctaggcagctggtaatagaggggtaaagctctgggcccctcctccctgctgccacttatcccagctccaagtttttttaaaaataatattattaaaaatgtaagttaaaaaaaaaa

SEQ ID NO: 42671 - DNA, 1236 bp, Artificial Sequence
  derived and/or modified sequence
atgtccgtgggctgcgcctgtcccgggtgtagctctaagtctttcaaactgtattcccccaaggaacctcctaacgggaacgcctttcctccattccaccccggtacaatgcttgatagggacgtcgggccgacccctatgtaccccccaacctatctcgaacctgggattggaaggcatacaccttacggcaaccaaacagactataggatcttcgagctgaataagcgcctgcagaactggacagaagaatgcgacaatttgtggtgggacgcttttacaacggaattttttgaagacgatgcaatgctcacaataacattctgtctcgaggatggccccaagcgatataccattggccggaccctgattcccaggtactttagaagcatcttcgagggcggagccacagaactttattacgtgctaaaacacccaaaagaggctttccacagtaacttcgtaagcctggactgcgaccagggaagcatggtcacacagcacggcaaaccaatgttcactcaagtgtgcgtggaggggaggctgtacctggagtttatgttcgacgacatgatgcgcatcaaaacttggcactttagcattagacaacatcgggaactgattccgaggagcattttagcaatgcacgctcaagacccacaaatgcttgatcaacttagtaaaaacatcaccaggtgcggcttgtccaactctacgctgaactacttgaggttgtgcgttattctcgaacctatgcaggagctgatgagcaggcacaagacctattccttatccccacgagactgtctgaaaacgtgcctgttccagaaatggcagagaatggtggccccccccgctgagccgacaagacaacaacccagcaaacgtcgcaagcgaaaaatgagcggtggtagcacaatgtccagcggcgggggcaatactaacaatagtaactccaagaagaaatctcccgcttcgacattcgccctttcatcccaggtgcccgatgtgatggtcgttggcgaaccgacgttgatgggcggggagttcggcgatgaagacgagaggctgatcacaagattggagaacacacagttcgacgccgccaatggcattgacgacgaagatagcttcaataactccccagcgctgggggcaaactctccctggaatagcaaaccgccgtcttctcaggagtctaagtccgaaaacccaacgtcacaggctagccaatag

SEQ ID NO: 42672 - DNA, 1236 bp, Artificial Sequence
  derived and/or modified sequence
atgtctgtgggctgtgcctgccccggctgcagcagcaagagcttcaagctgtacagccccaaggagcccccaaatggaaatgccttcccccccttccaccctggcaccatgctggacagagatgtgggccccacccccatgtacccacccacctacctggagcccggcatcggccgccacaccccctacggcaaccagacagactaccgcatctttgagctgaacaagaggctgcagaactggacagaggagtgtgacaacctgtggtgggatgccttcaccacagagttctttgaagatgatgccatgctgaccatcaccttctgcctggaggatggccccaagcgctacaccatcggccgcaccctcatcccccgctacttccgcagcatctttgagggcggggccacagagctgtactacgtgctgaagcaccccaaggaggccttccacagcaactttgtgtccctggactgtgaccagggctccatggtgacccagcacggcaagcccatgttcacccaggtgtgtgtggagggccgcctgtacctggagttcatgtttgatgacatgatgaggatcaagacctggcacttcagcatccggcagcaccgggagctgatccccaggagcatcctggccatgcacgcccaggacccccagatgctggaccagctgagcaagaacatcacccgctgtggcctgagcaacagcaccctgaactacctgcggctgtgtgtgatcctggagcccatgcaggagctgatgagccgccacaagacctacagcctgagcccccgggactgcctgaagacctgcctcttccagaagtggcagaggatggtggcccccccagctgagcccacccggcagcagcccagcaagaggaggaagaggaagatgtctgggggcagcaccatgagcagcggcggcggcaacaccaacaacagcaacagcaagaagaagagccctgccagcacctttgccctgagcagccaggtgcctgatgtgatggtggtgggggagcccaccctgatgggcggggagtttggagatgaagatgagcggctcatcacccggctggagaacacccagtttgatgctgccaacggcattgatgatgaagattccttcaacaacagccctgccctgggcgccaacagcccctggaacagcaagccacccagcagccaggagagcaagtctgagaaccccaccagccaggccagccagtag

SEQ ID NO: 42673 - DNA, 2285 bp, Artificial Sequence
  derived and/or modified sequence
gggagaaaggcaggcagccggcgggcgctgcgtgtgtgtttgagtgtgcgagtgtgagtgagtgtgagtgccgggtcctgcctctcctggtgcccccagcagaggggcccggtggcctggggagggcgggcgggctgctcggaggcagaggcagcaagaggcggcggcggggagagccgagaaggaggaggaggagagaggaaagagcggagcagccattgttgagggaaaccttgcaaacaaagaaggctccggactccccgcggccccccgccccccaggccggccccctggcccccggcccccggcccagtggccattgtaactttcccccgggacagcggccgccgcggggcgggccgaggcagtgcgtgcgagtctttgtgcggccggcggactggagctcccagtcgggcctgcccgtcccactcgggacatgagctgctgaagttgtccccccgtcagccctcacccctgccaggactcctctgggcttgcagtcgctcccccgtacctctcctggccccctcagttctcccaggttgttcctcaaagtcattcaagctgtactcgccgaaggagcccccgaacggcaacgcctttccccccttccatcccggcaccatgctggatagggatgtgggcccaactcccatgtatccgcctacatacctggagccagggattgggaggcacacaccatatggcaaccaaactgactacagaatatttgagcttaacaaacggcttcagaactggacagaggagtgtgacaatctctggtgggatgcattcacgactgagttctttgaggatgatgccatgttgaccatcactttctgcctggaggatggaccaaagagatataccattggccggaccctgatcccacgctacttccgcagcatctttgaggggggtgctacggagctgtactatgttcttaagcaccccaaggaggcattccacagcaactttgtgtccctcgactgtgaccagggcagcatggtgacccagcatggcaagcccatgttcacccaggtgtgtgtggagggccggttgtacctggagttcatgtttgacgacatgatgcggataaagacgtggcacttcagcatccggcagcaccgagagctcatcccccgcagcatccttgccatgcatgcccaagacccccagatgttggatcagctctccaaaaacatcactcggtgtgggctgtccaattccactctcaactacctccgactctgtgtgatactcgagcccatgcaagagctcatgtcacgccacaagacctacagcctcagcccccgcgactgcctcaagacctgccttttccagaagtggcagcgcatggtagcaccccctgcggagcccacacgtcagcagcccagcaaacggcggaaacggaagatgtcagggggcagcaccatgagctctggtggtggcaacaccaacaacagcaacagcaagaagaagagcccagctagcaccttcgccctctccagccaggtacctgatgtgatggtggtgggggagcccaccctgatgggcggggagttcggggacgaggacgagaggctcatcacccggctggagaacacccagtttgacgcagccaacggcattgacgacgaggacagctttaacaactcccctgcactgggcgccaacagcccctggaacagcaagcctccgtccagccaagaaagcaaatcggagaaccccacgtcacaggcctcccagtaaaaggccctgctgtggccacccagtgctctgcctacctgccccacccctcacagccccagggagcagaagacagaatgaagagactgagcatctaaaatgggcagcctccatccacccgcttcagggaggaactggactctctgggggcaggtgccaagatttgcccccccagtggccctgggctgggcctggcctctacagagccttttagggggagggggtactcatgtggatgcctacttggaacctgggcctctgagacatgtcctgaccaccccccagggcatttgcctccatcttcaccccagattgtgggtttcccatccccctgactttacccctttcaagcctggggttgtctatacccacagcccttagggacttaaagttacggggcttcgttgaatgctccttcccctaggcagctggtaatagaggggtaaagctctgggcccctcctccctgctgccacttatcccagctccaagtttttttaaaaataatattattaaaaatgtaagttaaaaaaaaaa

SEQ ID NO: 42674 - DNA, 2089 bp, Artificial Sequence
  derived and/or modified sequence
cgagggcggagaggggggcgctcggcgacggcggcgggagcgcacagacacgcacacgcacacgcgcacacacgcacacacggacacacactccgcggactcacacccgcgcgcacacacgcagaggccgctcgccttcctgcctggcttccttcctgtctgctccgcgcctgacaggcccctcgccgcagccaggggccgcccgcaccgggccgaggccgggccgggccggcggcgagcgcagcgggggccgcgggcggcggcggcggctcatgcccggcctgtccccgcgaggggcgggcaccgtgactcggctgggcccccagaggcgggcgatgtgaagatgtcagtgggctgtgcctgtcctggttgttcctcaaagtcattcaagctgtactcgccgaaggagcccccgaacggcaacgcctttccccccttccatcccggcaccatgctggatagggatgtgggcccaactcccatgtatccgcctacatacctggagccagggattgggaggcacacaccatatggcaaccaaactgactacagaatatttgagcttaacaaacggcttcagaactggacagaggagtgtgacaatctctggtgggatgcattcacgactgagttctttgaggatgatgccatgttgaccatcactttctgcctggaggatggaccaaagagatataccattggccggaccctgatcccacgctacttccgcagcatctttgaggggggtgctacggagctgtactatgttcttaagcaccccaaggaggcattccacagcaactttgtgtccctcgactgtgaccagggcagcatggtgacccagcatggcaagcccatgttcacccaggtgtgtgtggagggccggttgtacctggagttcatgtttgacgacatgatgcggataaagacgtggcacttcagcatccggcagcaccgagagctcatcccccgcagcatccttgccatgcatgcccaagacccccagatgttggatcagctctccaaaaacatcactcggtgtgggctgtccaattccactctcaactacctccgactctgtgtgatactcgagcccatgcaagagctcatgtcacgccacaagacctacagcctcagcccccgcgactgcctcaagacctgccttttccagaagtggcagcgcatggtagcaccccctgcggagcccacacgtcagcagcccagcaaacggcggaaacggaagatgtcagggggcagcaccatgagctctggtggtggcaacaccaacaacagcaacagcaagaagaagagcccagctagcaccttcgccctctccagccaggtacctgatgtgatggtggtgggggagcccaccctgatgggcggggagttcggggacgaggacgagaggctcatcacccggctggagaacacccagtttgacgcagccaacggcattgacgacgaggacagctttaacaactcccctgcactgggcgccaacagcccctggaacagcaagcctccgtccagccaagaaagcaaatcggagaaccccacgtcacaggcctcccagtaaaaggccctgctgtggccacccagtgctctgcctacctgccccacccctcacagccccagggagcagaagacagaatgaagagactgagcatctaaaatgggcagcctccatccacccgcttcagggaggaactggactctctgggggcaggtgccaagatttgcccccccagtggccctgggctgggcctggcctctacagagccttttagggggagggggtactcatgtggatgcctacttggaacctgggcctctgagacatgtcctgaccaccccccagggcatttgcctccatcttcaccccagattgtgggtttcccatccccctgactttacccctttcaagcctggggttgtctatacccacagcccttagggacttaaagttacggggcttcgttgaatgctccttcccctaggcagctggtaatagaggggtaaagctctgggcccctcctccctgctgccacttatcccagctccaagtttttttaaaaataatattatt

SEQ ID NO: 42675 - DNA, 1236 bp, Artificial Sequence
  derived and/or modified sequence
atgagcgtgggctgcgcctgccccggctgcagcagcaagagcttcaaactatatagcccaaaagaacccccaaatggcaatgcctttccacctttccacccaggaacaatgttggacagagatgtcggtcccacccctatgtacccccccacatacctggagcccggcatcggcaggcatacgccttacggcaatcagaccgattaccgcatcttcgagctgaataagcggctgcaaaattggactgaagagtgtgacaatttgtggtgggatgcctttactaccgaattcttcgaggacgatgccatgctgactatcaccttctgtctggaggacggccccaaacggtataccattgggagaacacttatcccaagatatttcaggtcaatattcgaggggggagctactgaactgtactacgtcctcaaacatcccaaagaagcttttcactctaattttgtatcacttgactgtgaccaaggctctatggtcactcagcatggtaaaccgatgttcacccaagtctgtgtcgaaggacgcctgtatctggaattcatgtttgacgacatgatgaggatcaagacgtggcatttcagcatccgacagcaccgtgaactcataccaaggagtattttggccatgcacgcccaggatccacagatgctggaccagctgtccaagaacattacaaggtgtggcctgtcgaacagtactctaaattatctgcggctgtgcgtaattttagagccaatgcaggagcttatgagtaggcataaaacatatagtctgtccccgcgggactgcttaaagacctgcctcttccaaaagtggcaaaggatggtggcccctcccgccgagcctaccaggcagcagccatctaagcggaggaagcggaaaatgagcggtggctctacaatgtcgagcgggggaggaaatacaaataactcaaactccaagaaaaagtcaccagcctcgaccttcgcactttcgtctcaggtgccagacgtcatggtggttggagaacccactctcatgggcggggaattcggcgacgaggatgaaagactcatcacccggctggaaaacacccagttcgacgcagcaaatggtatcgacgatgaggacagttttaataatagccccgccttgggcgccaacagcccatggaatagtaagccaccatcttcccaggagagcaagtccgaaaaccctacatcccaggccagccagtag

SEQ ID NO: 42676 - DNA, 1236 bp, Artificial Sequence
  derived and/or modified sequence
atgtcagtcggttgcgcttgtccgggatgcagctccaagtcctttaaactgtattctccgaaggaacccccaaatggtaacgcattccctccctttcaccctggaaccatgctggatcgcgatgtcggccctacaccaatgtaccctcctacgtatctggaaccagggatcggcagacacacaccttacggaaaccagacggactaccgcatcttcgagttaaacaaaaggctgcagaattggaccgaggagtgcgacaatctatggtgggatgctttcaccacagaattctttgaagacgacgcgatgctgactattacattttgcctggaggacggtccgaagaggtatactattggacgaactctgattcccaggtatttcagatccatcttcgaaggtggagcgacggagctgtattacgtgttaaaacaccccaaggaggcgtttcattcaaactttgtatctctcgactgtgatcagggcagcatggtcacccagcatggcaagccaatgttcacccaagtgtgtgtagagggacggctgtatctggagttcatgttcgacgatatgatgaggataaaaacatggcacttttctatcagacagcacagagaattgattccgcgatctatcctcgccatgcacgcccaggacccacagatgctggatcagctatcaaagaatataactagatgcggtctatcaaacagcacgctcaactatcttcggctgtgcgtgatcctcgagccaatgcaggagctgatgagcagacataaaacatattctctcagtccgagagactgcttaaagacctgtttgttccagaagtggcaacgaatggtggcaccccctgccgaacccacgaggcagcaaccaagcaagcgcagaaagagaaaaatgagtggcggttccaccatgagtagcgggggaggcaatactaacaattcaaatagcaagaaaaagagccctgcatcaacatttgccctgagttcacaggttccagacgtcatggtcgtaggtgagcctacgttgatgggcggagaatttggagatgaagacgaacgactgattacccggttggaaaacacccagtttgatgccgctaacggaatcgacgacgaggatagcttcaataactctccagcgctgggtgccaacagtccgtggaatagtaaacccccatctagtcaggaaagcaagtcagagaaccctactagtcaagcttcacagtag

SEQ ID NO: 42677 - DNA, 1236 bp, Artificial Sequence
  derived and/or modified sequence
atgagcgtgggctgcgcctgccccggctgcagcagcaagagcttcaagctgtacagccccaaggagccccccaacggcaacgccttcccccccttccaccccggcaccatgctggacagagacgtgggccccacccccatgtacccccccacctacctggagcccggcatcggcagacacaccccctacggcaaccagaccgactacagaatcttcgagctgaacaagagactgcagaactggaccgaggagtgcgacaacctgtggtgggacgccttcaccaccgagttcttcgaggacgacgccatgctgaccatcaccttctgcctggaggacggccccaagagatacaccatcggcagaaccctgatccccagatacttcagaagcatcttcgagggcggcgccaccgagctgtactacgtgctgaagcaccccaaggaggccttccacagcaacttcgtgagcctggactgcgaccagggcagcatggtgacccagcacggcaagcccatgttcacccaggtgtgcgtggagggcagactgtacctggagttcatgttcgacgacatgatgagaatcaagacctggcacttcagcatcagacagcacagagagctgatccccagaagcatcctggccatgcacgcccaggacccccagatgctggaccagctgagcaagaacatcaccagatgcggcctgagcaacagcaccctgaactacctgagactgtgcgtgatcctggagcccatgcaggagctgatgagcagacacaagacctacagcctgagccccagagactgcctgaagacctgcctgttccagaagtggcagagaatggtggccccccccgccgagcccaccagacagcagcccagcaagagaagaaagagaaagatgagcggcggcagcaccatgagcagcggcggcggcaacaccaacaacagcaacagcaagaagaagagccccgccagcaccttcgccctgagcagccaggtgcccgacgtgatggtggtgggcgagcccaccctgatgggcggcgagttcggcgacgaggacgagagactgatcaccagactggagaacacccagttcgacgccgccaacggcatcgacgacgaggacagcttcaacaacagccccgccctgggcgccaacagcccctggaacagcaagccccccagcagccaggagagcaagagcgagaaccccaccagccaggccagccagtag

SEQ ID NO: 42678 - protein, 221 aa, Artificial Sequence
  derived and/or modified sequence
MGEKSRRKGPAPRHADGKLGRTCDHPYAPWSFTPSSRAPTAWVRPPCPVWASRLQEHSPEPRRARAPPTRRAQAALYAPALRLRDHLDRFSILMTSCTSWLQAPQAPGLCRDEQSSRISVPQLSGAPILLPDLEGTKLSNFQESSPLPHKHERKDKRSTPEEEGRSAPEKIIQSLKLCPGGHRPASLSSGCPAGCRLSFNLPPSMLLSVQKCCMPSSLKTC

SEQ ID NO: 42679 - DNA, 7912 bp, Artificial Sequence
  derived and/or modified sequence
atgcgctgtgcgcccggccggcgtggctggctgtttgaggactgcgcgcggagctccgtggcgggtgtctgaagtcgtgagtttactgcttgtaaggaacatagcgatcactgggaacctggaagtagagactcctttctgccatccatccgtccctcgggctgctgcgaatccccccgccggcctccaggaccccgggctgactgaacgcccgcaccggtcccgccgccccagggcccgctacgcgcccggcataatgggagaaaaatcacgacggaaaggcccagcccctcgccatgcagacgggaagcttggccgcacgtgtgatcacccttacgccccttggagtttcaccccctcttcgcgggctccaacagcctgggtcaggcctccttgtcctgtgtgggcctctcggctgcaagaacacagtcccgagccccggcgagcccgcgcgcctcccacccgccgtgcacaggctgcactttacgccccagcactgcgcctgcgggaccatctggatcgcttttccattctgatgacgtcctgtacttcgtggctgcaggctcctcaagccccaggtctgtgcagagacgagcaaagcagcagaatatccgtgccacagctttctggagcacccattttactaccagatttggaaggaacgaagttaagtaatttccaagaatcatctcccctgccccacaaacatgaaagaaaagacaagagaagcaccccagaagaggaggggagaagtgccccagaaaaaatcatccagtctctgaagctttgcccaggtgggcacaggccagccagcctctcctctggttgcccagctggctgcaggctgtcatttaaccttccgcccagcatgcttttgagtgtgcagaagtgctgcatgccctcttctttgaaaacctgttgagcaaatgcctccgcattttatgcaccttcaacctccacagccaaaggcccccaagaccaaacatgctgtgcacacacagcagctctttgtgtcccactcctggccgatctcctgcatcatctcgttgagcttcattgaaccccgcagtctgcatgctctgtggaactcagggtcttcattttgcatgaaactcagggtcttcattttccgtggaactcaaagtcttcttgctctgtggaacttggagtctcagggcctttgtgctccatggaacttggggtctgtgtgattcatggaactcagaatccttgtgctctgtggtactcagggtgtgcgtgctctgtggaactcggggtctgcatgctccatggaaagcaccaggatgcacttgaccccccacacccatacatacatccttcattttattcctggccctcacctgtccactctgtgaggcttcttcacccccactctcctttgagctcatgccgggtctttcagactggcctgaagcatgggtgttcgtaggggggagtggctgatgtcacaccttcaggcaaattctgctagtgtcacacctgatggagctgcctagggaggatgtttccttggaggatgcgccctggcagccactggcttcttacggtgcctgcactgctgctgctgccatgggggtgccacagggccacactgggggctgttctggaattggtggttttcatttccaggttaggtagggactggcaggcaccttggctgtccttgtggcttctgtcttgaccctggtcctccccaggcagctgattttctgggctgctgctcttccaggaagaattaaaggtgggaatggctgaaacctcagctttggattcacagagaccctaggctgtgtcatgcagaaagggaaaggattgcagatggtggtgggatcagccgaaggcagggccttcactgtgatgctggagccctccatgctgggatgtttgcatacagcccaggttcagttcggtggtccatcagcgagtcctggatctggtctcactcacaagccatggacaacatgagctcagtttgccaggactcttggggttagggagagctcagcatccgggtggctctggttccttctcatgctgaaactctgctggtgttcctccatggggcaaatgtgggtttttctgaggtgcccctcttgctggagttgaggatgagaaatgttttcagtgggtttgcaccctccacacatatgtaagaggtgttgtgtttcattcctgtcaggatccattgctgcagcttcctgaagttgtgtccgttaaaaggcagggacccggtgtccaggctacagagggtgactccaggttccacaccaccactgtggaccagtgtgcctatggacttaggagagttcccagatcgcacaagggggctgccccagagggtgttcagcttgttgccaacagttgctgaagccaaagtctgcaaccttgatgttcaggtcaagtagccagaaacaggtgttctggctttaggtccctgtggacaatgccattctctccttcccaggctactgatgtcctgggttgctcctcttatggtagaagctcaagatggaatggctggagcttggctgcctccggttagagcctgggctctgtattgcagacatcacctggcagaattcctcatgggccccttttgtcgtgggtgcgactgctgggccagggttgtcgtgggtagtaaaggtatttaccaagacaaccgtgagtaaagaaaggcaaatttattacagaaactatgaaaatacattgcaagaatgcaacatgcagcacagcagagaaggggctgtctgcaaagataaagggctggagggaagttttctaaggttgtgctggacggcgctatgtgcaggtgagcttgtgctatatgctaagaatatgttggaataattttaactgccagacctttcctcttctggtgcccgagggaaacgccctgctgcttttagctgtcttgtaacccacacgccttttcacttctgaagttgcaagaataacggctgtggtttttcacacaaaagggttgcagactgggttaggtccctgttccgccaacctggctgtttcccagtttcagttaacttagtggtttactagagccccacacctttctctttcatatggccatgatccaggaggtaatccgtcacctcccctccactagagtgctccatggccagggataatccgtcacctcccctccaccagagtgctccatggccaggggtaatcctcacctctcctccgctagagtgttccatggccaggcagtgtttcctgggtccagagcacctcaaacaatttcagtgttgtggtgactcagggccttcaccatacagacttgacagcatagtctagaggctggaggggctctgtgactcccattaatgacagtcactgccacggtttccccaggcaggatgtgccaggagaactgctccatgttggctcagcagaatgttattataggtagctcaaaaagagagggaacagggcttctctagattatttcagggaacgagctattatttgaatgttaatttaagactattttatcaattaaaaatgtaaggcccaagaaacttcagtgaggaagaatgaacaaattgaataaatactgttaaactttatgcttctttcagcaaatattttctgctcgtctctatgagtcaggcactttgctagataacataacatagaaacatagcatcaatccaatatggtgtgggtactgtatgtcaaatttaaaaataaaagtgctatataagaaacctctcagtgccctggaggcagggtccagagacatatcctgtggatgactggggctgaggtttaagggatgagcctcggtgatgagacagacgggagagggcaccctaggaaaagcgtcttcaggcaatcgtggttcagtgagctgcagccgtcgcggcaggagattgaggagcgcggcctatctggtgatttgctgtggttatgttctgtaaactcgccttgggtcctgaagtattgcttctggggaaacacagggtaaggttcctgcaagcctctggttgcaatattttcaactgccaaggcaccattcatgttccatgggttcattttccaacatccctgtaaaacaaggcagtcccatcagtgttgaaaactgctctccacatacccttttcccgtagagtacttcctgatctacagagctgccactcctgaaaagctaacactttccatgccatgctgccttttgaaaggtgccagccaggcagcattagctaaggcctctttttggctctcctcacaacagtgctgcccgctgtgctttcattggtcatcatctcatgaagtcacaaatgtagctgcttttctatggtttccatggttttgccacactctaggggatattagttttgcactttcccaagcagcctcgtgtacaggttggtgaagctccccttcctctttctggatgcactgtagtgtttgtcattagcgttgaactcacagttcgcagcactagaacccacacctgaaccaagcttggctaacaagcgttttctctgtaaggcacattacagccttcttgctcataaggacactagacagcgcttcagcattatgcttggaggccgtttcaaacagtgaaatcaacaacaagaagctcaaaactgcaaaagaagtggtactatagagaccatgagaagactggtttgcaggttgagagtaggaacaagaaggcagcgtggggccctgcatggcctccgctgggaggccgatggctcaaattgttgccctactctgcacatgttttcctgtgactgtgaaagcaacacgagtattgattcgggggttaaaaatacattttaacaagcagaaaagttcacaaatatgaaatagtggctagtgaggaccacccccatgctggagctgcagacagaggcttttgtgagtgcgaggcttgctcctatcccgggagcttctggttgccaccagcaccttgtaagccagggagtggtgtcacctgtactgtagcaaaagcaccttttctaaatgtgaagtatggcttgaagagaggaagatggaagatggctgtgttagggatgaagcaaggatgggggtggattgaccaagctgggccagaggtgcgaggagctgatctgcgagccctgtgtgcctgtgagtcctggcggagtggccgtgcgtggtgacagggaggaggcatccaggacagcacccacgttcccgcctgaggcacatgagggtggatgacagggttcggggccctagccttcaagtcagacacacctgagttcaaatccagactccaccactgactggctatgtagccttagacatgttccttcacttccctaagcgtccattttctcatgtccaatacatagattactatgccataggaatattaaatcactcagtgattttgaggttaaaatgagtgctggtgctttttattgaaataaaatgggaaaagaagcagcatttgaggtgtgagggaggggaatctgggcatggggagttggatgtgcctgtggacacccatggacaaatgtccagcagccatccaatgtgctttcgggatgctggggccaggatgtggggcagcaacatacagacctggaagttacaagcaggcaggcagctgctgcagctgtgaagagcaggcagtgcaggatcagaggcccagggtaaagcctggggaatgccagcatttagaaagaggccgctggagatcagaaaagagcaacaggaaaagcaggagggtgtggagggatgggaggtgcaggaggagagtttccaagagggaggggcaggagtcggtgttctgcaggcatggactggaagtcgtagtacttttgaactgtagggacctaagacatcttttagtctaatccccttatctatccggaagaagaaatcatgattccaaggtgacatgagttgcttgctttaggtcacagtgatttcacattgggatacctcgatttctaatgagtaatagaatatttaataaatactctcgaatttggaattgctcctattccagtcacactggatattttcccaatttggtgaaactgatattttaacaactgttaaccattccatgtactaagatgcttatagtcaaactgtgcctcttaaacctatttttattgtgtatttaacaaattttgctataatgttaaaaacaacttataactcatcaaactgcattttaattttagtaaacacaaattacactgaaacgggagtgttccctggcccctctcacaggacgtgtgacaagggttcggctcgctgcctgttcaaaccccttacgggagggggatcacgcagagggacaggtgcaggagcccaagtgggtgtgtgctacagtgtgctcttttagccttggcatctgtggatggcttgagtgttaactagctcagtggaccctcagcctttctgcaaaggcagagggtcattgtgacagctttctgtatcccaagctcttgtccatgatcctggaagaatcaggtcacacacagacttgaaggataaatgcaggggtttcactgaggggtagaagtggctctcagtaggatgcatggggagctggaagtggggagggagtgcgaagacgatcttcccctggagtttggccactggacggccaaactcctctcttaccacccgcagctgaactcctctcagcgttcaggtgttcctcatcttctcactttctctgccatgccgttctgctgtttgactgcttttctcttcatctcttcatctgctcctggagcctggggtttggggtttatatgggtacaggatacgggggtgtggtgggccaaagggcaactttttgggtacgaaaacagaaatgcctgttcccagttagggccatgggtctccaggcttgagggtggggcctttgctggggagccgccctcttctatgcagtatttccctgtctcttttctatatcaatacctcaataaaatttagttttaaaaaatagcacatgtaaaaagtttggctatttaaactaaaaagtaattatgtcctaaattattttgtatacaaagacctgaggacttgaaatattgtaataattggagcttgtctctgctttaagggcaccactcgcccctgatccatcttggtttcccgcacaaggcagcaggattgcccatgaatgaacatgggtgaaatcgttggatacaggtagtaaatacattctatttcctgaaaaatattacctaactacatgtctagatatggaattgcattttcaagccaagctggaattacaaattgtagcccatttgaaaatgcatacaaatgtgtgacatatacacccagaggaaaagaagtcacagttatgaaagaacaaagtgggaaaatatctttttcatgtaagattgagcattttggttgatactgtgataaaaaatcttgtgactgattctcttttgcattggtttttagtgtcatgtgcactctgcccaactcagataaaattgtatatgatgtaaatagcaggaaactataaatggtgatattgtcctgaaaggaagccacttcatttttcaaagatttcttccgcggcagggatctaggagtgtgcagggatggagttttgcatttctagaggaaacagcaggcagggtgtgtgcagccggaaaggaggcgtctaggttccaagggcaaatcccacccccttagaggggattggagagcctgggaaagaggctgggctgcctgtgatccccaccccacaccctgcctcctacaagcccctagaaggtccacactttgagttgtcagccagagacagtaactcaaaacctcggcttcgggcagccagaagcccagaaatgggggagagggcaggcctagacaccagggatgaaaataaagtgaatattaaaaatta

SEQ ID NO: 42680 - DNA, 666 bp, Artificial Sequence
  derived and/or modified sequence
atgggcgagaagagcagaagaaagggccccgcccccagacacgccgacggcaagctgggcagaacctgcgaccacccctacgccccctggagcttcacccccagcagcagagcccccaccgcctgggtgagacccccctgccccgtgtgggccagcagactgcaggagcacagccccgagcccagaagagccagagccccccccaccagaagagcccaggccgccctgtacgcccccgccctgagactgagagaccacctggacagattcagcatcctgatgaccagctgcaccagctggctgcaggccccccaggcccccggcctgtgcagagacgagcagagcagcagaatcagcgtgccccagctgagcggcgcccccatcctgctgcccgacctggagggcaccaagctgagcaacttccaggagagcagccccctgccccacaagcacgagagaaaggacaagagaagcacccccgaggaggagggcagaagcgcccccgagaagatcatccagagcctgaagctgtgccccggcggccacagacccgccagcctgagcagcggctgccccgccggctgcagactgagcttcaacctgccccccagcatgctgctgagcgtgcagaagtgctgcatgcccagcagcctgaagacctgctag

SEQ ID NO: 42681 - DNA, 666 bp, Artificial Sequence
  derived and/or modified sequence
atgggagagaagagtcgtcgcaaagggcccgctccaaggcacgcagatgggaaactgggtaggacatgtgaccacccatacgctccctggtcattcacccctagtagccgagcgcccactgcatgggtgaggccaccttgcccggtgtgggctagccgacttcaggaacactcacccgagcctcggagagcccgcgcaccacccacgaggagggctcaagcggccctatacgctcctgcacttcgcctgagagaccatctggacagattctccatactgatgaccagctgtactagttggctgcaggccccacaagctccaggcctttgccgagatgagcaaagttcaagaatttcagtgcctcagttgtccggcgccccgatcctgttaccggacctggaagggactaagcttagcaatttccaggagtcaagcccattgccacacaagcacgagagaaaagacaagcggagcacaccggaagaggaggggagatcagcaccagaaaaaatcattcagagtctgaagctctgcccaggaggccatcggcctgcatcactgtcctccgggtgtccggccgggtgtaggctctcattcaatctgcccccatctatgctgctctctgtccagaagtgttgcatgcctagctcactaaagacctgctag

SEQ ID NO: 42682 - DNA, 666 bp, Artificial Sequence
  derived and/or modified sequence
atgggagagaagagcaggaggaagggccctgcccccaggcatgctgatggcaagctgggccgcacctgtgaccacccctatgccccctggagcttcacccccagcagccgggcccccacagcctgggtgcggcccccctgccctgtgtgggccagccggctgcaggagcacagccctgagccccggcgggcccgggccccacccacccggcgggcccaggccgccctgtatgccccagccctgcggctgcgggaccacctggaccgcttcagcatcctgatgaccagctgcacctcctggctgcaggccccccaggcccctggcctgtgcagagatgagcagagcagccgcatctctgtgccccagctgagcggggcccccatcctgctgcctgacctggagggcaccaagctgagcaacttccaggagagcagccccctgccccacaagcatgagaggaaggacaagaggagcaccccagaggaggagggccgcagcgcccctgagaagatcatccagagcctgaagctgtgccctgggggccacaggcctgccagcctgagcagcggctgcccagctggctgccgcctgtccttcaacctgccccccagcatgctgctgtctgtgcagaagtgctgcatgcccagcagcctgaagacctgctag

SEQ ID NO: 42683 - DNA, 666 bp, Artificial Sequence
  derived and/or modified sequence
atgggcgagaagagccggcggaagggccccgccccccggcacgccgatggtaagcttggtagaacgtgtgatcacccctatgccccttggtcatttactcctagctctcgtgcaccaacagcttgggtccgccccccatgtcctgtttgggcctcacgcctgcaagaacattcccctgaaccacgtagggccagagctccgcctacccgtcgggctcaagctgccctatacgcacccgcactaagattgcgagatcatctggacaggttttctattctcatgacgtcatgcacctcctggttgcaggccccacaggcccctgggttgtgcagggatgaacagtctagccgcatctccgtgccgcagctgagtggcgcacccatactgctgccagacttggaaggaactaagctgagtaactttcaagagtccagtcctctgccccacaagcatgagagaaaagacaagcggtccacgccggaggaggaagggcggtctgcgcctgaaaaaattatccaaagcttaaagctttgccccggcggtcatcgtccagcctctctgtcctctgggtgccccgcggggtgtcgactgtctttcaatctgccccccagcatgctgttgtctgtgcagaagtgttgcatgcccagcagtctcaaaacatgctag

SEQ ID NO: 42684 - DNA, 666 bp, Artificial Sequence
  derived and/or modified sequence
atgggtgaaaagtctagaagaaaggggccagcgcctcgccacgcagacggtaagctcggccgaacctgcgatcacccatacgccccttggtccttcactccctcctctcgcgctccgacagcttgggttcggccaccctgccccgtgtgggcgagcagattacaagaacattcccctgagccacgtcgcgctagagcccctccaacccggagagctcaagcggcactgtacgctccagcactcaggctgcgcgaccatctagacaggttctccatattgatgacttcctgtacgtcctggctacaggccccacaagccccaggcctctgcagggacgagcaaagctccagaatatcagttcctcaactcagcggagctcctattctcctgcccgacttggaaggcaccaaactgtccaacttccaggagtcttccccactgcctcacaaacacgagcgtaaagataaacggagcaccccagaggaggaaggccgtagcgccccagaaaagattatccagtcactgaagctctgtcccggtggccatcgcccagccagcttgagcagtgggtgccccgcagggtgtcggttatcttttaacctccctccttcaatgttgctgtcagttcagaagtgttgtatgccttcttccctgaagacttgctag

SEQ ID NO: 42685 - protein, 422 aa, Artificial Sequence
  derived and/or modified sequence
MEPPASKVPEVPTAPATDAAPKRVEIQMPKPAEAPTAPSPAQTLENSEPAPVSQLQSRLEPKPQPPVAEATPRSQEATEAAPSCVGDMADTPRDAGLKQAPASRNEKAPVDFGYVGIDSILEQMRRKAMKQGFEFNIMVVGQSGLGKSTLINTLFKSKISRKSVQPTSEERIPKTIEIKSITHDIEEKGVRMKLTVIDTPGFGDHINNENCWQPIMKFINDQYEKYLQEEVNINRKKRIPDTRVHCCLYFIPATGHSLRPLDIEFMKRLSKVVNIVPVIAKADTLTLEERVHFKQRITADLLSNGIDVYPQKEFDEDSEDRLVNEKFREMIPFAVVGSDHEYQVNGKRILGRKTKWGTIEVENTTHCEFAYLRDLLIRTHMQNIKDITSSIHFEAYRVKRLNEGSSAMANGMEEKEPEAPEM

SEQ ID NO: 42686 - protein, 586 aa, Artificial Sequence
  derived and/or modified sequence
MKKSYSGGTRTSSGRLRRLGDSSGPALKRSFEVEEVETPNSTPPRRVQTPLLRATVASSTQKFQDLGVKNSEPSARHVDSLSQRSPKASLRRVELSGPKAAEPVSRRTELSIDISSKQVENAGAIGPSRFGLKRAEVLGHKTPEPAPRRTEITIVKPQESAHRRMEPPASKVPEVPTAPATDAAPKRVEIQMPKPAEAPTAPSPAQTLENSEPAPVSQLQSRLEPKPQPPVAEATPRSQEATEAAPSCVGDMADTPRDAGLKQAPASRNEKAPVDFGYVGIDSILEQMRRKAMKQGFEFNIMVVGQSGLGKSTLINTLFKSKISRKSVQPTSEERIPKTIEIKSITHDIEEKGVRMKLTVIDTPGFGDHINNENCWQPIMKFINDQYEKYLQEEVNINRKKRIPDTRVHCCLYFIPATGHSLRPLDIEFMKRLSKVVNIVPVIAKADTLTLEERVHFKQRITADLLSNGIDVYPQKEFDEDSEDRLVNEKFREMIPFAVVGSDHEYQVNGKRILGRKTKWGTIEVENTTHCEFAYLRDLLIRTHMQNIKDITSSIHFEAYRVKRLNEGSSAMANGMEEKEPEAPEM

SEQ ID NO: 42687 - DNA, 1761 bp, Artificial Sequence
  derived and/or modified sequence
atgaagaagagttactcgggagggacccggaccagcagcggaagactccgcaggctcggagacagtagcggaccggcgttgaagagaagcttcgaggtggaggaggtggagacacccaatagcacacctcctagacgagtgcagacaccactcttacgtgctaccgtggcttcatccactcagaagtttcaggacttgggggttaaaaattccgagccttcagcccgtcacgtggactccctgtcccagcggagtcccaaggcgagcctgcgcagggtcgaactctctgggcctaaggctgcggagcccgtgtccagacgaacggagctgtccatcgatatttcatccaagcaagtggaaaacgccggcgcaataggtcccagccggttcggcctgaaacgggcagaggtgctcgggcacaagaccccagagcctgctccccggaggacagaaatcacaatcgttaaacctcaggagtctgcacatcgcaggatggaaccgcctgcttctaaggtccccgaagtcccaactgctccagccaccgacgcggcacctaagagagtggagatccagatgcctaagccagccgaagcacccacggcaccaagccctgcgcagaccctggagaactctgagccggcgccagtgagtcagcttcagagcaggcttgaacctaagcctcagccacctgtggctgaggctacccctagaagccaggaagccaccgaggctgctccaagttgcgttggcgatatggccgatactccaagagacgcagggctgaaacaggcccctgcctcacgcaatgagaaggcccccgtagacttcggatatgtgggaattgacagtatactcgaacaaatgcgcaggaaggccatgaagcagggctttgagttcaacattatggtcgtgggtcagagcggcttgggcaagtctaccttgatcaacactctattcaagtcgaaaatatcacgcaaatctgtgcaaccaacctcagaggagaggataccaaagaccatcgagatcaaaagcataactcacgatatcgaggaaaagggcgttagaatgaaactcaccgttatcgacacacccggcttcggtgaccatattaataacgaaaactgttggcagccaattatgaaattcataaatgatcagtacgagaagtacctacaggaagaggtaaatataaatcgcaagaagaggatacccgacacgagagtgcattgctgcctttatttcatacctgcgacgggccactccttaaggccacttgatattgagttcatgaagcgtttatcgaaggttgtaaatatcgtccccgttattgccaaggccgacaccctgaccttggaggagagagtccattttaagcaacggattactgctgatctgctgagcaacggcatagacgtgtacccacagaaggagtttgatgaggatagtgaggacaggctcgtgaatgagaagtttagagagatgattccgtttgcggttgtggggtccgaccatgaataccaggtaaacggcaagcgcatactgggaagaaagaccaaatgggggaccatcgaggtcgagaatactactcactgtgaattcgcctacctcagggatctgctcatccggacacatatgcaaaacatcaaagatattacctctagtatccactttgaagcttaccgcgtgaagagacttaacgaaggctcctctgccatggctaacgggatggaggagaaagaaccagaggctcctgagatgtag

SEQ ID NO: 42688 - DNA, 1761 bp, Artificial Sequence
  derived and/or modified sequence
atgaagaagagctacagcggcggcaccaggaccagcagcggccgcctgcggcggctgggggacagcagcggccctgccctgaagaggagctttgaggtggaggaggtggagacccccaacagcaccccaccaagaagagtgcagacccccctgctgcgggccaccgtggccagcagcacccagaagttccaggacctgggcgtgaagaacagcgagcccagcgcccggcacgtggacagcctgagccagaggagccccaaggccagcctgcggcgggtggagctgagcggccccaaggctgctgagcctgtgtccagaagaacagagctgagcattgacatcagcagcaagcaggtggagaatgctggggccatcggccccagccgcttcggcctgaagagagctgaggtgctgggccacaagaccccagagcccgcccccaggagaacagagatcaccatcgtgaagccccaggagagcgcccacaggaggatggagcccccagccagcaaggtgcctgaggtgcccacagccccagccacagatgctgcccccaagagggtggagatccagatgcccaagccagctgaggcccccacagcccccagccctgcccagaccctggagaacagcgagcccgcccctgtgtcccagctgcagagccggctggagcccaagccccagccccctgtggccgaggccacccccaggagccaggaggccacagaggccgcccccagctgtgtgggggacatggctgacaccccaagagatgctggcctgaagcaggccccagccagcagaaatgagaaggcccctgtggactttggctacgtgggcatcgacagcatcctggagcagatgaggaggaaggccatgaagcagggctttgagttcaacatcatggtggtgggccagagcggcctgggcaagagcaccctcatcaacaccctcttcaagagcaagatcagcaggaagtctgtgcagcccaccagcgaggagcgcatccccaagaccatcgagatcaagagcatcacccatgacatcgaggagaagggcgtgaggatgaagctgactgtgattgacaccccaggctttggagaccacatcaacaatgaaaactgctggcagcccatcatgaagttcatcaatgaccagtatgagaagtacctgcaggaggaggtgaacatcaacaggaagaagaggatcccagacaccagggtgcactgctgcctgtacttcatcccagccaccggccacagcctgcggcccctggacatcgagttcatgaagaggctgagcaaggtggtgaacatcgtgcctgtgattgccaaggctgacaccctgaccctggaggagcgggtgcacttcaagcagaggatcacagctgacctgctgagcaatggaattgatgtgtacccccagaaggagtttgatgaggacagtgaagatcggctggtgaatgagaagttccgggagatgatcccctttgctgtggtgggcagtgaccacgagtaccaggtgaatggcaagaggatcctgggcaggaagaccaagtggggcaccatcgaggtggagaacaccacccactgtgaatttgcctacctgcgggacctgctgatccgcacccacatgcagaacatcaaggacatcaccagcagcatccactttgaggcctacagagtgaagaggctgaatgaaggcagcagcgccatggccaacggcatggaggagaaggagcctgaggcccctgagatgtag

SEQ ID NO: 42689 - DNA, 1761 bp, Artificial Sequence
  derived and/or modified sequence
atgaagaagagctacagcggcggcacccggaccagcagcggccggctgcgtcggctcggcgattccagcgggcccgctttaaaacgtagtttcgaggtcgaggaggtagagacgcccaattccacgcccccaaggcgagttcagaccccccttctgcgagctaccgtagccagctctacgcagaagttccaggacctgggggtaaagaatagtgaacctagcgctcgccacgtggattctttatctcaacggtcccctaaagcctcgctccggcgggttgagttgagcgggccgaaggccgctgaacccgtttctagacgcaccgagctatccatcgatatttccagcaagcaggtcgaaaacgcaggcgctatcggcccctcaagatttgggctgaagagggccgaggttttaggtcataagactcccgaaccggccccacgccgcaccgaaatcactattgttaagccgcaggagagcgcacatagacgcatggagccgccagcctccaaggtgcctgaagtcccaaccgcccccgccaccgacgctgcaccaaaaagagtggaaatccagatgccaaaaccggctgaagcccccaccgctccctcacccgctcagactctggagaattcggagccagcgccagtgtcccaactgcagtcgaggctggagccaaaaccccagccccccgtggccgaagcgacccctcgtagccaggaagccaccgaggcggcgccatcctgtgtaggggacatggcagataccccaagagacgcgggcctgaagcaggcgccagccagccgaaacgagaaggcccccgtggattttggatatgtaggaatagattctatcttggagcaaatgaggagaaaggcaatgaagcaggggttcgagtttaatattatggtggtcgggcaatctggccttgggaagtccactcttatcaatacattgtttaaatctaagatatctcggaagagcgtgcagcctactagtgaggaacgcatccctaaaaccattgagataaagtcaataacacatgatatcgaggaaaaaggcgtgcgaatgaaacttacggtgatcgatacaccaggatttggcgaccacatcaataatgaaaattgctggcagcctatcatgaagtttatcaatgatcagtacgaaaaatatctgcaagaggaggtgaacattaatcgcaaaaagaggatccctgacacacgcgttcattgttgcctctattttatccctgcaaccgggcacagtttgagaccactggatattgaattcatgaagcgtctgagtaaggtggtgaacatcgtccccgtaatcgccaaggctgacaccttgaccctggaggagcgagtgcacttcaagcagcggattacagccgatctcttgtccaatggcatagacgtttatccacagaaagagtttgacgaggattcagaggatagattggtcaatgagaagttccgagagatgatccccttcgcagtggttggcagcgaccatgagtatcaggttaatgggaaacggatactggggagaaagactaaatggggaaccatagaggtggagaacaccactcattgcgagttcgcctacttgcgcgatttgctgatcaggacccacatgcagaacatcaaggatataacatcgagcatacactttgaggcttacagggtgaaaaggctaaacgaggggagttctgctatggccaacgggatggaagaaaaggagcctgaagctcccgaaatgtag

SEQ ID NO: 42690 - DNA, 1761 bp, Artificial Sequence
  derived and/or modified sequence
atgaaaaagagctattctggaggcacaagaaccagctcaggccgactgagacgcctgggcgacagctctggccctgccctgaaaagaagctttgaagttgaggaggtggagactccaaacagcacacctcccagacgcgtgcagacacctttgctccgggctaccgttgcctcttccacccagaagtttcaggacctgggcgtaaagaattcggagccgagcgctcgacacgtagacagcctgtcccagcggagtcctaaagcaagcctgcggcgagtggaattatccggtcccaaagcggcagagcctgtgtccaggagaacagagctgtccattgacatttccagcaagcaagtcgagaatgcaggcgctattggtccctctagatttggactaaagcgcgcagaagttttaggccacaaaacacccgaacccgctccccgacgaaccgaaatcactattgtcaaaccccaggaatccgcgcacagacgaatggagcctcccgcttccaaggttccggaggtgccaactgctcctgccacggacgcagctccaaaacgagtcgagatccagatgcctaagcccgctgaggcccctaccgctccaagtcccgcacagacgctggaaaactctgagcccgctcctgtttcccaactgcagtctcgtctggaacccaagccccagcctcccgtcgctgaggctactccacgctctcaggaagcgacagaggctgctcctagctgcgttggagatatggcagatactccccgagacgctggtctcaaacaggcccctgccagtcggaatgagaaggcccctgtggatttcggctacgttggcattgacagtattttggagcagatgaggaggaaggcgatgaaacagggcttcgaatttaacattatggtggtggggcaaagtggcctgggaaagtccacacttataaacaccctgtttaagagtaagatcagtagaaagagcgtacagccaaccagcgaggaaaggatccccaaaacaattgagatcaagtctatcacccacgacatcgaggagaagggtgtgcgcatgaagcttacggtgatagacacaccagggtttggggaccacatcaataatgagaactgctggcagcctattatgaagtttatcaacgaccagtacgagaagtacctgcaggaggaagtgaacatcaatcggaaaaagaggataccagatacaagagtccactgctgtctatattttatccctgccaccggccattccctacggccactagacatcgagttcatgaagcggctgagtaaagttgtcaacatcgtgccagtcattgctaaagctgacaccttgactctggaggagcgcgtgcacttcaagcaaaggattacagccgatcttctatcaaatgggatagatgtgtacccccagaaggaatttgatgaggacagcgaagatagactcgtgaacgagaaatttagggaaatgataccattcgctgtcgtcggttcagatcatgaataccaggtaaacgggaagagaatcctcgggagaaaaaccaagtggggcactatcgaggttgagaacaccactcattgtgagttcgcctacttgagggacttgctaatccggactcatatgcagaatattaaagatattacttctagcatccatttcgaagcctatagggtgaagcgcctgaacgaggggtcctcagccatggccaatggtatggaggagaaggagccagaggctcccgagatgtag

SEQ ID NO: 42691 - DNA, 1470 bp, Artificial Sequence
  derived and/or modified sequence
actccagacggcgggccgccccctcttcccgccttcctactaccggcccaggattagcgccctgggagcgcgcgccccgctgcctcgccgccacactttcctgggagcggcggccacggaggcaccatgaagaagtcttactcaggaggcacgcggacctccagtggccggctccggaggcttggtgactccagtggcccagccttgaaaagatcttttgaggtcgaggaggtcgagacacccaactccaccccaccccggagggtccagactcccctactccgagccactgtggccagctccacccagaaattccaggacctgggcgtgaagaactcagaaccctcggcccgccatgtggactccctaagccaacgctcccccaaggcgtccctgcggagggtggagctctcgggccccaaggcggccgagccggtgtcccggcgcactgagctgtccattgacatctcgtccaagcaggtggagaacgccggggccatcggcccgtcccggttcgggctcaagagggccgaggtgttgggccacaagacgccagaaccggcccctcggaggacggagatcaccatcgtcaaaccccaggagtcagcccaccggaggatggagccccctgcctccaaggtccccgaggtgcccactgcccctgccaccgacgcagcccccaagagggtggagatccagatgcccaagcctgctgaggcgcccaccgcccccagcccagcccagaccttggagaattcagagcctgcccctgtgtctcagctgcagagcaggctggagcccaagccccagccccctgtggctgaggctacaccccggagccaggaggccactgaggcggctcccagctgcgttggcgacatggccgacacccccagagatgccgggctcaagcaggcgcctgcatcacggaacgagaaggccccggtggacttcggctacgtggggattgactccatcctggagcagatgcgccggaaggccatgaagcagggcttcgagttcaacatcatggtggtcgggcagagcggcttgggtaaatccaccttaatcaacaccctcttcaaatccaaaatcagccggaagtcggtgcagcccacctcagaggagcgcatccccaagaccatcgagatcaagtccatcacgcacgatattgaggagaaaggcgtccggatgaagctgacagtgattgacacaccagggttcggggaccacatcaacaacgagaactgctggcagcccatcatgaagttcatcaatgaccagtacgagaaatacctgcaggaggaggtcaacatcaaccgcaagaagcgcatcccggacacccgcgtccactgctgcctctacttcatccccgccaccggccactcgctgcccctcctggagcagaaagtgcctttatctcagccatccgcagactgcttggccagatgcggggacaggctggaatga

SEQ ID NO: 42692 - DNA, 3821 bp, Artificial Sequence
  derived and/or modified sequence
actccagacggcgggccgccccctcttcccgccttcctactaccggcccaggattagcgccctgggagcgcgcgccccgctgcctcgccgccacactttcctgggagcggcggccacggaggcaccatgaagaagtcttactcaggaggcacgcggacctccagtggccggctccggaggcttggtgactccagtggcccagccttgaaaagatcttttgaggtcgaggaggtcgagacacccaactccaccccaccccggagggtccagactcccctactccgagccactgtggccagctccacccagaaattccaggacctgggcgtgaagaactcagaaccctcggcccgccatgtggactccctaagccaacgctcccccaaggcgtccctgcggagggtggagctctcgggccccaaggcggccgagccggtgtcccggcgcactgagctgtccattgacatctcgtccaagcaggtggagaacgccggggccatcggcccgtcccggttcgggctcaagagggccgaggtgttgggccacaagacgccagaaccggcccctcggaggacggagatcaccatcgtcaaaccccaggagtcagcccaccggaggatggagccccctgcctccaaggtccccgaggtgcccactgcccctgccaccgacgcagcccccaagagggtggagatccagatgcccaagcctgctgaggcgcccaccgcccccagcccagcccagaccttggagaattcagagcctgcccctgtgtctcagctgcagagcaggctggagcccaagccccagccccctgtggctgaggctacaccccggagccaggaggccactgaggcggctcccagctgcgttggcgacatggccgacacccccagagatgccgggctcaagcaggcgcctgcatcacggaacgagaaggccccggtggacttcggctacgtggggattgactccatcctggagcagatgcgccggaaggccatgaagcagggcttcgagttcaacatcatggtggtcgggcagagcggcttgggtaaatccaccttaatcaacaccctcttcaaatccaaaatcagccggaagtcggtgcagcccacctcagaggagcgcatccccaagaccatcgagatcaagtccatcacgcacgatattgaggagaaaggcgtccggatgaagctgacagtgattgacacaccagggttcggggaccacatcaacaacgagaactgctggcagcccatcatgaagttcatcaatgaccagtacgagaaatacctgcaggaggaggtcaacatcaaccgcaagaagcgcatcccggacacccgcgtccactgctgcctctacttcatccccgccaccggccactccctcaggcccctggacatcgagtttatgaaacgcctgagcaaggtggtcaacatcgtccctgtcatcgccaaggcggacacactcaccctggaggagagggtccacttcaaacagcggatcaccgcagacctgctgtccaacggcatcgacgtgtacccccagaaggaatttgatgaggactcggaggaccggctggtgaacgagaagttccgggagatgatcccatttgctgtggtgggcagtgaccacgagtaccaggtcaacggcaagaggatccttgggaggaagaccaagtggggtaccatcgaagttgaaaacaccacacactgtgagtttgcctacctgcgggaccttctcatcaggacgcacatgcagaacatcaaggacatcaccagcagcatccacttcgaggcgtaccgtgtgaagcgcctcaacgagggcagcagcgccatggccaacggcatggaggagaaggagccagaagccccggagatgtagacgccaccctgcccacccccgggatcctgcccccaagtcatttccgtccccccccaggccctcccaccaccccattttattttatatgattttctccatttgtcatcgttccccaccccttcgacatgctgccaggaaacaagggaaggggcctccctccgagtgagtcagtgatgaggccgcggcctccccgaggttgtggggaggctgcactggagccacaggcaggggtgagagcacccactgaattgacatgaccctctgtccccaggcctggctccccgagggctcagaagagcagcttcggtgtgcagatcatccgtctgtgtggggttctcagtgccggaggccttggggtgggggccaggcctcgcacttgcagaggagcccagtgggctgcacgctcccctccatccccatcggccctgtcccctggagtgtgtcagagcccaggggagaatgcagcccaccaggagcacctggaccccctgcccgccacatggtgtggccatcactcagcccctacccctgccctgctcctaagggtagaaaactccagggtcccctgccaccgactgcccagccactccaagccccctggcagctgcccctcctggagcagaaagtgcctttatctcagccatccgcagactgcttggccagatgcggggacaggctggaatgagggaggcgtcttcatctccctgccatccccctctcacgccacccccgcccccaccgggctgcaggtgctgctgatgcgctgggatctgattgaggataaaaaggaaggagagatgacccctaccccctcatcccccagttttgaaaaggtctaagcaagtgagtctggtggaggagctgagggagggagccatggaaggtgccagaaggaaggttggcgggggcacgtgtgggccgtggcttgggctggtcagagtggcgtgagctgcccggcgcctgccctgcccaagtgaccagggaagtgtgtgtgtgtccatgtgtatgcgtgtccgtctgtctgtctagtgtctgggtttggcccaagactgggctgtagttacattaatgcccagccagccacccctgccactcacccttcctggcccaggccttgctgactctctgagctggggaggtgggaggccaggcgagcctgactctgttgatctacccgtgcctgggcccctcccctcagagcccatggtaacgaacccctagaaaggagagaacgggcgtcaggggtgcacagtccacagctgaagagcaaggtttcgtggcagcacggcccggcccctcaccctctgtccccacgaggggacccatgggggctgtctttgcagggcacagatgaccaaagtcccttcctgcttcctgttacctgtcttgctcctggggagaaagaggggcctgatgagactccactcaggtgcacacatcaccaggtgcatctgcaggcaccgggctggctgcttgcagccaggagaaggtcagcgagaaggagtgtatgagtgtgagtgtgtgtgcatggaagttggggcactgggcgtctgactccctccccacccaagagaggaaggacccctcaccacccccactggtgagacagtttactttgccaacttgccatgtttttgccaaaaccaagattttgaaggaaatgagtggccagcgccagggcccaggccatgtggcctgcccagcctcaatgtcacttggtggcggggtggggtgggggtgggcagcagcatcccagccttgagatgcttcactttccttctctgtaaccagactttgaaaaattgttcgtttcatcaggctctgttcctcaatggccttttgctacgtgcctcccgagaaatttgtctttttgtataaatgacaaagtgttgaaaatgtatttcctgaaataaatgtttcaaatgcagaaaccc

SEQ ID NO: 42693 - DNA, 1761 bp, Artificial Sequence
  derived and/or modified sequence
atgaagaagagctacagcggcggcaccagaaccagcagcggcagactgagaagactgggcgacagcagcggccccgccctgaagagaagcttcgaggtggaggaggtggagacccccaacagcaccccccccagaagagtgcagacccccctgctgagagccaccgtggccagcagcacccagaagttccaggacctgggcgtgaagaacagcgagcccagcgccagacacgtggacagcctgagccagagaagccccaaggccagcctgagaagagtggagctgagcggccccaaggccgccgagcccgtgagcagaagaaccgagctgagcatcgacatcagcagcaagcaggtggagaacgccggcgccatcggccccagcagattcggcctgaagagagccgaggtgctgggccacaagacccccgagcccgcccccagaagaaccgagatcaccatcgtgaagccccaggagagcgcccacagaagaatggagccccccgccagcaaggtgcccgaggtgcccaccgcccccgccaccgacgccgcccccaagagagtggagatccagatgcccaagcccgccgaggcccccaccgcccccagccccgcccagaccctggagaacagcgagcccgcccccgtgagccagctgcagagcagactggagcccaagccccagccccccgtggccgaggccacccccagaagccaggaggccaccgaggccgcccccagctgcgtgggcgacatggccgacacccccagagacgccggcctgaagcaggcccccgccagcagaaacgagaaggcccccgtggacttcggctacgtgggcatcgacagcatcctggagcagatgagaagaaaggccatgaagcagggcttcgagttcaacatcatggtggtgggccagagcggcctgggcaagagcaccctgatcaacaccctgttcaagagcaagatcagcagaaagagcgtgcagcccaccagcgaggagagaatccccaagaccatcgagatcaagagcatcacccacgacatcgaggagaagggcgtgagaatgaagctgaccgtgatcgacacccccggcttcggcgaccacatcaacaacgagaactgctggcagcccatcatgaagttcatcaacgaccagtacgagaagtacctgcaggaggaggtgaacatcaacagaaagaagagaatccccgacaccagagtgcactgctgcctgtacttcatccccgccaccggccacagcctgagacccctggacatcgagttcatgaagagactgagcaaggtggtgaacatcgtgcccgtgatcgccaaggccgacaccctgaccctggaggagagagtgcacttcaagcagagaatcaccgccgacctgctgagcaacggcatcgacgtgtacccccagaaggagttcgacgaggacagcgaggacagactggtgaacgagaagttcagagagatgatccccttcgccgtggtgggcagcgaccacgagtaccaggtgaacggcaagagaatcctgggcagaaagaccaagtggggcaccatcgaggtggagaacaccacccactgcgagttcgcctacctgagagacctgctgatcagaacccacatgcagaacatcaaggacatcaccagcagcatccacttcgaggcctacagagtgaagagactgaacgagggcagcagcgccatggccaacggcatggaggagaaggagcccgaggcccccgagatgtag

SEQ ID NO: 42694 - protein, 579 aa, Artificial Sequence
  derived and/or modified sequence
MSDPAVNAQLDGIISDFEALKRSFEVEEVETPNSTPPRRVQTPLLRATVASSTQKFQDLGVKNSEPSARHVDSLSQRSPKASLRRVELSGPKAAEPVSRRTELSIDISSKQVENAGAIGPSRFGLKRAEVLGHKTPEPAPRRTEITIVKPQESAHRRMEPPASKVPEVPTAPATDAAPKRVEIQMPKPAEAPTAPSPAQTLENSEPAPVSQLQSRLEPKPQPPVAEATPRSQEATEAAPSCVGDMADTPRDAGLKQAPASRNEKAPVDFGYVGIDSILEQMRRKAMKQGFEFNIMVVGQSGLGKSTLINTLFKSKISRKSVQPTSEERIPKTIEIKSITHDIEEKGVRMKLTVIDTPGFGDHINNENCWQPIMKFINDQYEKYLQEEVNINRKKRIPDTRVHCCLYFIPATGHSLRPLDIEFMKRLSKVVNIVPVIAKADTLTLEERVHFKQRITADLLSNGIDVYPQKEFDEDSEDRLVNEKFREMIPFAVVGSDHEYQVNGKRILGRKTKWGTIEVENTTHCEFAYLRDLLIRTHMQNIKDITSSIHFEAYRVKRLNEGSSAMANGMEEKEPEAPEM

SEQ ID NO: 42695 - DNA, 3937 bp, Artificial Sequence
  derived and/or modified sequence
gtcagtatggaggaggcggaccttgagggagagtaggaattggattgcaagaggaaggagagccttctggccagcagcagccagcagcagtgggggaggctggaatgagctggctggagagggggctggggcataaggaggggcctgcctgtgaagatcatatgggccaggctgcggagggccaggcatgcccgccgggagtgcagctggtccacgggaagcatctggagtggctgggaatgggcgcaggagcagcgccgtgggagcacaggtctctttcccggggcggctcacctggtgtcttggttcctgcaagccttgaaaagatcttttgaggtcgaggaggtcgagacacccaactccaccccaccccggagggtccagactcccctactccgagccactgtggccagctccacccagaaattccaggacctgggcgtgaagaactcagaaccctcggcccgccatgtggactccctaagccaacgctcccccaaggcgtccctgcggagggtggagctctcgggccccaaggcggccgagccggtgtcccggcgcactgagctgtccattgacatctcgtccaagcaggtggagaacgccggggccatcggcccgtcccggttcgggctcaagagggccgaggtgttgggccacaagacgccagaaccggcccctcggaggacggagatcaccatcgtcaaaccccaggagtcagcccaccggaggatggagccccctgcctccaaggtccccgaggtgcccactgcccctgccaccgacgcagcccccaagagggtggagatccagatgcccaagcctgctgaggcgcccaccgcccccagcccagcccagaccttggagaattcagagcctgcccctgtgtctcagctgcagagcaggctggagcccaagccccagccccctgtggctgaggctacaccccggagccaggaggccactgaggcggctcccagctgcgttggcgacatggccgacacccccagagatgccgggctcaagcaggcgcctgcatcacggaacgagaaggccccggtggacttcggctacgtggggattgactccatcctggagcagatgcgccggaaggccatgaagcagggcttcgagttcaacatcatggtggtcgggcagagcggcttgggtaaatccaccttaatcaacaccctcttcaaatccaaaatcagccggaagtcggtgcagcccacctcagaggagcgcatccccaagaccatcgagatcaagtccatcacgcacgatattgaggagaaaggcgtccggatgaagctgacagtgattgacacaccagggttcggggaccacatcaacaacgagaactgctggcagcccatcatgaagttcatcaatgaccagtacgagaaatacctgcaggaggaggtcaacatcaaccgcaagaagcgcatcccggacacccgcgtccactgctgcctctacttcatccccgccaccggccactccctcaggcccctggacatcgagtttatgaaacgcctgagcaaggtggtcaacatcgtccctgtcatcgccaaggcggacacactcaccctggaggagagggtccacttcaaacagcggatcaccgcagacctgctgtccaacggcatcgacgtgtacccccagaaggaatttgatgaggactcggaggaccggctggtgaacgagaagttccgggagatgatcccatttgctgtggtgggcagtgaccacgagtaccaggtcaacggcaagaggatccttgggaggaagaccaagtggggtaccatcgaagttgaaaacaccacacactgtgagtttgcctacctgcgggaccttctcatcaggacgcacatgcagaacatcaaggacatcaccagcagcatccacttcgaggcgtaccgtgtgaagcgcctcaacgagggcagcagcgccatggccaacggcatggaggagaaggagccagaagccccggagatgtagacgccaccctgcccacccccgggatcctgcccccaagtcatttccgtccccccccaggccctcccaccaccccattttattttatatgattttctccatttgtcatcgttccccaccccttcgacatgctgccaggaaacaagggaaggggcctccctccgagtgagtcagtgatgaggccgcggcctccccgaggttgtggggaggctgcactggagccacaggcaggggtgagagcacccactgaattgacatgaccctctgtccccaggcctggctccccgagggctcagaagagcagcttcggtgtgcagatcatccgtctgtgtggggttctcagtgccggaggccttggggtgggggccaggcctcgcacttgcagaggagcccagtgggctgcacgctcccctccatccccatcggccctgtcccctggagtgtgtcagagcccaggggagaatgcagcccaccaggagcacctggaccccctgcccgccacatggtgtggccatcactcagcccctacccctgccctgctcctaagggtagaaaactccagggtcccctgccaccgactgcccagccactccaagccccctggcagctgcccctcctggagcagaaagtgcctttatctcagccatccgcagactgcttggccagatgcggggacaggctggaatgagggaggcgtcttcatctccctgccatccccctctcacgccacccccgcccccaccgggctgcaggtgctgctgatgcgctgggatctgattgaggataaaaaggaaggagagatgacccctaccccctcatcccccagttttgaaaaggtctaagcaagtgagtctggtggaggagctgagggagggagccatggaaggtgccagaaggaaggttggcgggggcacgtgtgggccgtggcttgggctggtcagagtggcgtgagctgcccggcgcctgccctgcccaagtgaccagggaagtgtgtgtgtgtccatgtgtatgcgtgtccgtctgtctgtctagtgtctgggtttggcccaagactgggctgtagttacattaatgcccagccagccacccctgccactcacccttcctggcccaggccttgctgactctctgagctggggaggtgggaggccaggcgagcctgactctgttgatctacccgtgcctgggcccctcccctcagagcccatggtaacgaacccctagaaaggagagaacgggcgtcaggggtgcacagtccacagctgaagagcaaggtttcgtggcagcacggcccggcccctcaccctctgtccccacgaggggacccatgggggctgtctttgcagggcacagatgaccaaagtcccttcctgcttcctgttacctgtcttgctcctggggagaaagaggggcctgatgagactccactcaggtgcacacatcaccaggtgcatctgcaggcaccgggctggctgcttgcagccaggagaaggtcagcgagaaggagtgtatgagtgtgagtgtgtgtgcatggaagttggggcactgggcgtctgactccctccccacccaagagaggaaggacccctcaccacccccactggtgagacagtttactttgccaacttgccatgtttttgccaaaaccaagattttgaaggaaatgagtggccagcgccagggcccaggccatgtggcctgcccagcctcaatgtcacttggtggcggggtggggtgggggtgggcagcagcatcccagccttgagatgcttcactttccttctctgtaaccagactttgaaaaattgttcgtttcatcaggctctgttcctcaatggccttttgctacgtgcctcccgagaaatttgtctttttgtataaatgacaaagtgttgaaaatgtatttcctgaaataaatgtttcaaatgcagaaacccag

SEQ ID NO: 42696 - DNA, 1740 bp, Artificial Sequence
  derived and/or modified sequence
atgagtgatcccgctgttaatgctcaattggatggaattattagcgatttcgaggcattgaagagatcctttgaagtggaagaagtggaaacccctaacagcactccgcccagacgtgtgcaaaccccccttcttcgagccaccgtggcttcttctacccagaagttccaggacttaggcgtgaaaaattcagaaccatcagcacggcatgtggactcactgagccagcgatctccaaaagcctcactgagacgtgtcgaactctccggcccgaaagcagcagagcctgtttcgcggcgcacagaactgtccattgatataagctccaaacaagttgagaacgccggagctataggtccatctcgcttcggcctgaaacgagcggaagtgttgggtcacaaaactccagagcccgccccccgcaggacggaaatcaccatcgtgaaacctcaggagtccgctcaccggagaatggagccaccggccagcaaagtgcccgaagtgcccaccgcccctgccactgatgcagccccgaagcgggtagaaattcagatgcctaaacctgccgaggcaccaaccgctccctcaccagctcagaccctggagaattccgagccagcacctgtctcccagctacaatctcgcctggaaccaaaaccgcagccacctgttgctgaagccaccccccgttcccaggaagcaacagaggcggccccgtcttgtgtgggggacatggctgatactccaagagacgccggcctcaaacaagcccctgcgtcccgcaacgagaaggctcctgtggatttcgggtatgttggcattgattccattttagagcagatgagacgcaaggccatgaagcagggtttcgaattcaatatcatggttgtcggccagtctgggctgggcaagagcactcttatcaatacactttttaaatcaaaaatctcgcgcaagagtgtgcaaccgacttccgaggaacgaatcccaaagacaattgagattaagagtatcacacacgacatagaagagaaaggcgtgagaatgaaactgacagtgatcgacaccccggggttcggtgaccacatcaataatgaaaactgctggcagccaattatgaaatttatcaacgatcagtacgaaaaatacctgcaagaggaggtcaatatcaaccggaaaaagcggatccccgatacgagagtgcactgctgtctgtattttatccccgcaacaggccatagcctgcgacctctggacattgaatttatgaagaggctatcaaaggttgttaacattgtccccgtgatcgcaaaagccgacacccttactcttgaagaacgggtgcactttaaacagaggattaccgctgatctattaagtaacggtatcgatgtgtaccctcagaaagagtttgatgaagatagtgaagacagattagttaacgagaagttccgcgagatgattcccttcgcagtagtcggctcggaccatgaataccaggttaacggcaaacggattttgggacgcaaaactaagtgggggaccatcgaagtggagaacactactcattgcgagttcgcgtatttgcgagatttgctcatccgcactcatatgcagaatatcaaagatattacctcttcaattcatttcgaggcatatcgggtcaaacgcctgaacgagggtagtagcgcgatggccaacggtatggaagagaaagaaccggaggccccggagatgtag

SEQ ID NO: 42697 - DNA, 1740 bp, Artificial Sequence
  derived and/or modified sequence
atgtctgaccctgctgtgaatgcccagctggatggcatcatcagtgactttgaggccctgaagaggagctttgaggtggaggaggtggagacccccaacagcaccccaccccggcgggtgcagacccccctgctgcgggccaccgtggccagcagcacccagaagttccaggacctgggcgtgaagaacagcgagcccagcgcccggcacgtggacagcctgagccagaggagccccaaggccagcctgcggcgggtggagctgagcggccccaaggctgctgagcctgtgtccagaagaacagagctgagcattgacatcagcagcaagcaggtggagaatgctggggccatcggccccagcagatttggcctgaagagagctgaggtgctgggccacaagaccccagagcccgcccccaggagaacagagatcaccatcgtgaagccccaggagagcgcccacaggaggatggagcccccagccagcaaggtgcctgaggtgcccacagccccagccacagatgctgcccccaagagggtggagatccagatgcccaagccagctgaggcccccacagcccccagccctgcccagaccctggagaacagcgagcccgcccctgtgtcccagctgcagagccggctggagcccaagccccagccccctgtggccgaggccacccccaggagccaggaggccacagaagctgcccccagctgtgtgggggacatggctgacaccccaagagatgctggcctgaagcaggccccagccagcagaaatgagaaggcccctgtggactttggctacgtgggcatcgacagcatcctggagcagatgaggaggaaggccatgaagcagggctttgagttcaacatcatggtggtgggccagagcggcctgggcaagagcaccctcatcaacaccctcttcaagagcaagatcagcaggaagtctgtgcagcccaccagcgaggagcgcatccccaagaccatcgagatcaagagcatcacccatgacatcgaggagaagggcgtgaggatgaagctgaccgtcatcgacaccccaggctttggagaccacatcaacaatgaaaactgctggcagcccatcatgaagttcatcaatgaccagtatgagaagtacctgcaggaggaggtgaacatcaacaggaagaagaggatcccagacaccagggtgcactgctgcctgtacttcatcccagccaccggccacagcctgcggcccctggacatcgagttcatgaagaggctgagcaaggtggtgaacatcgtgcctgtgattgccaaggctgacaccctgaccctggaggagcgggtgcacttcaagcagaggatcacagctgacctgctgagcaatggaattgatgtgtacccccagaaggagtttgatgaagattctgaggaccggctggtgaatgagaagttccgggagatgatcccctttgctgtggtgggcagtgaccacgagtaccaggtgaatggcaagaggatcctgggcaggaagaccaagtggggcaccatcgaggtggagaacaccacccactgtgaatttgcctacctgcgggacctgctgatccgcacccacatgcagaacatcaaggacatcaccagcagcatccactttgaggcctacagagtgaagaggctgaatgaaggcagcagcgccatggccaacggcatggaggagaaggagcctgaggcccctgagatgtag

SEQ ID NO: 42698 - DNA, 1740 bp, Artificial Sequence
  derived and/or modified sequence
atgagcgaccccgccgtgaacgcccagctggacggcatcatcagcgactttgaggccctgaagcggtcctttgaggtggaggaagtggagaccccaaacagcacccctcctagaagggtgcagacaccacttctccgagctactgtcgcttcctcaacgcagaagttccaggacctgggcgtgaagaattcagagcctagtgctcgtcatgtcgattcgttatctcagcgatcaccaaaagccagcctgcggagggtcgagctgtcaggcccaaaggccgccgagccagtatcacggcgtaccgagctgtcaattgatatctcaagtaagcaggttgaaaatgccggagccatcggcccttccagattcggtttaaaacgtgccgaggtactgggtcataagactccagaaccagctccccgaagaacagagatcacaatcgtcaagcctcaggagtctgcacaccggcgcatggagccacccgccagtaaagttcctgaggtgcctacagcccccgctacggatgccgctcctaaacgggtagaaatccagatgcccaagccagccgaagcccctaccgctcccagcccagcgcagacactagaaaactccgagccggcacccgtgtctcaactccaaagcaggctggaacccaagccccagcccccagttgctgaagcaacacccagaagccaggaggccacagaagccgctccatcctgcgtgggagatatggccgacactccgcgggatgccgggctcaaacaggcccccgcctcacggaatgaaaaggcgcctgtggattttggctacgtcgggattgatagtattttggagcagatgaggcgtaaggcaatgaagcaaggttttgagttcaatattatggttgttggccagtccggactcggaaaatctacgctcataaacactctctttaagagcaagatttcccggaagtccgtgcagcccactagcgaagaacgtattccaaagaccattgagataaaatctattacgcatgacatcgaagagaaaggcgtgcgtatgaaactgactgtgatcgacacgcccggcttcggcgaccacattaacaatgaaaattgctggcaacctataatgaagtttattaacgatcagtatgagaaatacctgcaggaggaggtgaacatcaaccggaaaaagcggatacccgataccagagtccattgttgcttgtacttcatccccgctactgggcactccctcagaccgttagatatcgaattcatgaagcggctgagtaaggtggtcaatatcgtaccagtcatcgcgaaagcggatacactaaccctggaggagagggtgcactttaagcaacgcatcactgcagacttgctcagcaatgggatcgacgtttatccgcagaaggaattcgatgaggacagcgaggaccgccttgtgaatgagaaatttagagagatgatcccctttgccgtggttggaagcgatcatgagtatcaggtgaacggcaaacgaattctggggcggaaaaccaagtggggcacgatagaggtggaaaacacgacgcactgcgaatttgcttacctgcgcgacctgcttatacggacccacatgcagaatatcaaagatatcacctctagcatccacttcgaggcctatcgggtaaagcggctcaatgagggcagcagcgccatggctaacggaatggaagagaaagaacctgaggcccccgagatgtag

SEQ ID NO: 42699 - DNA, 1740 bp, Artificial Sequence
  derived and/or modified sequence
atgagcgaccccgcagttaacgcccagctcgatggcattatcagtgattttgaggccctgaaaaggtcattcgaagtagaagaggtcgagactcctaactctactcctccacgaagagtacaaactccactgttaagagctaccgtggcttcctccactcagaaattccaggacctgggtgtgaaaaattccgaaccatcagcacgccatgtggactctctaagccaacgctccccaaaagcctcattgaggcgggtggagctgagcggccctaaggccgctgagcccgtctcacgccgaacagagctatccattgatattagcagcaagcaggtcgagaatgccggagcaatagggccaagtaggttcgggctcaaacgagctgaagtgctgggacataaaacaccagagccggctcctaggcggaccgaaattactattgttaagccccaggagtccgctcatcgtagaatggaaccacctgcctcgaaggtccctgaggttccaaccgcaccggcaactgacgctgctcctaagagggttgagattcagatgcccaagcccgctgaggcgcctacagccccttcccctgctcagaccctagaaaacagcgagcccgcaccagtgtctcagctccagtccagattggaacccaagcctcagccccctgttgcagaagccacccctcggagtcaggaggccacagaagccgctccctcatgtgtgggagatatggctgacacacctagggacgcgggtctcaaacaggcaccagcttcccggaatgagaaggctccggtggacttcggatacgtgggcattgactctatcctcgagcagatgaggcggaaggccatgaaacaggggttcgagttcaacatcatggtcgtcgggcagtcagggctcgggaaatccaccctcataaacaccctgttcaagtctaagatctcgagaaaatctgttcagcccaccagcgaagaacggatccccaagactattgaaattaagtccatcacccacgatatcgaagaaaaaggggtgagaatgaagcttacagtcatcgacacccccggattcggcgatcatattaacaacgaaaactgttggcagcccattatgaaatttattaatgatcagtacgagaagtatcttcaagaggaggtaaacatcaaccgcaagaagcgtataccggacactcgggtgcactgttgtttgtattttattcctgctacaggacattctctcagaccactcgatattgaatttatgaaacgcctttcaaaagtcgtgaatatcgtaccggtcatcgcaaaggcagacaccctcactcttgaagagagagtccacttcaagcagcgtatcaccgccgacctgctcagcaatgggattgatgtctatccacagaaagagtttgacgaagattctgaggatcgactggtcaatgaaaaattccgagagatgattcctttcgccgtggtagggtccgaccacgagtatcaggtgaatgggaagaggattcttggcaggaagaccaaatgggggactattgaggtagagaacacaacacattgcgaattcgcttatctgagggacctgttgatccgcacccacatgcagaacatcaaggatatcactagcagcatacacttcgaggcatatagggttaaaaggctgaatgagggctctagcgcgatggctaacggaatggaggagaaggagccagaggcccctgaaatgtag

SEQ ID NO: 42700 - DNA, 3982 bp, Artificial Sequence
  derived and/or modified sequence
ccccaggcctggccttgacaggcgggcggagcagccagtgcgagacagggaggccggtgcgggtgcgggaacctgatccgcccgggaggcgggggcggggcgggggcgcagcgcgcggggaggggccggcgcccgccttcctcccccattcattcagctgagccagggggcctaggggctcctccggcggctagctctgcactgcaggagcgcgggcgcggcgccccagccagcgcgcagggcccgggccccgccgggggcgcttcctcgccgctgccctccgcgcgacccgctgcccaccagccatcatgtcggaccccgcggtcaacgcgcagctggatgggatcatttcggacttcgaagccttgaaaagatcttttgaggtcgaggaggtcgagacacccaactccaccccaccccggagggtccagactcccctactccgagccactgtggccagctccacccagaaattccaggacctgggcgtgaagaactcagaaccctcggcccgccatgtggactccctaagccaacgctcccccaaggcgtccctgcggagggtggagctctcgggccccaaggcggccgagccggtgtcccggcgcactgagctgtccattgacatctcgtccaagcaggtggagaacgccggggccatcggcccgtcccggttcgggctcaagagggccgaggtgttgggccacaagacgccagaaccggcccctcggaggacggagatcaccatcgtcaaaccccaggagtcagcccaccggaggatggagccccctgcctccaaggtccccgaggtgcccactgcccctgccaccgacgcagcccccaagagggtggagatccagatgcccaagcctgctgaggcgcccaccgcccccagcccagcccagaccttggagaattcagagcctgcccctgtgtctcagctgcagagcaggctggagcccaagccccagccccctgtggctgaggctacaccccggagccaggaggccactgaggcggctcccagctgcgttggcgacatggccgacacccccagagatgccgggctcaagcaggcgcctgcatcacggaacgagaaggccccggtggacttcggctacgtggggattgactccatcctggagcagatgcgccggaaggccatgaagcagggcttcgagttcaacatcatggtggtcgggcagagcggcttgggtaaatccaccttaatcaacaccctcttcaaatccaaaatcagccggaagtcggtgcagcccacctcagaggagcgcatccccaagaccatcgagatcaagtccatcacgcacgatattgaggagaaaggcgtccggatgaagctgacagtgattgacacaccagggttcggggaccacatcaacaacgagaactgctggcagcccatcatgaagttcatcaatgaccagtacgagaaatacctgcaggaggaggtcaacatcaaccgcaagaagcgcatcccggacacccgcgtccactgctgcctctacttcatccccgccaccggccactccctcaggcccctggacatcgagtttatgaaacgcctgagcaaggtggtcaacatcgtccctgtcatcgccaaggcggacacactcaccctggaggagagggtccacttcaaacagcggatcaccgcagacctgctgtccaacggcatcgacgtgtacccccagaaggaatttgatgaggactcggaggaccggctggtgaacgagaagttccgggagatgatcccatttgctgtggtgggcagtgaccacgagtaccaggtcaacggcaagaggatccttgggaggaagaccaagtggggtaccatcgaagttgaaaacaccacacactgtgagtttgcctacctgcgggaccttctcatcaggacgcacatgcagaacatcaaggacatcaccagcagcatccacttcgaggcgtaccgtgtgaagcgcctcaacgagggcagcagcgccatggccaacggcatggaggagaaggagccagaagccccggagatgtagacgccaccctgcccacccccgggatcctgcccccaagtcatttccgtccccccccaggccctcccaccaccccattttattttatatgattttctccatttgtcatcgttccccaccccttcgacatgctgccaggaaacaagggaaggggcctccctccgagtgagtcagtgatgaggccgcggcctccccgaggttgtggggaggctgcactggagccacaggcaggggtgagagcacccactgaattgacatgaccctctgtccccaggcctggctccccgagggctcagaagagcagcttcggtgtgcagatcatccgtctgtgtggggttctcagtgccggaggccttggggtgggggccaggcctcgcacttgcagaggagcccagtgggctgcacgctcccctccatccccatcggccctgtcccctggagtgtgtcagagcccaggggagaatgcagcccaccaggagcacctggaccccctgcccgccacatggtgtggccatcactcagcccctacccctgccctgctcctaagggtagaaaactccagggtcccctgccaccgactgcccagccactccaagccccctggcagctgcccctcctggagcagaaagtgcctttatctcagccatccgcagactgcttggccagatgcggggacaggctggaatgagggaggcgtcttcatctccctgccatccccctctcacgccacccccgcccccaccgggctgcaggtgctgctgatgcgctgggatctgattgaggataaaaaggaaggagagatgacccctaccccctcatcccccagttttgaaaaggtctaagcaagtgagtctggtggaggagctgagggagggagccatggaaggtgccagaaggaaggttggcgggggcacgtgtgggccgtggcttgggctggtcagagtggcgtgagctgcccggcgcctgccctgcccaagtgaccagggaagtgtgtgtgtgtccatgtgtatgcgtgtccgtctgtctgtctagtgtctgggtttggcccaagactgggctgtagttacattaatgcccagccagccacccctgccactcacccttcctggcccaggccttgctgactctctgagctggggaggtgggaggccaggcgagcctgactctgttgatctacccgtgcctgggcccctcccctcagagcccatggtaacgaacccctagaaaggagagaacgggcgtcaggggtgcacagtccacagctgaagagcaaggtttcgtggcagcacggcccggcccctcaccctctgtccccacgaggggacccatgggggctgtctttgcagggcacagatgaccaaagtcccttcctgcttcctgttacctgtcttgctcctggggagaaagaggggcctgatgagactccactcaggtgcacacatcaccaggtgcatctgcaggcaccgggctggctgcttgcagccaggagaaggtcagcgagaaggagtgtatgagtgtgagtgtgtgtgcatggaagttggggcactgggcgtctgactccctccccacccaagagaggaaggacccctcaccacccccactggtgagacagtttactttgccaacttgccatgtttttgccaaaaccaagattttgaaggaaatgagtggccagcgccagggcccaggccatgtggcctgcccagcctcaatgtcacttggtggcggggtggggtgggggtgggcagcagcatcccagccttgagatgcttcactttccttctctgtaaccagactttgaaaaattgttcgtttcatcaggctctgttcctcaatggccttttgctacgtgcctcccgagaaatttgtctttttgtataaatgacaaagtgttgaaaatgtatttcctgaaataaatgtttcaaatgcagaaaccc

SEQ ID NO: 42701 - DNA, 3935 bp, Artificial Sequence
  derived and/or modified sequence
gtcagtatggaggaggcggaccttgagggagagtaggaattggattgcaagaggaaggagagccttctggccagcagcagccagcagcagtgggggaggctggaatgagctggctggagagggggctggggcataaggaggggcctgcctgtgaagatcatatgggccaggctgcggagggccaggcatgcccgccgggagtgcagctggtccacgggaagcatctggagtggctgggaatgggcgcaggagcagcgccgtgggagcacaggtctctttcccggggcggctcacctggtgtcttggttcctgcaagccttgaaaagatcttttgaggtcgaggaggtcgagacacccaactccaccccaccccggagggtccagactcccctactccgagccactgtggccagctccacccagaaattccaggacctgggcgtgaagaactcagaaccctcggcccgccatgtggactccctaagccaacgctcccccaaggcgtccctgcggagggtggagctctcgggccccaaggcggccgagccggtgtcccggcgcactgagctgtccattgacatctcgtccaagcaggtggagaacgccggggccatcggcccgtcccggttcgggctcaagagggccgaggtgttgggccacaagacgccagaaccggcccctcggaggacggagatcaccatcgtcaaaccccaggagtcagcccaccggaggatggagccccctgcctccaaggtccccgaggtgcccactgcccctgccaccgacgcagcccccaagagggtggagatccagatgcccaagcctgctgaggcgcccaccgcccccagcccagcccagaccttggagaattcagagcctgcccctgtgtctcagctgcagagcaggctggagcccaagccccagccccctgtggctgaggctacaccccggagccaggaggccactgaggcggctcccagctgcgttggcgacatggccgacacccccagagatgccgggctcaagcaggcgcctgcatcacggaacgagaaggccccggtggacttcggctacgtggggattgactccatcctggagcagatgcgccggaaggccatgaagcagggcttcgagttcaacatcatggtggtcgggcagagcggcttgggtaaatccaccttaatcaacaccctcttcaaatccaaaatcagccggaagtcggtgcagcccacctcagaggagcgcatccccaagaccatcgagatcaagtccatcacgcacgatattgaggagaaaggcgtccggatgaagctgacagtgattgacacaccagggttcggggaccacatcaacaacgagaactgctggcagcccatcatgaagttcatcaatgaccagtacgagaaatacctgcaggaggaggtcaacatcaaccgcaagaagcgcatcccggacacccgcgtccactgctgcctctacttcatccccgccaccggccactccctcaggcccctggacatcgagtttatgaaacgcctgagcaaggtggtcaacatcgtccctgtcatcgccaaggcggacacactcaccctggaggagagggtccacttcaaacagcggatcaccgcagacctgctgtccaacggcatcgacgtgtacccccagaaggaatttgatgaggactcggaggaccggctggtgaacgagaagttccgggagatgatcccatttgctgtggtgggcagtgaccacgagtaccaggtcaacggcaagaggatccttgggaggaagaccaagtggggtaccatcgaagttgaaaacaccacacactgtgagtttgcctacctgcgggaccttctcatcaggacgcacatgcagaacatcaaggacatcaccagcagcatccacttcgaggcgtaccgtgtgaagcgcctcaacgagggcagcagcgccatggccaacggcatggaggagaaggagccagaagccccggagatgtagacgccaccctgcccacccccgggatcctgcccccaagtcatttccgtccccccccaggccctcccaccaccccattttattttatatgattttctccatttgtcatcgttccccaccccttcgacatgctgccaggaaacaagggaaggggcctccctccgagtgagtcagtgatgaggccgcggcctccccgaggttgtggggaggctgcactggagccacaggcaggggtgagagcacccactgaattgacatgaccctctgtccccaggcctggctccccgagggctcagaagagcagcttcggtgtgcagatcatccgtctgtgtggggttctcagtgccggaggccttggggtgggggccaggcctcgcacttgcagaggagcccagtgggctgcacgctcccctccatccccatcggccctgtcccctggagtgtgtcagagcccaggggagaatgcagcccaccaggagcacctggaccccctgcccgccacatggtgtggccatcactcagcccctacccctgccctgctcctaagggtagaaaactccagggtcccctgccaccgactgcccagccactccaagccccctggcagctgcccctcctggagcagaaagtgcctttatctcagccatccgcagactgcttggccagatgcggggacaggctggaatgagggaggcgtcttcatctccctgccatccccctctcacgccacccccgcccccaccgggctgcaggtgctgctgatgcgctgggatctgattgaggataaaaaggaaggagagatgacccctaccccctcatcccccagttttgaaaaggtctaagcaagtgagtctggtggaggagctgagggagggagccatggaaggtgccagaaggaaggttggcgggggcacgtgtgggccgtggcttgggctggtcagagtggcgtgagctgcccggcgcctgccctgcccaagtgaccagggaagtgtgtgtgtgtccatgtgtatgcgtgtccgtctgtctgtctagtgtctgggtttggcccaagactgggctgtagttacattaatgcccagccagccacccctgccactcacccttcctggcccaggccttgctgactctctgagctggggaggtgggaggccaggcgagcctgactctgttgatctacccgtgcctgggcccctcccctcagagcccatggtaacgaacccctagaaaggagagaacgggcgtcaggggtgcacagtccacagctgaagagcaaggtttcgtggcagcacggcccggcccctcaccctctgtccccacgaggggacccatgggggctgtctttgcagggcacagatgaccaaagtcccttcctgcttcctgttacctgtcttgctcctggggagaaagaggggcctgatgagactccactcaggtgcacacatcaccaggtgcatctgcaggcaccgggctggctgcttgcagccaggagaaggtcagcgagaaggagtgtatgagtgtgagtgtgtgtgcatggaagttggggcactgggcgtctgactccctccccacccaagagaggaaggacccctcaccacccccactggtgagacagtttactttgccaacttgccatgtttttgccaaaaccaagattttgaaggaaatgagtggccagcgccagggcccaggccatgtggcctgcccagcctcaatgtcacttggtggcggggtggggtgggggtgggcagcagcatcccagccttgagatgcttcactttccttctctgtaaccagactttgaaaaattgttcgtttcatcaggctctgttcctcaatggccttttgctacgtgcctcccgagaaatttgtctttttgtataaatgacaaagtgttgaaaatgtatttcctgaaataaatgtttcaaatgcagaaaccc

SEQ ID NO: 42702 - DNA, 1740 bp, Artificial Sequence
  derived and/or modified sequence
atgagcgaccccgccgtgaacgcccagctggacggcatcatcagcgacttcgaggccctgaagagaagcttcgaggtggaggaggtggagacccccaacagcaccccccccagaagagtgcagacccccctgctgagagccaccgtggccagcagcacccagaagttccaggacctgggcgtgaagaacagcgagcccagcgccagacacgtggacagcctgagccagagaagccccaaggccagcctgagaagagtggagctgagcggccccaaggccgccgagcccgtgagcagaagaaccgagctgagcatcgacatcagcagcaagcaggtggagaacgccggcgccatcggccccagcagattcggcctgaagagagccgaggtgctgggccacaagacccccgagcccgcccccagaagaaccgagatcaccatcgtgaagccccaggagagcgcccacagaagaatggagccccccgccagcaaggtgcccgaggtgcccaccgcccccgccaccgacgccgcccccaagagagtggagatccagatgcccaagcccgccgaggcccccaccgcccccagccccgcccagaccctggagaacagcgagcccgcccccgtgagccagctgcagagcagactggagcccaagccccagccccccgtggccgaggccacccccagaagccaggaggccaccgaggccgcccccagctgcgtgggcgacatggccgacacccccagagacgccggcctgaagcaggcccccgccagcagaaacgagaaggcccccgtggacttcggctacgtgggcatcgacagcatcctggagcagatgagaagaaaggccatgaagcagggcttcgagttcaacatcatggtggtgggccagagcggcctgggcaagagcaccctgatcaacaccctgttcaagagcaagatcagcagaaagagcgtgcagcccaccagcgaggagagaatccccaagaccatcgagatcaagagcatcacccacgacatcgaggagaagggcgtgagaatgaagctgaccgtgatcgacacccccggcttcggcgaccacatcaacaacgagaactgctggcagcccatcatgaagttcatcaacgaccagtacgagaagtacctgcaggaggaggtgaacatcaacagaaagaagagaatccccgacaccagagtgcactgctgcctgtacttcatccccgccaccggccacagcctgagacccctggacatcgagttcatgaagagactgagcaaggtggtgaacatcgtgcccgtgatcgccaaggccgacaccctgaccctggaggagagagtgcacttcaagcagagaatcaccgccgacctgctgagcaacggcatcgacgtgtacccccagaaggagttcgacgaggacagcgaggacagactggtgaacgagaagttcagagagatgatccccttcgccgtggtgggcagcgaccacgagtaccaggtgaacggcaagagaatcctgggcagaaagaccaagtggggcaccatcgaggtggagaacaccacccactgcgagttcgcctacctgagagacctgctgatcagaacccacatgcagaacatcaaggacatcaccagcagcatccacttcgaggcctacagagtgaagagactgaacgagggcagcagcgccatggccaacggcatggaggagaaggagcccgaggcccccgagatgtag

SEQ ID NO: 42703 - DNA, 1269 bp, Artificial Sequence
  derived and/or modified sequence
atggagccccccgccagcaaggtgcccgaggtgcccaccgcccccgccaccgacgccgcccccaagagagtggagatccagatgcccaagcccgccgaggcccccaccgcccccagccccgcccagaccctggagaacagcgagcccgcccccgtgagccagctgcagagcagactggagcccaagccccagccccccgtggccgaggccacccccagaagccaggaggccaccgaggccgcccccagctgcgtgggcgacatggccgacacccccagagacgccggcctgaagcaggcccccgccagcagaaacgagaaggcccccgtggacttcggctacgtgggcatcgacagcatcctggagcagatgagaagaaaggccatgaagcagggcttcgagttcaacatcatggtggtgggccagagcggcctgggcaagagcaccctgatcaacaccctgttcaagagcaagatcagcagaaagagcgtgcagcccaccagcgaggagagaatccccaagaccatcgagatcaagagcatcacccacgacatcgaggagaagggcgtgagaatgaagctgaccgtgatcgacacccccggcttcggcgaccacatcaacaacgagaactgctggcagcccatcatgaagttcatcaacgaccagtacgagaagtacctgcaggaggaggtgaacatcaacagaaagaagagaatccccgacaccagagtgcactgctgcctgtacttcatccccgccaccggccacagcctgagacccctggacatcgagttcatgaagagactgagcaaggtggtgaacatcgtgcccgtgatcgccaaggccgacaccctgaccctggaggagagagtgcacttcaagcagagaatcaccgccgacctgctgagcaacggcatcgacgtgtacccccagaaggagttcgacgaggacagcgaggacagactggtgaacgagaagttcagagagatgatccccttcgccgtggtgggcagcgaccacgagtaccaggtgaacggcaagagaatcctgggcagaaagaccaagtggggcaccatcgaggtggagaacaccacccactgcgagttcgcctacctgagagacctgctgatcagaacccacatgcagaacatcaaggacatcaccagcagcatccacttcgaggcctacagagtgaagagactgaacgagggcagcagcgccatggccaacggcatggaggagaaggagcccgaggcccccgagatgtag

SEQ ID NO: 42704 - DNA, 1269 bp, Artificial Sequence
  derived and/or modified sequence
atggagccccctgcctctaaggtacccgaggtccctactgctcctgccaccgacgccgcacctaaacgggtggagattcagatgcccaaacccgcagaggcaccaactgcgccatcacccgcccaaacactggaaaatagcgagccagctccggtaagccaattgcagagccgcctcgaaccaaaacctcagcccccagtggccgaagcgactcctagaagccaggaggccactgaggctgcaccctcctgtgttggtgacatggccgacacaccaagggacgcagggctcaagcaagcacctgcttctcgtaatgaaaaagctcccgtggactttggctacgtgggcatcgatagcatattagagcaaatgaggaggaaggccatgaaacagggatttgaattcaacattatggtcgtgggtcagagtgggcttggcaagtcaacgctcattaataccctgttcaagtccaagattagcaggaaaagcgtgcaacctacttcagaggagcgaataccaaagactatcgagatcaaatcgatcacacatgacatcgaggagaaaggagtgcggatgaagctgactgtgatagacactcctggatttggcgaccacatcaacaacgagaactgttggcagcccataatgaagttcattaatgaccagtatgagaagtacctgcaggaagaggtcaatatcaacaggaaaaagcggattccagatacccgggtgcactgctgtttgtacttcatacccgcaacagggcatagcttgaggcctcttgatattgaattcatgaaacgattgtccaaagtggtaaacatcgtgcctgtaattgctaaagccgatacccttactcttgaagagcgggttcactttaagcagcggattacagctgacctgctgtcaaacggtattgatgtgtacccgcagaaggagttcgatgaagatagcgaggaccgtctggtgaatgagaagtttcgtgagatgatccctttcgcagtggtcggctcagaccatgaataccaggtcaacggaaagcggattctgggtcgaaagactaagtggggcactattgaggtcgagaacacaacacactgcgagttcgcatatctgcgggatctgcttatccggacgcacatgcagaacatcaaagacatcacatcctccattcactttgaagcttacagggtgaaacgactcaatgagggatcctccgccatggcaaacgggatggaggagaaagagcctgaagctccagaaatgtag

SEQ ID NO: 42705 - DNA, 1269 bp, Artificial Sequence
  derived and/or modified sequence
atggagcccccagcctcaaaggtgcccgaggtgcctacggcgcccgccacagatgccgcaccaaaaagggtggaaatacagatgcctaaacctgccgaggctccaacagccccatcacccgcacagacactcgaaaatagcgaaccagccccagtgtcccagttgcaatcaagactggaacctaagccacagccccccgtggccgaagctacgccccgctcccaggaagcaaccgaagcggctccctcatgtgtcggagacatggcagatacacctcgagacgccgggttgaagcaggcacccgcaagccgcaatgagaaggctcctgtggatttcgggtacgtggggattgatagtatcttggagcaaatgcgccgcaaagccatgaaacaggggttcgagtttaatattatggtggttggccagagcggtttgggtaaaagcactctcatcaacactcttttcaagtctaagatatcgagaaagtccgtccaacccacttcagaggagcgcattccaaaaaccattgaaatcaaatccattacccacgacattgaggagaagggagtgcggatgaaattgacagttatcgatactccagggtttggcgatcacatcaacaatgagaattgctggcagcccataatgaagttcataaacgaccaatacgagaagtacctccaggaagaggtgaacattaatcggaagaaaagaatccccgatactcgcgtccactgctgtttatatttcataccagccaccggacactcactcaggccccttgatatcgagttcatgaagcgcctttcgaaagtcgttaacatcgtgcctgtgattgctaaagcagacacactgactctagaggagagggtgcacttcaaacagcgcattacagcggacttgctaagtaatggcatcgatgtgtatccccaaaaggaattcgacgaggattccgaagaccggcttgtaaacgaaaaattcagagaaatgatccccttcgctgtcgttggctccgaccatgaatatcaggtcaatggaaagcgtatcctggggcgaaaaacgaagtggggcaccatcgaagtagagaacacaacacactgcgaattcgcctatcttcgggatctgctcatcaggacacatatgcaaaatattaaggacatcacctcttctattcacttcgaggcctaccgcgttaaacggcttaacgaaggctctagcgctatggcaaatggcatggaggagaaggagcccgaagcacccgaaatgtag

SEQ ID NO: 42706 - DNA, 1269 bp, Artificial Sequence
  derived and/or modified sequence
atggagcccccagccagcaaggtgcctgaggtgcccacagccccagccacagatgctgcccccaagagggtggagatccagatgcccaagccagctgaggcccccacagcccccagccctgcccagaccctggagaacagcgagcccgcccctgtgtcccagctgcagagccggctggagcccaagccccagccccctgtggccgaggccacccccaggagccaggaggccacagaggccgcccccagctgtgtgggggacatggctgacaccccaagagatgctggcctgaagcaggccccagccagcagaaatgagaaggcccctgtggactttggctacgtgggcatcgacagcatcctggagcagatgaggaggaaggccatgaagcagggctttgagttcaacatcatggtggtgggccagagcggcctgggcaagagcaccctcatcaacaccctcttcaagagcaagatcagcaggaagtctgtgcagcccaccagcgaggagcgcatccccaagaccatcgagatcaagagcatcacccatgacatcgaggagaagggcgtgaggatgaagctgactgtgattgacaccccaggctttggagaccacatcaacaatgaaaactgctggcagcccatcatgaagttcatcaatgaccagtatgagaagtacctgcaggaggaggtgaacatcaacaggaagaagaggatcccagacaccagggtgcactgctgcctgtacttcatcccagccaccggccacagcctgcggcccctggacatcgagttcatgaagaggctgagcaaggtggtgaacatcgtgcctgtgattgccaaggctgacaccctgaccctggaggagcgggtgcacttcaagcagaggatcacagctgacctgctgagcaatggaattgatgtgtacccccagaaggagtttgatgaggacagtgaagatcggctggtgaatgagaagttccgggagatgatcccctttgctgtggtgggcagtgaccacgagtaccaggtgaatggcaagaggatcctgggcaggaagaccaagtggggcaccatcgaggtggagaacaccacccactgtgaatttgcctacctgcgggacctgctgatccgcacccacatgcagaacatcaaggacatcaccagcagcatccactttgaggcctacagagtgaagaggctgaatgaaggcagcagcgccatggccaacggcatggaggagaaggagcctgaggcccctgagatgtag

SEQ ID NO: 42707 - DNA, 1269 bp, Artificial Sequence
  derived and/or modified sequence
atggagccccccgccagcaaggtgcccgaggtgcccaccgcccccgcaacagatgcggctcccaagcgggtggagatacaaatgcctaagccggccgaagcccccaccgctccctctccagcccagactctggaaaatagcgagcccgctccagtatctcagctccaaagtcgattggaacctaaaccccagcccccagtggccgaagccacaccacggtctcaagaggccacagaggcagctccatcgtgcgttggtgatatggccgatactccgagggatgctggacttaaacaggcacccgcttctcggaatgaaaaggcaccagtcgatttcggctacgttgggatcgacagcattttggagcaaatgcgacggaaggctatgaagcaggggtttgagtttaacataatggtggtcggccagagcggcttgggaaagtcaaccctgatcaacacactattcaagagcaagatttcccgcaagtcagtgcagcctacatccgaggagagaatccccaagaccattgaaatcaagtcaatcacccatgacatcgaggagaagggagtccggatgaagctgaccgtcatcgacacgccgggcttcggtgaccatattaacaacgagaattgttggcagcccatcatgaagttcatcaatgatcagtacgaaaagtatctccaagaagaagttaacatcaaccggaagaaaagaatccccgacacgcgggtgcactgctgtctctattttattccagccaccggtcactcacttagaccactagacatcgagtttatgaagcgtctgtcaaaggtagtcaatattgtacctgtcattgctaaggctgatacactgaccctcgaggaacgggtgcacttcaagcaacgcattacagcagatctgctgtccaacggcatagatgtctacccccagaaggaatttgacgaggactcagaagaccgcctggtgaatgaaaagtttcgtgagatgattccctttgctgtagtggggtcagaccatgaataccaagtcaacggaaagagaattctgggcaggaaaacaaagtggggaactatcgaagtggagaacactacccactgcgagtttgcatatttgagagatctcctgattcgtactcacatgcagaacatcaaggatatcacgagcagcattcattttgaggcctatcgggttaaacgtcttaatgaggggtcctctgccatggcgaacggcatggaggagaaagaaccagaggctcccgaaatgtag

SEQ ID NO: 42708 - DNA, 1269 bp, Artificial Sequence
  derived and/or modified sequence
atggagccccccgccagcaaggtgcccgaggtgcccaccgcccccgctacagatgctgcccctaagagagtagaaatccaaatgcctaaacccgccgaggctcccacagctccgtctcccgctcagacactggagaatagcgaacctgcccccgtctctcagctgcagtctcgcttggagcccaagccacagccaccggtcgcagaagcaactcctagaagccaggaagcaactgaggctgcaccatcctgtgtgggggacatggcagatacaccccgagacgcgggtctcaagcaggcaccggcaagtcgcaacgaaaaggccccagtcgacttcggctatgtgggaatagactccatcttggagcagatgcgccgtaaagcaatgaaacagggcttcgaatttaatataatggtggtcgggcaatctgggttaggaaagagtactctgattaacacactgttcaagtccaaaattagcaggaagagcgtgcagcccacatcagaggagcgaatcccaaagactattgaaatcaaatccatcacacacgacatagaagaaaagggagtgcgtatgaaacttaccgtcatagacactccaggcttcggagaccacatcaacaacgagaattgctggcagcctatcatgaaatttatcaatgatcagtacgagaagtatctgcaggaggaagttaacattaaccgtaagaagaggatccccgacacccgcgtacactgttgcctttatttcatccctgcaactggtcatagtctccggcctttggatatcgaatttatgaaaaggctgagcaaagtggttaatatcgtgcccgtgattgctaaagctgacactctgacgctggaggagcgggtgcacttcaaacagaggataaccgcggacctgctctctaacggaatcgatgtgtacccacagaaggaatttgacgaagacagcgaggacagattggtaaacgaaaagttccgagaaatgatcccgtttgcagtcgtcggctcagaccatgagtatcaggtcaacggaaagcgcattctaggaagaaaaacaaaatggggtacgatcgaggtcgaaaacacgacccattgtgaattcgcatacctgagagacctactgataagaactcacatgcaaaatatcaaagacataacaagctccattcactttgaagcttaccgcgtgaagcggctgaatgagggcagctccgccatggcaaacggcatggaagagaaggagcccgaagccccagagatgtag

SEQ ID NO: 42709 - DNA, 1269 bp, Artificial Sequence
  derived and/or modified sequence
atggagccgcctgcttcaaaagtcccagaggtgcctaccgccccagccactgacgccgctcctaagagggtggaaattcagatgcctaagccagccgaggcccctacggccccttcccccgctcagactctggagaactcggagcctgcgccagtgtcccaactgcaatcccggttggaacctaagccccagcctccagtggccgaggcgactcccaggagccaggaggccactgaggccgcaccatcttgtgtgggagacatggctgacacacctcgggacgccggtctcaaacaggcaccagccagtcgaaacgaaaaggctccggttgatttcggttatgtgggcatcgactccatcctcgaacaaatgcgacggaaagccatgaaacaaggctttgagtttaatatcatggtggtggggcagtccggccttggaaagtccacattaattaatacactgttcaagtctaagatttctagaaagtccgtgcagcccacgtctgaagagagaatccctaaaacaatagagattaagtcaatcacccacgacattgaggaaaaaggggtccgtatgaaactgacagtgatcgacaccccaggatttggcgaccatattaataatgaaaactgttggcaacctataatgaagttcatcaacgaccagtacgaaaagtatctgcaggaggaagtgaacataaacaggaagaaacggattccagacactcgcgtccattgctgcctgtatttcattcctgcgaccggccacagtctgaggccactggacattgagttcatgaaaagactctccaaggtcgtgaacattgttccagtcattgcaaaggccgacacattaacccttgaagagcgagtgcacttcaagcagagaattacggccgatttactgtctaatgggatcgacgtatatcctcagaaagagtttgatgaggacagcgaggaccgtcttgtcaacgagaaatttagagagatgattccgttcgccgtggtcggctccgatcacgaatatcaggttaacggtaaacggatactcggaaggaagacaaagtggggaacaatagaagtggagaacacgacacattgtgagtttgcctatttgcgcgacctgctgatcaggacacacatgcagaacattaaggatattaccagcagcatccactttgaggcttatcgggtaaagaggctgaacgaggggtctagtgcaatggctaacgggatggaggaaaaggaacccgaagcccctgaaatgtag

SEQ ID NO: 42710 - DNA, 1269 bp, Artificial Sequence
  derived and/or modified sequence
atggagcccccagcatccaaggtccccgaagtgccgactgccccagctactgacgccgctcccaagagagtggagatccaaatgcccaagcccgcagaggcacccactgctccttcaccagcacagaccctcgaaaatagcgagcccgcacccgtgtcacagttgcagtcacgccttgagcccaagcctcagcctcccgttgcagaagctacacctcgctcacaagaggccacagaggctgcaccctcttgtgtcggagatatggctgatactcccagggacgccggacttaagcaggctcccgcttctcggaatgagaaagccccagttgactttgggtacgttggcatagattccattctggagcagatgcgtagaaaagcaatgaaacaagggtttgagttcaatatcatggtggtcggccagtccgggttagggaagtccaccctgatcaacactcttttcaaatcaaaaattagccgcaaatcagtacagcctacttcggaagaaagaatcccaaagaccatagagatcaagagcattacacacgacatcgaggaaaaaggtgtacgtatgaaattaacggttatcgacaccccaggtttcggggaccacatcaacaacgagaattgctggcagcccataatgaaattcatcaacgatcagtatgaaaaatatctgcaggaggaagttaacattaacagaaagaagaggatcccagacactagagtacattgctgcttgtacttcatcccagccacagggcacagcctccgtcccctcgatatagaatttatgaagagattgtctaaggtcgtcaacatcgtcccagttattgcaaaagctgacacactgaccctagaagagagagttcattttaagcagcggattacggctgacttgttgtccaacggcattgatgtgtacccacaaaaggaatttgacgaagatagtgaagaccggcttgtgaacgaaaaattccgagaaatgattccgttcgcggttgtggggagcgatcatgagtatcaggttaatggcaagaggattctcggccgaaagaccaaatggggcactatcgaggttgagaacaccacccattgtgagtttgcttatctgcgcgatcttttaattagaactcatatgcagaacattaaggacatcacctccagcattcactttgaggcctatagggtgaaacgcctcaatgagggatccagcgctatggctaatggtatggaggaaaaagagccagaggcaccagaaatgtag

SEQ ID NO: 42711 - DNA, 1269 bp, Artificial Sequence
  derived and/or modified sequence
atggagccccccgctagcaaggttcctgaggtgcctacggcgccagccacagatgctgcccctaagcgggtagaaatccagatgcccaaacccgctgaggctcctacggccccgagtcccgcccagaccctggagaactccgagccagctcctgtgtcacaacttcagtctcggctcgaaccaaaacctcagcctcctgtagccgaggcgacaccacgaagtcaagaagctactgaggccgccccctcctgtgtgggggacatggccgacacaccgagagatgccggcttgaaacaagctcccgcctcacgaaacgagaaggcccctgtggatttcggctatgtgggaatcgatagcatcttagaacagatgaggaggaaggctatgaaacaggggtttgaattcaatattatggtcgtgggacaatcaggtttaggcaagagcacactaatcaacacattgtttaaatccaaaatctcgcggaaaagcgttcagcctactagtgaggagaggattcccaaaaccattgagatcaagtctattacacacgacattgaggagaaaggggtaaggatgaagttgactgtaatcgacactcccggcttcggcgatcacataaacaatgagaactgttggcagccaatcatgaagttcatcaatgatcagtacgaaaaatatctgcaggaagaggtcaacattaaccgcaaaaagagaattccggatacccgagtacactgctgtctgtattttatcccggctactggccacagtctacggccactggatatcgagttcatgaagcggttatccaaggtggtgaacattgtcccagttattgcaaaggccgatactctgaccttagaagaacgggtgcattttaaacagaggattaccgccgacctgctttctaatgggattgatgtgtacccccagaaagaatttgatgaggactccgaagacagactggtaaacgagaagttccgtgaaatgatcccctttgcagtcgtaggctcagatcacgaatatcaggtgaatggaaagcgcatcctgggccgcaaaactaagtggggcacaatcgaagtggagaacactacacactgcgaatttgcttaccttcgtgacctgctgatacgtacccatatgcagaacatcaaggacatcacctcttccatccatttcgaggcatacagagtcaagcgacttaatgagggatcttcggccatggcaaatgggatggaggagaaagaacctgaggctccagagatgtag

SEQ ID NO: 42712 - DNA, 1269 bp, Artificial Sequence
  derived and/or modified sequence
atggagccacctgcctctaaagtgccagaagttcctaccgcaccagccaccgatgccgctcctaagcgcgtagagattcagatgcccaagccagccgaggcaccaactgccccttcacctgcacagacgctggaaaacagtgagcccgcaccagtaagtcaacttcagagcaggctggaacctaaacctcagccaccggttgctgaagccactccccggtcccaggaagcgaccgaagccgccccttcatgcgttggcgacatggccgacacgccccgcgatgcgggactcaaacaagcgcccgccagtcggaacgaaaaagctcctgtggacttcggctacgtaggtatcgacagcatcctggaacagatgcgcagaaaggcaatgaagcaggggttcgagtttaacattatggttgtcggacagtccggactcggaaaatctactcttatcaatacactattcaagagtaaaatctctcgtaaatccgtccagccaaccagtgaggagcggattcctaaaactatcgagatcaaatcaatcactcacgacatcgaggaaaagggcgtccgcatgaagctgaccgtgattgacactcccggtttcggagaccacattaacaacgagaactgttggcagcctatcatgaaatttataaacgatcagtacgagaagtacttgcaggaggaagttaatataaatcggaagaagcgcatccccgacacacgagtccattgttgcctgtatttcatccccgctacagggcacagtctaagacccttggatattgaattcatgaagcgcctcagtaaagtggtgaacatcgtcccagtaattgcaaaagcagacacactgaccctggaggagagagtgcacttcaagcagagaatcacagcagacctattgagcaatggcattgacgtgtaccctcagaaggagtttgatgaggattccgaggaccggctggtgaacgagaaattcagagaaatgatccccttcgccgtggtggggagcgaccatgaataccaggttaacggcaagaggatcctagggcgcaagactaagtggggcaccatcgaagtggaaaacactacacactgcgaatttgcctacctgcgcgacttgttgataagaacacacatgcagaacatcaaagatattacctcaagcatacacttcgaagcttatcgagttaagcgcctcaatgaaggatcttcggccatggccaatggcatggaggagaaggagcccgaagcacccgagatgtag

SEQ ID NO: 42713 - DNA, 1269 bp, Artificial Sequence
  derived and/or modified sequence
atggagccccccgccagcaaggtgcccgaggtgcccaccgcccccgccactgacgccgccccaaagagagttgaaatccagatgccgaaaccagcagaggcacccaccgccccgtcacctgcccagacacttgaaaactctgagccggctcccgtttcccagctccagtctcgtttagagccaaagccccaaccccccgtggcggaggctacccctcgcagccaagaagccaccgaagcagccccgtcttgtgtgggggacatggcagacacaccgagagatgccgggcttaagcaggcaccagcttcacggaacgagaaggctcctgtggactttggctacgtgggaattgatagcattctggagcagatgaggcggaaggctatgaaacagggcttcgagttcaatattatggtggtgggacagtctgggttgggtaagtccacgctcattaataccctattcaagtcaaagatctctcggaagtcagttcagcccactagcgaggagaggatccccaagaccattgaaatcaagtccattacacacgatatcgaggaaaagggagttaggatgaagctaaccgtaatagatacccctgggtttggcgatcatattaacaatgagaattgctggcaaccaattatgaagtttattaacgatcagtacgaaaaatacctgcaggaagaagtcaacatcaaccggaagaagcgcatccctgatactagggttcattgctgtttgtattttatcccagccactgggcatagcttacgaccacttgacatcgagtttatgaaaaggctgtccaaagtagtcaatattgtaccagttattgcaaaagcagatacgctgaccttagaagaaagagtgcatttcaaacagcggatcacagccgatctgctatcaaacggcatagatgtctatcctcagaaggagttcgatgaagattcagaggaccgactagttaatgagaagttccgggaaatgattccattcgcagtggtcggcagcgatcacgagtaccaggttaacggcaaacggattctggggaggaaaactaaatggggcaccattgaagtggaaaataccactcattgtgagttcgcctacttgagggacctcctcatcaggacgcacatgcagaacatcaaagatattaccagctcaatccactttgaagcctaccgtgtcaagcgcctcaatgagggcagtagtgcgatggctaatggaatggaggagaaagagccagaagcccccgagatgtag

SEQ ID NO: 42714 - DNA, 1269 bp, Artificial Sequence
  derived and/or modified sequence
atggagccccccgccagcaaggtgcccgaggtgcccaccgcccccgctaccgacgctgcacccaaacgcgtcgagatccaaatgcctaaacctgctgaggctcctaccgctccttcccccgcccagaccttggagaacagtgagccagctcccgtgtcccagctgcagagtcgattggagcccaagcctcagcctcctgtagcagaagccacacctcgatcccaagaagcaaccgaagctgccccgagttgtgttggtgacatggccgacactccaagagatgccggccttaaacaggctccagcgagccggaatgagaaagcaccggtggatttcggttacgttggaatcgattccatcctggagcagatgcgccgcaaggctatgaagcaggggttcgaatttaatatcatggttgtaggccagtctggactggggaagtctactctgattaatacactgttcaagtccaagatatccaggaaaagcgtgcagcccacgagcgaagagcggatcccaaagacgattgagattaagagtataacacatgacatcgaagaaaagggggtaagaatgaagttgaccgtgattgatacgccagggttcggagatcatataaataatgaaaattgttggcagcctatcatgaaatttatcaatgatcagtacgagaagtatttgcaggaagaggttaatataaacaggaagaaaagaattcctgacactagggtgcactgttgtctttattttattcccgcgaccggacattccctgcggccactcgatatcgaatttatgaaacggctcagcaaagtggtgaacatcgtgccagttatcgccaaagccgacactcttactctcgaggaacgcgtgcactttaaacagcgtataacggctgatttactgagtaacggcattgatgtctacccgcaaaaagagttcgatgaagattcagaggaccgtctggtaaacgagaaatttagggagatgattcccttcgcagttgtgggctctgatcacgagtaccaggtcaatgggaaacgcattttggggaggaagacaaagtggggcactatagaggtggagaataccacccattgtgaatttgcctatttgcgcgaccttttaatcagaactcatatgcagaacatcaaggatatcaccagcagcatccacttcgaagcataccgggtgaaacgattgaatgagggttcctccgcgatggccaacggaatggaggagaaggagcccgaagccccggagatgtag

SEQ ID NO: 42715 - DNA, 1269 bp, Artificial Sequence
  derived and/or modified sequence
atggagccacctgcctcaaaagtgccggaggtccctactgcacccgctacagacgccgctcccaaacgcgttgaaattcagatgccaaaaccagccgaagcccctacagccccaagcccagctcaaacactcgagaatagtgagcccgcacccgtctcccagctccaatctcgcctagagccaaaacctcaaccgccagttgccgaagcgactccacggtctcaagaagctactgaggcagcacccagctgtgttggggacatggccgacaccccaagagatgccggattgaagcaggccccagcgagccgcaatgaaaaggcaccagtggattttggctacgtaggaatcgatagcatactggaacagatgagacgcaaggcaatgaaacaaggcttcgaattcaacatcatggtggtcggccaaagtggattagggaaatcaacccttatcaataccctcttcaaaagcaaaatatcccgcaagtccgtgcaaccaacatcagaggagcgcatccccaaaaccattgaaatcaaaagcatcacacacgacattgaagagaagggggtccgcatgaagctcaccgtaatagatactcccggtttcggagatcatattaataacgaaaattgctggcaacctatcatgaagttcattaatgaccaatacgaaaagtaccttcaggaggaggtcaacatcaatagaaaaaagaggatcccagacaccagggtgcattgttgtctctacttcatcccagctactggtcactctctcaggcccctcgacattgagttcatgaagagattgtcaaaggtagtcaacattgtgcctgtgatagctaaggccgacactcttacgctggaggagagggttcatttcaagcagaggatcacagcagacctgctgagtaacggcatcgacgtgtacccacagaaagagtttgacgaagacagtgaggaccgccttgtaaacgaaaagtttcgagaaatgatcccttttgcagtggtggggagtgatcatgagtatcaggtaaacgggaagcggatcctggggagaaaaacaaaatggggaactatcgaagtggaaaacacaacacactgtgagtttgcgtatctgcgtgatttgctgattcggacacacatgcagaacatcaaggatataacatcgagtatccattttgaggcatatcgggtaaagcgactgaacgagggcagctcagcgatggccaatggtatggaggaaaaagagcctgaggctccggaaatgtag

SEQ ID NO: 42716 - DNA, 1269 bp, Artificial Sequence
  derived and/or modified sequence
atggagccgccagcttctaaggttcccgaggtgcctacagcccctgccactgatgccgctccgaagcgagtcgagattcagatgccaaaacctgccgaggcgccaaccgctccatctcctgcacagacgctggagaattccgagcccgcacctgtcagccagctgcagagtaggctcgaacctaagccgcagccgcctgtggcggaggccacccccaggagccaggaagcaactgaagcagctccctcttgcgtgggagacatggctgacacccccagagacgccggattgaagcaggctccagccagtcgaaatgagaaggcacctgtggactttgggtatgtcggaatagactcaattctggaacagatgcggagaaaggcgatgaaacaggggttcgaattcaacattatggtagtgggccaatctggcttaggcaaatccacgctgattaatactctgtttaagtcaaagatcagtaggaagagcgtgcagcctacttctgaagagcgcatccctaagactatagagattaagtcaatcactcatgatatcgaggaaaagggcgttaggatgaaactcacggttattgacacaccaggttttggtgaccatattaataatgagaactgttggcagcctattatgaaattcattaacgaccagtacgaaaaatacttgcaggaggaagtgaatatcaatcggaaaaagaggattcccgacaccagggttcactgttgtctttatttcataccggcaaccggccattctctccggccactggatatagaattcatgaagagactgtctaaagttgttaacatcgtgcccgtgattgcaaaagccgacaccttgactctggaggaacgagtgcacttcaaacagagaataacggccgatctcctctctaacgggatcgacgtttatcctcagaaggaattcgacgaagatagtgaggatcgtttggtcaacgaaaaattcagagaaatgatcccctttgccgttgtgggtagcgatcatgaataccaggtcaacgggaaaagaatcctcggcagaaaaacaaaatggggaacaattgaagtcgagaatacgacacattgtgagtttgcctatctgagagatctgctgataaggacccatatgcagaatatcaaggacattacctcatccattcacttcgaagcctaccgcgtcaaaagactaaatgagggcagttctgctatggccaacgggatggaagaaaaagagccagaggcccctgagatgtag

SEQ ID NO: 42717 - protein, 474 aa, Artificial Sequence
  derived and/or modified sequence
MGSSFWEGLQVAVGLPQGCWPQGLDSGEPAEGGQLEAAPVCIVTRQSKETAGPTLGRGGWRQGSLRRGKGTSCRCRQLSPGHGPGRLTGCGECHRLPCRGLVSGFTGLRGQEEDDLAFCLATIGSDRQATEAAPSCVGDMADTPRDAGLKQAPASRNEKAPVDFGYVGIDSILEQMRRKAMKQGFEFNIMVVGQSGLGKSTLINTLFKSKISRKSVQPTSEERIPKTIEIKSITHDIEEKGVRMKLTVIDTPGFGDHINNENCWQPIMKFINDQYEKYLQEEVNINRKKRIPDTRVHCCLYFIPATGHSLRPLDIEFMKRLSKVVNIVPVIAKADTLTLEERVHFKQRITADLLSNGIDVYPQKEFDEDSEDRLVNEKFREMIPFAVVGSDHEYQVNGKRILGRKTKWGTIEVENTTHCEFAYLRDLLIRTHMQNIKDITSSIHFEAYRVKRLNEGSSAMANGMEEKEPEAPEM

SEQ ID NO: 42718 - DNA, 1425 bp, Artificial Sequence
  derived and/or modified sequence
atgggcagttcattttgggaaggcctgcaagtggctgtgggcttgcctcaaggttgttggccccaggggttagacagcggcgaacctgccgagggtggacagctggaagctgcgccagtttgtatagtaacacggcagtctaaagagacagctgggccaactctcggacgcggcggatggagacaggggtctttgagacgaggcaaaggaacctcctgtcgctgccgccagctctcacctgggcatggtcccggcagactgaccgggtgcggcgaatgccaccggctgccatgccgtgggctggtgagcggtttcacaggcctccgcggccaggaagaagacgatctcgcgttctgcctggctacgataggatctgaccgtcaagctacggaggccgcgcctagctgtgtcggagacatggccgacactcctagagatgccggacttaagcaagcccctgcgtccaggaacgaaaaagctcccgtcgatttcgggtacgtggggatagactctatactggaacaaatgcgcagaaaggcaatgaagcaggggtttgaatttaatataatggttgtcggccagtccggacttggaaagagcacccttattaacacactctttaagtccaagatttctcgtaagagtgtccagccgacatccgaggagcggataccgaagaccattgagattaaatctattacacacgacatcgaagagaagggagtgcgaatgaaattgaccgtgatcgatactccaggattcggagaccacataaataacgaaaactgctggcagcccattatgaaattcattaatgaccaatatgagaaatacttgcaagaggaagtgaacattaatcggaagaagcgaattcctgacacacgcgttcactgctgtctatactttattcctgcgaccggacacagtctgcgtccattagacatcgagttcatgaaacggttatccaaagtggtcaacatcgtgcccgtgattgctaaagccgacactctgacgctggaggaaagagtccattttaaacaacggattactgccgatctcctgagcaatggaatcgacgtttatccccagaaggagttcgacgaagacagcgaagacagactcgtcaatgagaaatttcgggaaatgattcctttcgccgtagtcggatccgaccatgagtatcaggtgaacggaaagcgcatattaggccgcaagacaaagtggggcacaatcgaagtcgagaatacaactcactgcgagtttgcgtatctgcgcgatctgctgatcaggactcacatgcagaatatcaaggacatcacttccagcatccacttcgaggcatacagggtgaagaggttaaacgaaggcagtagcgccatggctaacggaatggaggaaaaagagcctgaggcaccggagatgtag

SEQ ID NO: 42719 - DNA, 1425 bp, Artificial Sequence
  derived and/or modified sequence
atgggcagcagcttctgggagggcctgcaggtggccgtgggcctgccccagggctgctggccccagggcctggacagcggggagcctgctgagggcggccagctggaggccgcccctgtgtgcatcgtgacccggcagagcaaggagacagctggccccaccctgggccggggcggctggaggcagggcagcctgcggcggggcaagggcaccagctgccgctgccggcagctgagccctggccacggccctggccgcctgaccggctgtggggagtgccaccggctgccctgccggggcctggtgtctggcttcaccggcctgcggggccaggaggaggatgacctggccttctgcctggccaccatcggcagtgaccggcaggccacagaggccgcccccagctgtgtgggggacatggctgacaccccaagagatgctggcctgaagcaggccccagccagcagaaatgagaaggcccctgtggactttggctacgtgggcatcgacagcatcctggagcagatgaggaggaaggccatgaagcagggctttgagttcaacatcatggtggtgggccagagcggcctgggcaagagcaccctcatcaacaccctcttcaagagcaagatcagcaggaagtctgtgcagcccaccagcgaggagcgcatccccaagaccatcgagatcaagagcatcacccatgacatcgaggagaagggcgtgaggatgaagctgactgtgattgacaccccaggctttggagaccacatcaacaatgaaaactgctggcagcccatcatgaagttcatcaatgaccagtatgagaagtacctgcaggaggaggtgaacatcaacaggaagaagaggatcccagacaccagggtgcactgctgcctgtacttcatcccagccaccggccacagcctgcggcccctggacatcgagttcatgaagaggctgagcaaggtggtgaacatcgtgcctgtgattgccaaggctgacaccctgaccctggaggagcgggtgcacttcaagcagaggatcacagctgacctgctgagcaatggaattgatgtgtacccccagaaggagtttgatgaggacagtgaagatcggctggtgaatgagaagttccgggagatgatcccctttgctgtggtgggcagtgaccacgagtaccaggtgaatggcaagaggatcctgggcaggaagaccaagtggggcaccatcgaggtggagaacaccacccactgtgaatttgcctacctgcgggacctgctgatccgcacccacatgcagaacatcaaggacatcaccagcagcatccactttgaggcctacagagtgaagaggctgaatgaaggcagcagcgccatggccaacggcatggaggagaaggagcctgaggcccctgagatgtag

SEQ ID NO: 42720 - DNA, 1425 bp, Artificial Sequence
  derived and/or modified sequence
atgggcagcagcttctgggagggcctgcaggtggccgtgggcctgcctcagggttgttggcctcagggcctggattctggggagccagccgaaggcggccaactggaggcagcaccggtctgcattgtgactcgccaaagcaaagagactgccggtcctactctgggccgagggggatggagacagggctcccttcgaagaggcaaaggcacgtcgtgtaggtgtagacagctaagccccggccatggcccgggccgactgaccggatgcggcgagtgtcacaggctcccatgccgcggcctggtgtcagggtttacaggactcaggggacaggaggaggatgatctcgccttctgtctggccaccatcggaagcgacagacaggccaccgaagcggcgccttcatgtgtgggagacatggcagacactcccagggatgccggcctcaaacaggctccagcctcacggaacgaaaaggctccagttgatttcggatacgtcgggatcgattccatcctggagcaaatgcggcgtaaggctatgaaacaggggttcgaatttaacatcatggtggtgggacagtctggtctggggaaatctacattgataaacactttattcaagtctaagatctcacgcaagtctgtacaacccactagtgaagagagaattccaaaaacaatagagattaaatcaatcacccacgatatcgaagaaaaaggcgttcggatgaagctgacagtaattgatactcctgggtttggtgaccatatcaataacgaaaactgttggcagcctataatgaaattcattaatgaccaatatgagaaatacttacaagaggaggtcaacatcaaccgtaagaagcgtatccctgataccagagtccactgctgcctgtattttattccagccactggtcactcccttcgaccacttgacattgaatttatgaagagattgtcaaaagtggttaatatcgtgccagtgatcgccaaggcagatacacttactctcgaagagagagtgcatttcaaacagcgcataaccgcggatctgctaagcaatggcattgatgtatatccccaaaaagagttcgatgaggactcagaagatagactagtaaacgagaagttccgggaaatgattcctttcgccgttgtcggctccgaccatgaatatcaggtcaacggcaagagaatactcgggcggaaaacaaagtggggaactattgaagtggagaataccacccattgcgaatttgcttatctccgtgacctgctcattaggacacacatgcaaaatattaaggatattacctcttctattcacttcgaggcgtatagagtgaaacgacttaacgaagggtcatcagccatggccaacggcatggaggagaaggagccagaagccccggaaatgtag

SEQ ID NO: 42721 - DNA, 1425 bp, Artificial Sequence
  derived and/or modified sequence
atgggatctagcttttgggagggcctacaggtcgcagtgggactgccacaaggttgctggccgcagggcttagatagcggcgaacccgctgaggggggacagttggaagctgccccagtgtgcattgtcacacgtcagagcaaggaaaccgctggtcccactttgggtcgaggtggttggcggcaggggtctctgcgcaggggcaagggcacttcctgcagatgccgccaacttagtcccggacacgggcctgggaggctgacaggctgtggggagtgccatcgactcccttgcaggggcttggtatctggatttactggcctacgcggtcaggaggaggatgacctcgctttttgtctggcaacaattggttctgacagacaggcgactgaggcagctcccagctgtgtgggggacatggcggataccccaagggatgccggactgaaacaggcgccagcaagtcgcaacgagaaagcacccgtggattttggatatgttggtatcgatagtattttggagcagatgcgccgtaaagccatgaagcagggcttcgagttcaacatcatggtggtcggccagtctggcctcggaaagagtaccctcatcaacactctattcaagtctaaaatatccagaaaaagtgtgcagcccacctccgaagaaaggattcctaagaccatcgaaatcaaaagcattacgcacgacatcgaggaaaaaggcgtccgcatgaaactaacagtgatagacactcctggcttcggtgaccacatcaataacgagaattgctggcagcccatcatgaagtttatcaacgaccagtacgagaaatatctgcaggaggaggtgaacatcaacagaaaaaagcggattcctgataccagagtacactgctgcctctacttcatccctgccaccggtcactctctacgccctcttgacatcgaattcatgaagcggctaagtaaggttgttaacatcgtgcccgtgatagccaaggccgatactttgacgctggaggaaagagtccactttaagcaacggattaccgccgaccttctgtcgaacggaatcgacgtgtacccccaaaaggagtttgatgaagattctgaggataggttggttaatgaaaagttcagagagatgatacccttcgccgtcgtggggagtgaccatgagtaccaggtaaatggaaagagaattcttggaaggaaaacaaagtggggaacaatcgaggtcgaaaacaccacccactgcgagtttgcttatttacgcgatttgctgatacgaacccacatgcagaatatcaaggacattacatccagcattcactttgaggcctatcgagtgaagcgactcaacgagggaagttctgctatggccaatgggatggaggagaaagagcccgaggctccagaaatgtag

SEQ ID NO: 42722 - DNA, 3635 bp, Artificial Sequence
  derived and/or modified sequence
agttaccatcgtggggagactgtctggacgcagagagcaggctctgtgtgggagcggggagggcaagccctggttgcgaggcagggcttccccaggattcagcagggatctgaaggactttgcaggcacccagggagataggagaggaggagggagcagccctggccggacactgtcctcctagcattgcctgcatcagggactcactcagctttaagaagcccctttgtgggggacagggagcatctgttagtttataggacctgaagtgcccccatgggctcaagtttctgggaaggcctgcaggtggccgtagggctgccgcaggggtgctggccccagggtctggattcaggggagcctgcagagggagggcagctggaggctgctccagtgtgcattgttacgaggcaaagtaaggagactgctgggcccacgctgggccggggtggatggaggcaaggaagtcttcgccggggcaagggcaccagctgtagatgccggcagctttctcctggacacgggcctggaaggctgacagggtgtggtgagtgccaccggctcccctgccgtggcctggtcagtggcttcacaggcctccgtgggcaggaggaggatgaccttgcattctgcttggccaccattggcagtgacagacaagccactgaggcggctcccagctgcgttggcgacatggccgacacccccagagatgccgggctcaagcaggcgcctgcatcacggaacgagaaggccccggtggacttcggctacgtggggattgactccatcctggagcagatgcgccggaaggccatgaagcagggcttcgagttcaacatcatggtggtcgggcagagcggcttgggtaaatccaccttaatcaacaccctcttcaaatccaaaatcagccggaagtcggtgcagcccacctcagaggagcgcatccccaagaccatcgagatcaagtccatcacgcacgatattgaggagaaaggcgtccggatgaagctgacagtgattgacacaccagggttcggggaccacatcaacaacgagaactgctggcagcccatcatgaagttcatcaatgaccagtacgagaaatacctgcaggaggaggtcaacatcaaccgcaagaagcgcatcccggacacccgcgtccactgctgcctctacttcatccccgccaccggccactccctcaggcccctggacatcgagtttatgaaacgcctgagcaaggtggtcaacatcgtccctgtcatcgccaaggcggacacactcaccctggaggagagggtccacttcaaacagcggatcaccgcagacctgctgtccaacggcatcgacgtgtacccccagaaggaatttgatgaggactcggaggaccggctggtgaacgagaagttccgggagatgatcccatttgctgtggtgggcagtgaccacgagtaccaggtcaacggcaagaggatccttgggaggaagaccaagtggggtaccatcgaagttgaaaacaccacacactgtgagtttgcctacctgcgggaccttctcatcaggacgcacatgcagaacatcaaggacatcaccagcagcatccacttcgaggcgtaccgtgtgaagcgcctcaacgagggcagcagcgccatggccaacggcatggaggagaaggagccagaagccccggagatgtagacgccaccctgcccacccccgggatcctgcccccaagtcatttccgtccccccccaggccctcccaccaccccattttattttatatgattttctccatttgtcatcgttccccaccccttcgacatgctgccaggaaacaagggaaggggcctccctccgagtgagtcagtgatgaggccgcggcctccccgaggttgtggggaggctgcactggagccacaggcaggggtgagagcacccactgaattgacatgaccctctgtccccaggcctggctccccgagggctcagaagagcagcttcggtgtgcagatcatccgtctgtgtggggttctcagtgccggaggccttggggtgggggccaggcctcgcacttgcagaggagcccagtgggctgcacgctcccctccatccccatcggccctgtcccctggagtgtgtcagagcccaggggagaatgcagcccaccaggagcacctggaccccctgcccgccacatggtgtggccatcactcagcccctacccctgccctgctcctaagggtagaaaactccagggtcccctgccaccgactgcccagccactccaagccccctggcagctgcccctcctggagcagaaagtgcctttatctcagccatccgcagactgcttggccagatgcggggacaggctggaatgagggaggcgtcttcatctccctgccatccccctctcacgccacccccgcccccaccgggctgcaggtgctgctgatgcgctgggatctgattgaggataaaaaggaaggagagatgacccctaccccctcatcccccagttttgaaaaggtctaagcaagtgagtctggtggaggagctgagggagggagccatggaaggtgccagaaggaaggttggcgggggcacgtgtgggccgtggcttgggctggtcagagtggcgtgagctgcccggcgcctgccctgcccaagtgaccagggaagtgtgtgtgtgtccatgtgtatgcgtgtccgtctgtctgtctagtgtctgggtttggcccaagactgggctgtagttacattaatgcccagccagccacccctgccactcacccttcctggcccaggccttgctgactctctgagctggggaggtgggaggccaggcgagcctgactctgttgatctacccgtgcctgggcccctcccctcagagcccatggtaacgaacccctagaaaggagagaacgggcgtcaggggtgcacagtccacagctgaagagcaaggtttcgtggcagcacggcccggcccctcaccctctgtccccacgaggggacccatgggggctgtctttgcagggcacagatgaccaaagtcccttcctgcttcctgttacctgtcttgctcctggggagaaagaggggcctgatgagactccactcaggtgcacacatcaccaggtgcatctgcaggcaccgggctggctgcttgcagccaggagaaggtcagcgagaaggagtgtatgagtgtgagtgtgtgtgcatggaagttggggcactgggcgtctgactccctccccacccaagagaggaaggacccctcaccacccccactggtgagacagtttactttgccaacttgccatgtttttgccaaaaccaagattttgaaggaaatgagtggccagcgccagggcccaggccatgtggcctgcccagcctcaatgtcacttggtggcggggtggggtgggggtgggcagcagcatcccagccttgagatgcttcactttccttctctgtaaccagactttgaaaaattgttcgtttcatcaggctctgttcctcaatggccttttgctacgtgcctcccgagaaatttgtctttttgtataaatgacaaagtgttgaaaatgtatttcctgaaataaatgtttcaaatgcagaaaccc

SEQ ID NO: 42723 - DNA, 1425 bp, Artificial Sequence
  derived and/or modified sequence
atgggcagcagcttctgggagggcctgcaggtggccgtgggcctgccccagggctgctggccccagggcctggacagcggcgagcccgccgagggcggccagctggaggccgcccccgtgtgcatcgtgaccagacagagcaaggagaccgccggccccaccctgggcagaggcggctggagacagggcagcctgagaagaggcaagggcaccagctgcagatgcagacagctgagccccggccacggccccggcagactgaccggctgcggcgagtgccacagactgccctgcagaggcctggtgagcggcttcaccggcctgagaggccaggaggaggacgacctggccttctgcctggccaccatcggcagcgacagacaggccaccgaggccgcccccagctgcgtgggcgacatggccgacacccccagagacgccggcctgaagcaggcccccgccagcagaaacgagaaggcccccgtggacttcggctacgtgggcatcgacagcatcctggagcagatgagaagaaaggccatgaagcagggcttcgagttcaacatcatggtggtgggccagagcggcctgggcaagagcaccctgatcaacaccctgttcaagagcaagatcagcagaaagagcgtgcagcccaccagcgaggagagaatccccaagaccatcgagatcaagagcatcacccacgacatcgaggagaagggcgtgagaatgaagctgaccgtgatcgacacccccggcttcggcgaccacatcaacaacgagaactgctggcagcccatcatgaagttcatcaacgaccagtacgagaagtacctgcaggaggaggtgaacatcaacagaaagaagagaatccccgacaccagagtgcactgctgcctgtacttcatccccgccaccggccacagcctgagacccctggacatcgagttcatgaagagactgagcaaggtggtgaacatcgtgcccgtgatcgccaaggccgacaccctgaccctggaggagagagtgcacttcaagcagagaatcaccgccgacctgctgagcaacggcatcgacgtgtacccccagaaggagttcgacgaggacagcgaggacagactggtgaacgagaagttcagagagatgatccccttcgccgtggtgggcagcgaccacgagtaccaggtgaacggcaagagaatcctgggcagaaagaccaagtggggcaccatcgaggtggagaacaccacccactgcgagttcgcctacctgagagacctgctgatcagaacccacatgcagaacatcaaggacatcaccagcagcatccacttcgaggcctacagagtgaagagactgaacgagggcagcagcgccatggccaacggcatggaggagaaggagcccgaggcccccgagatgtag

SEQ ID NO: 42724 - protein, 1025 aa, Artificial Sequence
  derived and/or modified sequence
MSVWSAGLLRSARRRRRGRTDGRRFLLRRAVPGHLGLARARVERAWLAAGLLKVPLRTPWAGYVHVHVKMDLLYGLVWLLTVLLEGISGQGVYAPPTVRIVHSGLACNIEEERYSERVYTIREGETLELTCLVTGHPRPQIRWTKTAGSASDRFQDSSVFNETLRITNIQRHQGGRYYCKAENGLGSPAIKSIRVDVYYLDDPVVTVHQSIGEAKEQFYYERTVFLRCVANSNPPVRYSWRRGQEVLLQGSDKGVEIYEPFFTQGETKILKLKNLRPQDYANYSCIASVRNVCNIPDKMVSFRLSNKTASPSIKLLVDDPIVVNPGEAITLVCVTTGGEPAPSLTWVRSFGTLPEKTVLNGGTLTIPAITSDDAGTYSCIANNNVGNPAKKSTNIIVRALKKGRFWITPDPYHKDDNIQIGREVKISCQVEAVPSEELTFSWFKNGRPLRSSERMVITQTDPDVSPGTTNLDIIDLKFTDFGTYTCVASLKGGGISDISIDVNISSSTVPPNLTVPQEKSPLVTREGDTIELQCQVTGKPKPIILWSRADKEVAMPDGSMQMESYDGTLRIVNVSREMSGMYRCQTSQYNGFNVKPREALVQLIVQYPPAVEPAFLEIRQGQDRSVTMSCRVLRAYPIRVLTYEWRLGNKLLRTGQFDSQEYTEYAVKSLSNENYGVYNCSIINEAGAGRCSFLVTGKAYAPEFYYDTYNPVWQNRHRVYSYSLQWTQMNPDAVDRIVAYRLGIRQAGQQRWWEQEIKINGNIQKGELITYNLTELIKPEAYEVRLTPLTKFGEGDSTIRVIKYSAPVNPHLREFHCGFEDGNICLFTQDDTDNFDWTKQSTATRNTKYTPNTGPNADRSGSKEGFYMYIETSRPRLEGEKARLLSPVFSIAPKNPYGPTNTAYCFSFFYHMYGQHIGVLNVYLRLKGQTTIENPLWSSSGNKGQRWNEAHVNIYPITSFQLIFEGIRGPGIEGDIAIDDVSIAEGECAKQDLATKNSVDGAVGILVHIWLFPIIVLISILSPRR

SEQ ID NO: 42725 - protein, 956 aa, Artificial Sequence
  derived and/or modified sequence
MDLLYGLVWLLTVLLEGISGQGVYAPPTVRIVHSGLACNIEEERYSERVYTIREGETLELTCLVTGHPRPQIRWTKTAGSASDRFQDSSVFNETLRITNIQRHQGGRYYCKAENGLGSPAIKSIRVDVYYLDDPVVTVHQSIGEAKEQFYYERTVFLRCVANSNPPVRYSWRRGQEVLLQGSDKGVEIYEPFFTQGETKILKLKNLRPQDYANYSCIASVRNVCNIPDKMVSFRLSNKTASPSIKLLVDDPIVVNPGEAITLVCVTTGGEPAPSLTWVRSFGTLPEKTVLNGGTLTIPAITSDDAGTYSCIANNNVGNPAKKSTNIIVRALKKGRFWITPDPYHKDDNIQIGREVKISCQVEAVPSEELTFSWFKNGRPLRSSERMVITQTDPDVSPGTTNLDIIDLKFTDFGTYTCVASLKGGGISDISIDVNISSSTVPPNLTVPQEKSPLVTREGDTIELQCQVTGKPKPIILWSRADKEVAMPDGSMQMESYDGTLRIVNVSREMSGMYRCQTSQYNGFNVKPREALVQLIVQYPPAVEPAFLEIRQGQDRSVTMSCRVLRAYPIRVLTYEWRLGNKLLRTGQFDSQEYTEYAVKSLSNENYGVYNCSIINEAGAGRCSFLVTGKAYAPEFYYDTYNPVWQNRHRVYSYSLQWTQMNPDAVDRIVAYRLGIRQAGQQRWWEQEIKINGNIQKGELITYNLTELIKPEAYEVRLTPLTKFGEGDSTIRVIKYSAPVNPHLREFHCGFEDGNICLFTQDDTDNFDWTKQSTATRNTKYTPNTGPNADRSGSKEGFYMYIETSRPRLEGEKARLLSPVFSIAPKNPYGPTNTAYCFSFFYHMYGQHIGVLNVYLRLKGQTTIENPLWSSSGNKGQRWNEAHVNIYPITSFQLIFEGIRGPGIEGDIAIDDVSIAEGECAKQDLATKNSVDGAVGILVHIWLFPIIVLISILSPRR

SEQ ID NO: 42726 - DNA, 3078 bp, Artificial Sequence
  derived and/or modified sequence
atgtctgtgtggtcggctggtctgctccggtctgcaaggaggagacggcgaggccggaccgacggaaggagattcctacttaggagggcggtgcctggccacctcggtctggcacgcgccagagttgagagagcatggctggcagcaggactgctcaaggtgccactgaggacaccttgggccgggtatgtacatgtgcacgtcaaaatggacctcttatatggtctggtctggctgctcactgtgctcctggaaggtataagtgggcagggcgtctatgcccctccaacagttaggatcgtgcactccggacttgcctgtaatattgaggaggagaggtatagtgagcgagtttataccatccgggagggtgaaacattggagttaacatgcctggtaaccgggcatccaagaccgcagattcgctggaccaagactgcaggatcagcgtcggataggttccaggactcttcggtattcaacgagactctgaggatcacaaatattcagcggcatcaggggggacgctactattgcaaggcggaaaacggtctcgggtccccagccatcaaatcgatccgagtagatgtgtattacttagatgaccctgtagtcaccgtacaccagtcaattggggaagctaaggagcaattttattacgagcgcaccgtgttcctgcggtgcgtggctaatagcaaccccccggtgcgctatagttggcggaggggccaggaggttttattgcagggctccgacaaaggagtcgaaatctacgaaccgttctttacgcagggcgagactaagattctgaagctgaagaacctgcgcccacaggactatgctaactattcatgcatcgcctccgtgaggaatgtctgcaatatccctgacaaaatggtttcctttaggctgtcaaacaaaacagcctccccttccattaagctgctggtggatgaccctattgttgtgaaccctggggaagcaataactctagtgtgcgtgaccacaggtggagagcctgccccttctcttacctgggtgaggtcgttcggaaccctgcctgaaaaaactgtgcttaacggtggaaccttgacaatccctgccatcacaagtgacgacgctggaacctactcatgtatagcaaacaacaatgtgggaaatccagccaaaaagtccactaacattattgtgagggcactcaaaaaagggaggttctggatcacacctgacccgtatcataaggatgacaatatacagattggtagggaggtgaaaatttcatgccaggtcgaggctgtaccgtccgaggagctcacatttagctggtttaagaatggccgacccctgcgttcctctgagaggatggttatcactcaaacagacccggacgtgagtccaggcaccaccaatttagatatcatagatctgaagttcacagactttgggacttacacttgcgttgcttccctcaaaggaggaggaatctcagatatatctatcgacgtgaatatctctagctccactgtcccacccaatctaacagtgccacaagaaaagtcaccgctcgttactcgcgaaggcgacaccatcgaactgcagtgccaagtcactggcaagcccaagcctatcatactgtggagccgagcggacaaggaggtagctatgcccgatggcagcatgcagatggagtcttatgacgggactttgagaatcgtcaatgttagtagagagatgtctggcatgtatcggtgccagacatcccagtataatggatttaatgtgaagccacgggaggccctcgtccaacttatcgtacagtaccctcccgctgtggagcccgcctttctggagattcggcaagggcaggacagaagcgtcaccatgtcttgtcgcgtgctacgggcataccctattcgtgtcctcacttatgaatggcggttgggcaacaagctgttaagaactggccaattcgacagccaggagtacacagaatacgcagtaaaaagccttagcaacgagaattacggggtgtataattgctccatcattaatgaggccggcgcgggcagatgcagtttcttggttacaggaaaggcctacgcccccgagttctactacgacacctacaaccccgtgtggcagaatcggcaccgggtttattcttatagcctgcagtggacacaaatgaaccccgatgctgtggacaggattgtggcatacagacttggaattcgccaggccggacaacagcgctggtgggagcaggagattaagattaacggcaacattcagaaaggtgagctaataacttacaacctgacggagctgatcaaaccagaagcctatgaggttaggcttacacccttgacaaagttcggtgagggagactcaacaatccgcgtgattaaatatagcgctcccgttaatcctcaccttcgtgagttccattgtggtttcgaagatggaaatatttgcctattcacccaggatgataccgacaattttgactggaccaaacaatcaacggctaccagaaatactaaatacacccccaacacaggcccaaacgccgaccgctcagggagtaaggaaggcttttacatgtatattgagaccagccgaccacgcctggaaggagaaaaggcaaggctcctgtctcccgtgttctctatcgcccctaaaaatccatacggcccaacaaacacggcctactgtttcagtttcttttatcatatgtacggccaacatattggcgtgctgaacgtgtacctgagacttaagggccagaccaccatagagaatccgctgtggtcaagctctgggaacaagggccagcgctggaacgaagctcatgtgaatatctatccgattacctctttccagctgatctttgaaggtatccgtggacctgggattgaaggcgacattgcaattgatgacgttagcatagcagaaggcgagtgcgcaaaacaggatcttgctacaaagaactcagtagacggggctgtgggcatactagtacatatctggctgtttccgatcattgttctaatttcgatcctgagtccgcgccgctag

SEQ ID NO: 42727 - DNA, 2871 bp, Artificial Sequence
  derived and/or modified sequence
atggatcttctctatggacttgtctggctactcaccgtgctactggaaggaattagcggacagggtgtgtacgccccgccgaccgtgcgaatcgtccattctggacttgcttgcaatatagaagaagaaagatatagcgaaagagtatacaccattagagagggtgaaactctggagcttacatgcctggtaaccgggcaccccagaccacagatccgctggactaaaaccgctggatcagctagcgatcgcttccaggacagctccgtgtttaatgaaacattgcgcatcacaaatatccagcgccatcaggggggaagatactactgcaaggctgaaaatggtctcgggtctccagctatcaaaagcatacgggttgacgtgtactacctggatgatccagttgtgactgtccaccaaagcatcggtgaagccaaagagcaattctactatgagcggaccgtctttctgcgttgcgtggctaatagcaaccctcctgttcgatactcatggcgccgggggcaagaggttttgttgcagggttcggacaaaggggttgaaatttacgagccatttttcacccagggcgagacaaagatcctgaagctcaagaaccttcggcctcaggactatgcaaactactcttgcatcgccagcgttcggaatgtgtgcaacatcccagataagatggtctcgttcagactttctaataagaccgcttcgccttctatcaaactgttggtcgacgatccaattgttgttaatccaggcgaggctattaccctggtgtgcgtgacaactgggggtgagccggccccatctctaacatgggttcgctcatttgggacccttcctgaaaagacggttctgaacggaggcacgttgaccattccagctattactagcgatgatgccggtacgtatagctgcatcgccaacaacaacgtcggcaatccggccaaaaaaagcaccaacatcatcgttcgcgccttaaagaaagggcgattttggatcaccccggacccatatcataaggatgataatattcagatcggtcgagaggtgaagatatcatgccaggtcgaggcagtgcctagtgaagagctgacattcagttggtttaaaaatggcaggcctttgcgttctagtgagcgcatggttattactcagaccgacccagacgtcagccccggaactacgaacttagatatcatcgatttgaagttcacagattttgggacctatacgtgtgtcgcttccttgaagggcggcggaatatctgatattagcattgacgtgaacatcagttccagcaccgtgccccccaatttgacagttccgcaggagaaaagcccgctcgtcactcgtgaaggagacaccatcgagttacagtgtcaggtgaccgggaaacctaaaccaattattctttggagtagggccgataaggaggtggccatgcctgatggatctatgcaaatggaatcatacgacgggaccctgcgtattgtcaatgtctctagagagatgtctggcatgtatcggtgccagacaagtcagtacaacggttttaatgtgaaacccagagaagcgttggtgcagctcatagtgcagtatcccccagcagttgaacccgccttcctggagattcggcagggccaagatcggagtgtgacaatgtcctgtagggtactacgcgcttatcccatcagagttcttacttatgagtggagactgggaaataaattattgagaaccgggcagtttgactcccaagagtataccgagtacgctgtgaaatcactatccaatgagaactacggggtgtacaattgcagtatcatcaacgaagccggcgccggtcgctgcagcttcctggtgactggcaaggcctatgcaccggagttctactacgacacctacaaccctgtctggcagaatagacacagagtgtacagttactctcttcagtggactcaaatgaaccctgatgcggtggatcggatcgtggcttaccgcctaggaataaggcaggccgggcagcagcgttggtgggaacaagaaataaagattaacggtaatattcagaagggggaactgataacctacaacctgacagaactgattaagcctgaggcctacgaggtgcgccttacccctctcaccaaatttggcgagggtgatagtaccatccgcgtgattaaatactctgcccctgtcaatccccacttaagggagttccactgcgggttcgaagacggaaacatctgtctctttacccaggacgacacagacaattttgattggaccaaacagtccactgctactagaaacacgaagtacacacctaacaccgggcctaatgctgatcgctcgggcagtaaagaaggattctacatgtacatcgagacaagccgccctaggctcgaaggcgagaaggcccggttactgtcccctgtattcagtattgcacccaagaatccctatggccctacaaacaccgcctactgtttttccttcttctaccacatgtatggacagcacattggcgtgttgaacgtttatcttcggctcaagggccagacgaccatcgaaaacccgctgtggtccagttccggaaataaaggtcaaagatggaatgaggcccatgtcaatatttaccctattacctctttccagctgatattcgagggcattagagggcccggaattgagggcgacatcgctatcgatgacgttagcatcgccgagggcgagtgtgcaaaacaggaccttgcaacaaaaaatagtgtcgatggggccgttggtattctcgtacatatctggttgtttcccattatagtgctgatctcaattttgtccccaaggcgctag

SEQ ID NO: 42728 - DNA, 3078 bp, Artificial Sequence
  derived and/or modified sequence
atgtctgtgtggagcgctggcctgctgcggagcgccaggagaagaagaagaggaagaacagatggaagacgcttcctgctgcggcgggctgtgcccggccacctgggcctggcccgggcccgggtggagcgggcctggctggccgccggcctgctgaaggtgcccctgcggaccccctgggccggctacgtgcacgtgcacgtgaagatggacctgctgtatggcctggtgtggctgctgactgtgctgctggagggcatcagcggccagggcgtgtatgcccccccaacagtgcgcatcgtgcacagcggcctggcctgcaacatcgaggaggagcgctacagcgagcgggtgtacaccatccgggagggggagaccctggagctgacctgcctggtgacaggccacccccggccccagatccgctggaccaagacagctggcagcgccagtgaccgcttccaggacagcagcgtcttcaatgagaccctgcgcatcaccaacatccagaggcaccagggcggccgctactactgcaaggccgagaatggcctgggcagccctgccatcaagagcatccgggtggatgtgtactacctggatgatcctgtggtgacagtgcaccagagcattggagaggccaaggagcagttctactatgaaagaacagtgttcctgcgctgtgtggccaacagcaacccccctgtgcgctacagctggaggcggggccaggaggtgctgctgcagggcagtgacaagggcgtggagatctatgagcccttcttcacccagggcgagaccaagatcctgaagctgaagaacctgcggccccaggactatgccaactacagctgcatcgcctctgtgagaaatgtgtgcaacatcccagacaagatggtgtccttccggctgagcaacaagacagccagccccagcatcaagctgctggtggatgaccccatcgtggtgaaccctggagaggccatcaccctggtgtgtgtgaccaccggcggggagcccgcccccagcctgacctgggtgcgcagctttggcaccctgcctgagaagacagtgctgaatggaggcaccctgaccatcccagccatcaccagtgatgatgctggcacctacagctgcatcgccaacaacaacgtgggcaacccagccaagaagagcaccaacatcatcgtgcgggccctgaagaagggccgcttctggatcaccccagacccctaccacaaggatgacaacatccagatcggccgggaggtgaagatcagctgccaggtggaggccgtgcccagcgaggagctgaccttctcctggttcaagaatggccggcccctgcggagcagcgagaggatggtgatcacccagacagatcctgatgtgtccccaggcaccaccaacctggacatcatcgacctgaagttcacagactttggcacctacacctgtgtggccagcctgaagggcggcggcatcagtgacatcagcattgatgtgaacatcagcagcagcacagtgccccccaacctgactgtgccccaggagaagagccccctggtgacccgggagggggacaccatcgagctgcagtgccaggtgacaggcaagcccaagcccatcatcctgtggagcagagctgacaaggaggtggccatgccagatggctccatgcagatggagagctatgatggcaccctgagaattgtgaatgtgtcccgggagatgagcggcatgtaccgctgccagaccagccagtacaacggcttcaacgtgaagccccgggaggccctggtgcagctgattgtgcagtaccccccagctgtggagcccgccttcctggagatccggcagggccaggacagatctgtgaccatgagctgccgggtgctgcgggcctaccccatccgggtgctgacctatgagtggaggctgggcaacaagctgctgaggacaggccagtttgacagccaggagtacacagaatatgctgtgaagagcctgagcaatgaaaattatggagtgtacaactgcagcatcatcaatgaggccggggccggccgctgcagcttcctggtgacaggcaaggcctatgcccctgagttctactatgacacctacaaccctgtgtggcagaacagacaccgggtgtacagctacagcctgcagtggacccagatgaacccagatgctgtggacagaattgtggcctaccgcctgggcatccggcaggccggccagcagcgctggtgggagcaggagatcaagatcaatggaaacatccagaagggggagctgatcacctacaacctgacagagctgatcaagccagaggcctatgaggtgcggctgacccccctgaccaagtttggagagggggacagcaccatccgggtcatcaagtacagcgcccctgtgaacccccacctgcgggagttccactgcggctttgaagatggcaacatctgcctcttcacccaggatgacacagacaactttgactggaccaagcagagcacagccaccaggaacaccaagtacacccccaacacaggccccaatgctgacaggagcggcagcaaggagggcttctacatgtacatcgagaccagccggccccggctggagggggagaaggcccggctgctgagccctgtgttcagcatcgcccccaagaacccctacggccccaccaacacagcctactgcttctccttcttctaccacatgtatggccagcacatcggcgtgctgaatgtgtacctgcggctgaagggccagaccaccatcgagaaccccctgtggagcagcagcggcaacaagggccagcgctggaatgaggcccacgtgaacatctaccccatcaccagcttccagctgatctttgagggcatccggggccctggcatcgagggggacatcgccattgatgatgtgtccattgctgaaggagaatgtgccaagcaggacctggccaccaagaacagcgtggatggagctgtgggcatcctggtgcacatctggctgttccccatcatcgtgctgatcagcatcctgagccccaggaggtag

SEQ ID NO: 42729 - DNA, 2871 bp, Artificial Sequence
  derived and/or modified sequence
atggacctgctgtatggcctggtgtggctgctgactgtgctgctggagggcatcagcggccagggcgtgtatgccccacccaccgtgagaattgtgcacagcggcctggcctgcaacatcgaggaggagcgctacagcgagcgggtgtacaccatccgggagggggagaccctggagctgacctgcctggtgacaggccacccccggccccagatccgctggaccaagacagctggcagcgccagtgaccgcttccaggacagctctgtgttcaatgagaccctgcgcatcaccaacatccagaggcaccagggcggccgctactactgcaaggcagaaaatggcctgggcagccctgccatcaagagcatccgggtggatgtgtactacctggatgatcctgtggtgacagtgcaccagagcatcggggaggccaaggagcagttctactatgaaagaacagtgttcctgcgctgtgtggccaacagcaacccccctgtgcgctacagctggaggcggggccaggaggtgctgctgcagggcagtgacaagggcgtggagatctatgagcccttcttcacccagggcgagaccaagatcctgaagctgaagaacctgcggccccaggactatgccaactacagctgcatcgcctctgtgagaaatgtgtgcaacatcccagacaagatggtgtccttccggctgagcaacaagacagccagccccagcatcaagctgctggtggatgaccccatcgtggtgaaccctggagaggccatcaccctggtgtgtgtgaccactggaggagagcccgcccccagcctgacctgggtgcgcagctttggcaccctgcctgagaagacagtgctgaatggaggcaccctgaccatcccagccatcaccagtgatgatgctggcacctacagctgcatcgccaacaacaacgtgggcaacccagccaagaagagcaccaacatcatcgtgcgggccctgaagaagggccgcttctggatcaccccagacccctaccacaaggatgacaacatccagatcggccgggaggtgaagatcagctgccaggtggaggccgtgcccagcgaggagctgaccttctcctggttcaagaatggccggcccctgcggagcagcgagaggatggtgatcacccagacagatcctgatgtgtccccaggcaccaccaacctggacatcatcgacctgaagttcacagactttggcacctacacctgtgtggccagcctgaagggcggcggcatcagtgacatcagcattgatgtgaacatcagcagcagcacagtgccccccaacctgactgtgccccaggagaagagccccctggtgacccgggagggggacaccatcgagctgcagtgccaggtgacaggcaagcccaagcccatcatcctgtggagcagagctgacaaggaggtggccatgccagatggctccatgcagatggagagctatgatggcaccctgcgcatcgtgaatgtgtcccgggagatgagcggcatgtaccgctgccagaccagccagtacaacggcttcaacgtgaagccccgggaggccctggtgcagctgattgtgcagtacccacctgctgtggagcccgccttcctggagatccggcagggccaggacagatctgtgaccatgagctgccgggtgctgcgggcctaccccatccgggtgctgacctatgagtggaggctgggcaacaagctgctgaggacaggccagtttgacagccaggagtacacagaatatgctgtgaagagcctgagcaatgaaaactacggcgtgtacaactgcagcatcatcaatgaagctggagctggccgctgcagcttcctggtgacaggcaaggcctatgcccctgagttctactatgacacctacaaccctgtgtggcagaacagacaccgggtgtacagctacagcctgcagtggacccagatgaacccagatgctgtggaccgcatcgtggcctaccgcctgggcatccggcaggccggccagcagcgctggtgggagcaggagatcaagatcaatggaaacatccagaagggggagctgatcacctacaacctgacagagctgatcaagccagaggcctatgaggtgcggctgacccccctgaccaagtttggagagggggacagcaccatccgggtcatcaagtacagcgcccctgtgaacccccacctgcgggagttccactgcggctttgaagatggcaacatctgcctcttcacccaggatgacacagacaactttgactggaccaagcagagcacagccaccaggaacaccaagtacacccccaacacaggccccaatgctgacagaagtggcagcaaggagggcttctacatgtacatcgagaccagccggccccggctggagggggagaaggcccggctgctgagccctgtgttcagcatcgcccccaagaacccctacggccccaccaacacagcctactgcttctccttcttctaccacatgtatggccagcacatcggcgtgctgaatgtgtacctgcggctgaagggccagaccaccatcgagaaccccctgtggagcagcagcggcaacaagggccagcgctggaatgaggcccacgtgaacatctaccccatcaccagcttccagctgatctttgagggcatccggggccctggcattgaaggagacatcgccattgatgatgtgtccattgctgagggggagtgtgccaagcaggacctggccaccaagaacagcgtggatggagctgtgggcatcctggtgcacatctggctgttccccatcatcgtgctgatcagcatcctgagccccaggaggtag

SEQ ID NO: 42730 - DNA, 5075 bp, Artificial Sequence
  derived and/or modified sequence
acttcgcctcgcagctccccttcccatcaccgccccctgctcctccccggcgtctgcgattttcccaggcacccggtgtgagtgcggcgtgcgtgtgagtgtgtgtcagggtattgtgttgtgggagagtgtgtgagtgtgtgtgagtgtgtgtgtgcatgagtgtgtggagtgcggggctcctgcgctccgctcgccgccgccgccggggaaggacagacggacggcgcttcctccttcggcgagcggttcccgggcacctcggcttggcccgggcgcgagtggagcgcgcctggctggccgccggcctcctgaaggtcccgttgcgtaccccctgggctggatatgttcatgttcacgtgaagatggatttactgtacggtctcgtgtggctgctgacagtcctcctggaggggatctctggccaaggagtgtacgctcctcccacggttcgtattgtgcactcaggcttggcctgtaacattgaagaggagcgctactccgaaagggtctacactatccgggaaggagaaacccttgagttgacttgtctagtcacaggacatccacgtccacagatcaggtggaccaaaacagcaggaagtgcctctgacagattccaagactcaagtgtcttcaatgagactttgaggattacaaatattcagcgacaccaaggaggccggtattactgtaaagcagagaatggcttggggtctccagcgataaagtcaatcagagtggatgtatactatttggatgatccagtagtaactgttcatcaaagtataggtgaagctaaagaacaattttactatgagagaacagtgttcctccggtgtgttgccaattccaatcctcctgttcggtatagctggagacgtggccaggaggtcttgctgcaaggatctgataaaggagttgagatttatgaaccattctttacccagggtgaaacaaagatcttaaaactaaagaatcttcgacctcaggactatgctaattatagctgcattgcttcagtgaggaatgtatgtaatattcctgataagatggtgtcgtttagactgtccaataaaacagcatcaccgtcaattaaactcttggtggatgatcctatagttgtaaatcctggagaggccataacattagtatgtgttacaacaggaggagagcctgcaccttctctcacctgggtcaggtcctttgggactctgcctgaaaagactgttttgaatggaggaactttgaccatacctgccatcacctcagatgatgctggtacttacagctgcattgccaataataatgtgggaaaccctgcaaaaaagtccaccaacatcattgtgagagcattaaaaaaaggacgattttggatcacaccagatccttatcacaaagatgacaacatccagattggccgtgaggtgaaaatatcttgccaagtagaagctgttccttctgaggagctaacatttagttggtttaaaaatggtcgtccattaagaagttctgagcggatggtcattacacagactgatcctgatgtctctccgggaacaacaaacttggacatcattgatttaaaattcacggattttgggacgtacacatgtgtagcatctctgaagggaggaggaatatctgatatcagtatcgatgttaatatatccagcagcacagttccacccaatctgactgttccacaggaaaaatcaccattggtcaccagagaaggagacacaatagaactgcaatgtcaagtaactggcaaacctaaaccaatcatcctttggtctagagcggataaagaagttgcaatgcctgatggatcaatgcaaatggagagttatgatggaacactgaggattgtgaatgtatctagggaaatgtcaggaatgtacagatgtcagaccagccaatacaatggatttaacgtgaaaccaagggaagccttggtgcagctcatcgttcagtatccccctgcagtggaaccagcattcttggaaatccggcaaggacaggatcgaagtgtcactatgagttgcagagtactgagagcctatccaatacgggtgctgacctatgagtggcgcttgggcaataaattattacggacgggtcaatttgactctcaggaatacacagagtacgctgtgaagagtctttccaatgaaaactatggggtttataactgtagcatcataaatgaagctggagctgggagatgcagctttcttgttacaggaaaggcctatgctccagaattctattatgatacctacaatccagtatggcagaacagacaccgtgtttattcttacagtctacagtggacacagatgaatcctgatgcagtggatcggattgttgcataccggttgggcatcaggcaggctggacagcagcgctggtgggagcaggagattaaaataaatgggaatattcaaaagggagaattaattacatataacttgacagagctaattaaaccagaagcttatgaagtccgactgactcctctcaccaaatttggtgaaggagattcaacaattcgtgtgatcaaatatagtgctcctgtaaatcctcatttgagagaatttcattgtggatttgaagatggtaatatttgtttgttcactcaagatgatacagataattttgactggacaaagcaaagtacagcaacaagaaatacaaaatatactcctaatacaggacctaatgctgaccgtagtggctccaaagaaggtttttatatgtacattgagacatcacgacccagattggaaggcgaaaaggctcgacttctcagccctgttttcagcatagctcccaaaaacccttatggacccacaaacactgcatattgtttcagcttcttttatcacatgtatggacaacatataggtgtcttaaatgtttatctacgtttgaaagggcaaacaacaatagagaatccactgtggtcttcaagtgggaataaaggacaaagatggaatgaggctcatgttaatatatacccaattacttcatttcagctcatttttgaaggtatccgaggtcctggaatagaaggtgacattgctattgatgatgtatcaattgcagaaggagaatgtgcaaaacaagacctagcaactaagaattccgttgatggtgctgttgggattttggttcatatatggctttttcccattatcgtcctcatctctatcttaagtcctcgaaggtgaccttatcctggcagaggctataaaagattcaccaggcactggcatgaagaaagagtctttgtaaatggacattgaacaaacaaactaccaaagattcctccactgactactgactcaaaaataaaataataaaaacaaatttttttaagcactggggataaaaagacatcatggaagtataacttattccagactaaacataaaagataatcttgacctgagtagagaagagaccttcaggtgcttttgtggctaaaaagattacagcgtcatctggttgaactctggaaaaaaaaaaaaaaatgaaaaaaagaaaaaaaaaagagctatagaaatccttgtcaaagcacaaagtcatggctggttttgtttcaaatgaatagtttgcttgttaccatggaaacctaatggcctgccaacaaaaacctcactgtaaacagggtacgtgaagagctggcatttattttccttacgagaaggttttcgtagagaattaaataaatgtaggcccttttacctttggctgttacccttccttgaaaataacccgaactcagaattatttaaagcattcatgtttctccccaccttatccccatcccacctttattattattatttttctcccatggctaagctagataactgtatgctgtctctttttgcatgcactactatccaggatggtaaacctgggcttacatgttacacaggcttatcggagtttgcttgcggccacttgaacacccaaactacgtcatctgttccaatgaagaaaccaaaccaccatcttttataaattgccatggaaaccaagtgccttcaatgaaacaagcctgaataattttcaactcagaagcttgcactgctaagagtggtttgtgtaaaactattttataaacaaactacagagcctaaatgtgcaaattacaggcaagacaacaaagccgcttctgaagaagaaaggaccgaagctgctgcgtaagcccatgcagacaagatatttgttgtttaacctcctagacagccatggcctttcggcttattgtccattagaaaatcacttccattgagaccagacatggagcaacactttttttcttccaggttattaaatgggtcaaccagagcaaaaggttattaagaatacttagtgcagaaggtggtaaaacacaaaagtgatttttttactctaacctccatttgaaatgaaattggccctagctttagagggaacaagaaaatgtttgggattgcagtgcatactaactctacagtggaactgggcctgaaaaatctggctttattctaaactctgagggtaatatgcctctgccctttagtcagactctgtgcaaattgtgaaatattattttattattttaccaagattataaaaacacttttacaaaaaaacaaaaacctgtaaaaataattttgagctacctgacgacaaatcatatctttaaccagccagttttccaatgcattgtaaatttcacttaaacctgttggttatgaaaatttgaagatcattttccttaaattatctcagcttttaacttcatttaaaaagacttttgtctaagaagaatattattattatatgttctttcaacaccccaggattaaaaaaactgattatgcaagcaattggaatataagtattaaattatagcatttgcaaatattaatataaaagcacaacaaaatgtagtggaaaatgacaaagcttgttttttaaaacaattctgtagaaatgtttgtgcaaattcagtaattcaacttaaaatataattttacagctatgttcaataaagcctctttccaggtaaggta

SEQ ID NO: 42731 - DNA, 5179 bp, Artificial Sequence
  derived and/or modified sequence
atggatttactgtacggtctcgtgtggctgctgacagtcctcctggaggggatctctggccaaggagtgtacgctcctcccacggttcgtattgtgcactcaggcttggcctgtaacattgaagaggagcgctactccgaaagggtctacactatccgggaaggagaaacccttgagttgacttgtctagtcacaggacatccacgtccacagatcaggtggaccaaaacagcaggaagtgcctctgacagattccaagactcaagtgtcttcaatgagactttgaggattacaaatattcagcgacaccaaggaggccggtattactgtaaagcagagaatggcttggggtctccagcgataaagtcaatcagagtggatgtatactatttggatgatccagtagtaactgttcatcaaagtataggtgaagctaaagaacaattttactatgagagaacagtgttcctccggtgtgttgccaattccaatcctcctgttcggtatagctggagacgtggccaggaggtcttgctgcaaggatctgataaaggagttgagatttatgaaccattctttacccagggtgaaacaaagatcttaaaactaaagaatcttcgacctcaggactatgctaattatagctgcattgcttcagtgaggaatgtatgtaatattcctgataagatggtgtcgtttagactgtccaataaaacagcatcaccgtcaattaaactcttggtggatgatcctatagttgtaaatcctggagaggccataacattagtatgtgttacaacaggaggagagcctgcaccttctctcacctgggtcaggtcctttgggactctgcctgaaaagactgttttgaatggaggaactttgaccatacctgccatcacctcagatgatgctggtacttacagctgcattgccaataataatgtgggaaaccctgcaaaaaagtccaccaacatcattgtgagagcattaaaaaaaggacgattttggatcacaccagatccttatcacaaagatgacaacatccagattggccgtgaggtgaaaatatcttgccaagtagaagctgttccttctgaggagctaacatttagttggtttaaaaatggtcgtccattaagaagttctgagcggatggtcattacacagactgatcctgatgtctctccgggaacaacaaacttggacatcattgatttaaaattcacggattttgggacgtacacatgtgtagcatctctgaagggaggaggaatatctgatatcagtatcgatgttaatatatccagcagcacagttccacccaatctgactgttccacaggaaaaatcaccattggtcaccagagaaggagacacaatagaactgcaatgtcaagtaactggcaaacctaaaccaatcatcctttggtctagagcggataaagaagttgcaatgcctgatggatcaatgcaaatggagagttatgatggaacactgaggattgtgaatgtatctagggaaatgtcaggaatgtacagatgtcagaccagccaatacaatggatttaacgtgaaaccaagggaagccttggtgcagctcatcgttcagtatccccctgcagtggaaccagcattcttggaaatccggcaaggacaggatcgaagtgtcactatgagttgcagagtactgagagcctatccaatacgggtgctgacctatgagtggcgcttgggcaataaattattacggacgggtcaatttgactctcaggaatacacagagtacgctgtgaagagtctttccaatgaaaactatggggtttataactgtagcatcataaatgaagctggagctgggagatgcagctttcttgttacaggaaaggcctatgctccagaattctattatgatacctacaatccagtatggcagaacagacaccgtgtttattcttacagtctacagtggacacagatgaatcctgatgcagtggatcggattgttgcataccggttgggcatcaggcaggctggacagcagcgctggtgggagcaggagattaaaataaatgggaatattcaaaagggagaattaattacatataacttgacagagctaattaaaccagaagcttatgaagtccgactgactcctctcaccaaatttggtgaaggagattcaacaattcgtgtgatcaaatatagtgctcctgtaaatcctcatttgagagaatttcattgtggatttgaagatggtaatatttgtttgttcactcaagatgatacagataattttgactggacaaagcaaagtacagcaacaagaaatacaaaatatactcctaatacaggacctaatgctgaccgtagtggctccaaagaaggtttttatatgtacattgagacatcacgacccagattggaaggcgaaaaggctcgacttctcagccctgttttcagcatagctcccaaaaacccttatggacccacaaacactgcatattgtttcagcttcttttatcacatgtatggacaacatataggtgtcttaaatgtttatctacgtttgaaagggcaaacaacaatagagaatccactgtggtcttcaagtgggaataaaggacaaagatggaatgaggctcatgttaatatatacccaattacttcatttcagctcatttttgaaggtatccgaggtcctggaatagaaggtgacattgctattgatgatgtatcaattgcagaaggagaatgtgcaaaacaagacctagcaactaagaattccgttgatggtgctgttgggattttggttcatatatggctttttcccattatcgtcctcatctctatcttaagtcctcgaaggtgaccttatcctggcagaggctataaaagattcaccaggcactggcatgaagaaagagtctttgtaaatggacattgaacaaacaaactaccaaagattcctccactgactactgactcaaaaataaaataataaaaacaaatttttttaagcactggggataaaaagacatcatggaagtataacttattccagactaaacataaaagataatcttgacctgagtagagaagagaccttcaggtgcttttgtggctaaaaagattacagcgtcatctggttgaactctggaaaaaaaaaaaaaaatgaaaaaaagaaaaaaaaaagagctatagaaatccttgtcaaagcacaaagtcatggctggttttgtttcaaatgaatagtttgcttgttaccatggaaacctaatggcctgccaacaaaaacctcactgtaaacagggtacgtgaagagctggcatttattttccttacgagaaggttttcgtagagaattaaataaatgtaggcccttttacctttggctgttacccttccttgaaaataacccgaactcagaattatttaaagcattcatgtttctccccaccttatccccatcccacctttattattattatttttctcccatggctaagctagataactgtatgctgtctctttttgcatgcactactatccaggatggtaaacctgggcttacatgttacacaggcttatcggagtttgcttgcggccacttgaacacccaaactacgtcatctgttccaatgaagaaaccaaaccaccatcttttataaattgccatggaaaccaagtgccttcaatgaaacaagcctgaataattttcaactcagaagcttgcactgctaagagtggtttgtgtaaaactattttataaacaaactacagagcctaaatgtgcaaattacaggcaagacaacaaagccgcttctgaagaagaaaggaccgaagctgctgcgtaagcccatgcagacaagatatttgttgtttaacctcctagacagccatggcctttcggcttattgtccattagaaaatcacttccattgagaccagacatggagcaacactttttttcttccaggttattaaatgggtcaaccagagcaaaaggttattaagaatacttagtgcagaaggtggtaaaacacaaaagtgatttttttactctaacctccatttgaaatgaaattggccctagctttagagggaacaagaaaatgtttgggattgcagtgcatactaactctacagtggaactgggcctgaaaaatctggctttattctaaactctgagggtaatatgcctctgccctttagtcagactctgtgcaaattgtgaaatattattttattattttaccaagattataaaaacacttttacaaaaaaacaaaaacctgtaaaaataattttgagctacctgacgacaaatcatatctttaaccagccagttttccaatgcattgtaaatttcacttaaacctgttggttatgaaaatttgaagatcattttccttaaattatctcagcttttaacttcatttaaaaagacttttgtctaagaagaatattattattatatgttctttcaacaccccaggattaaaaaaactgattatgcaagcaattggaatataagtattaaattatagcatttgcaaatattaatataaaagcacaacaaaatgtagtggaaaatgacaaagcttgttttttaaaacaattctgtagaaatgtttgtgcaaattcagtaattcaacttaaaatataattttacagctatgttcaataaagcctctttccaggtaaggtatgacaagcagtatgtgtgtttgttgagcaatgttcacttatcactaaaatgaaattagttatacaatttattggttaccatgggataaatcttcagtgctccacataccttaatgtctgcagaaagaaattttaataggaactccctgatgcactcccctatattgtaatacatgcagaaagcagttaaacctttgaaggtaaaatatgaaacatatatgaacctggaatttaatgtctattttcagtcagttcaaaaggggaccagtttgaatatttaggtagtgatggaattgatctgaaccaagtcctttaaattaaacataataaacaaatgagtttcataacttatttgaatgaattagacatcttaaaattttttcagagtttcacagtaacccatatactttatcagaccaaagagattcaagtacacaatatctggggcatttcttttacgttttacaaaa

SEQ ID NO: 42732 - DNA, 3078 bp, Artificial Sequence
  derived and/or modified sequence
atgagcgtgtggagcgccggcctgctgcggagcgcccggcggcggagacggggacggacagacggccggagatttcttctaagaagggcagtgccagggcacctcggccttgccagagctcgggtcgaaagggcctggctggccgcgggactacttaaggtgccacttcggacaccgtgggccggttacgtgcacgtgcacgtgaagatggacctcttgtacgggttagtatggctgttgaccgttctgctggagggtataagcggacagggcgtttacgcccctcctaccgttagaattgtgcacagcgggttggcatgtaacattgaagaggagagatactcagagcgcgtttacaccatccgggagggggaaaccctggagctgacttgcctcgtcactgggcaccctcggccgcagattcgatggacaaagaccgctgggtccgccagcgacagatttcaagatagtagcgtgtttaacgagacccttaggattaccaatatccagagacatcaggggggaaggtattactgtaaggcagaaaacggtctgggcagtcctgcgattaaatcgatacgcgtagacgtgtattacctagacgatcccgtggtgacagtgcaccagagcatcggagaagctaaagaacagttctactatgaaaggaccgtgttcttgaggtgtgtggctaatagtaatcccccggtaagatacagctggaggagaggccaagaggtcctgctgcagggctctgacaagggggtggagatttacgaaccgttcttcacacaaggagagactaagattctcaaactcaaaaatctgagacctcaggactacgccaactattcctgcattgcgtccgtgcgcaatgtatgcaacataccggacaaaatggtgagtttcagactgtctaacaaaactgcatccccatcgatcaaactgctggtggacgatcccatcgtggtgaatccgggggaggctattacgcttgtctgcgtgactaccggcggcgaacctgccccaagcctcacttgggtgagatcgttcggtactctgcccgaaaaaacagtcctgaatggggggaccctcacaattcccgccatcactagcgacgatgctggcacgtacagttgtatagccaacaacaacgtcgggaaccccgcgaaaaagtcaacgaacatcatcgtgagagcgctcaagaagggacggttctggataacacctgatccttatcataaggatgataatattcagatcgggagagaggtgaaaatctcctgtcaggttgaggccgtgccttcggaggagctcacatttagttggtttaagaatggaagaccactgagatcttccgagaggatggtaattacacaaacggaccccgacgtaagtccaggaacgaccaatctggacatcattgatctgaagtttactgatttcggaacatatacgtgcgtagccagcctgaaaggaggggggattagtgacatttccatcgatgtgaacataagttcatctaccgtcccacctaatctgacagtccctcaggaaaagtctccgctggtaacgcgagagggagataccatagaactacagtgtcaggtgaccggcaaacccaagccgatcattctgtggtctagagccgacaaagaggtggctatgcccgacggaagcatgcagatggaaagctatgacggaaccctgaggattgtgaatgtctcccgagagatgtccggcatgtataggtgccagacttcacagtacaatggatttaacgtgaaacctagagaagcattggttcaattaattgtgcagtatccaccagccgtcgagcccgcgttcttagagataaggcaggggcaggaccggtcagtgaccatgagttgtcgcgtccttagggcataccctattagagtgttaacctacgaatggcggctgggcaacaagctgctgcggaccggccagttcgatagccaggagtacaccgaatacgccgttaagagtttatccaacgagaattacggagtctataattgctccattatcaatgaagccggcgctggtaggtgctcatttctcgtgaccggaaaagcttacgcccctgaattctattacgacacatacaatccagtttggcagaatcggcatcgtgtgtattcctactcactgcagtggacccagatgaatcccgatgctgtcgatcgcatcgtggcttatcggctcggcataagacaagccggacagcagaggtggtgggaacaagagatcaaaatcaatggcaatatccaaaaaggagaactgattacctataatctgaccgaacttatcaaacccgaggcctacgaggtgcgcctgactcccctcacgaagtttggggagggtgactccacaatccgggtgatcaaatactccgcgcccgtcaacccccatcttcgggagtttcattgcggcttcgaggacggtaatatttgcctcttcacccaggacgacacggacaatttcgattggacaaagcaaagcactgctaccagaaatactaaatacacccctaacactggtcctaacgcagaccggtcaggctctaaggagggcttttatatgtacatagaaaccagtcggccacggctcgaaggagaaaaggcacgccttttatcgcccgtattctctattgcaccgaaaaacccgtacggccctacgaacactgcctattgtttcagtttcttctaccacatgtatggacagcatatcggcgtacttaacgtgtatctgcggctgaaggggcagactaccatcgagaaccccctctggtcctccagcggcaataaagggcagaggtggaatgaagctcacgtgaacatttaccccattacttcattccagctcatttttgagggaatcagagggcctggcatcgagggagacatcgccatcgacgatgtgtcaattgcagaaggggagtgcgccaagcaggacctggccactaagaattctgtggatggcgctgtcggcatcctagtgcacatttggctgtttcctattatcgtgttaatctctatcctgtctccaagacgctag

SEQ ID NO: 42733 - DNA, 2871 bp, Artificial Sequence
  derived and/or modified sequence
atggacctgctgtacggcctggtgtggctgctgaccgtgctgctggaggggattagtggccaaggagtgtatgccccaccaaccgttcggattgtccactcgggattagcctgtaacattgaagaggagcggtatagcgagcgcgtatataccatcagagaaggcgagacactggagctcacctgcctggtaactgggcaccctcggcctcagatacgctggacaaagactgcgggatctgcctccgaccgttttcaggactcctccgtctttaatgagaccctcagaattaccaatattcagcgccaccaggggggccggtactattgtaaggcagagaatgggctgggctcacctgctatcaaaagcattcgggtggacgtttactacctggacgatccagtggtgaccgtgcatcagtccatcggtgaggccaaagagcaattttactatgagcggacagtctttctgcgctgcgtggccaactcaaatcccccggtcaggtattcgtggagaaggggtcaggaagtgcttttgcaaggctctgataagggagtggaaatttacgagcctttctttacccagggcgagacgaagatccttaagctgaagaatttgaggccccaagactatgccaactactcctgcatcgcaagcgttaggaacgtgtgtaacatccccgacaagatggtgagcttccgtctgagcaacaagactgcctccccatctattaagctattggtggatgaccctatcgtagttaaccctggcgaagctataaccctggtgtgtgtaaccaccggcggagaacccgccccatctctgacttgggtgcgatcctttggcacactgcccgagaaaaccgttctcaacggcggcacactgacaatcccagcgatcacgtcagatgacgccgggacatactcctgcattgcgaacaacaacgtgggaaatcctgctaaaaagtccaccaacatcatcgtacgggcgctgaaaaagggtaggttttggatcacaccagacccttaccataaagacgataatattcagatcggccgagaggtcaagatatcttgccaggtcgaggccgtgcccagtgaggaactgactttttcctggtttaagaacggccgacccctccgctcaagtgagagaatggtaattacccagacagaccctgatgtaagccctgggaccaccaatctggatatcatcgacctcaagtttacagatttcgggacatacacgtgcgtcgcgagtttaaaaggaggcggcatcagcgacatctcaatcgacgtgaacatatctagctccacggttcctcctaacctgacggtgccgcaggaaaaatcacccctggttacaagagaaggtgataccatcgagctgcagtgtcaggtgaccggtaaaccaaaaccaattatcttgtggagcagggcagataaggaggtggcaatgcctgacggctcaatgcagatggagtcctacgatggaacgctgcgtatcgtgaatgtgtcccgagagatgagtggcatgtatagatgtcagacatcccaatacaatggctttaatgtaaagccaagggaagctttggtccagctgattgtccagtacccaccagctgtcgagcccgcttttctggaaataagacaaggccaagacagaagcgtgactatgtcctgtagagttttacgcgcttatcccatacgagtactgacgtacgaatggcgcctgggcaacaaactcttgcggaccggccagttcgacagtcaagagtataccgagtatgcagtaaaaagtctgtccaatgaaaattacggtgtgtataattgctctatcataaacgaagccggggcaggacggtgcagtttcttggtcaccggaaaggcttacgcgcctgagttctactacgacacatacaatcccgtgtggcagaaccgacaccgtgtttactcttattccctgcagtggactcagatgaatcctgacgcagttgatagaattgtggcgtatcgcctgggaataaggcaagcaggtcagcagcgctggtgggaacaagagattaagattaacgggaatattcagaagggcgaactcataacctataacctaaccgagcttattaaacccgaagcttatgaggtgcgcttgacaccgctgacaaagttcggtgaaggagactctaccatcagagtgatcaaatactccgcacccgttaatccccatcttcgtgaatttcactgcggattcgaggacgggaatatctgcttatttacccaagatgacacggataactttgactggacgaaacagagcacggctactcggaacactaaatacacccccaacacaggacccaatgccgataggagcggatccaaggaagggttttatatgtatatagaaacatcccgccctagactcgagggggagaaagcacgtttgctaagtcctgtgtttagcatcgcccccaaaaatccctacgggcccaccaatacagcatactgcttcagttttttctaccatatgtacggacaacacattggcgtgcttaacgtttacctgcgattgaaaggacaaactaccattgaaaaccctctctggtcatccagtggaaacaaaggccaaagatggaacgaggctcatgtcaatatttatcccatcacctcgtttcaattgatcttcgaggggatcagaggaccagggatcgaaggagacatcgccatcgatgacgtgtccattgccgagggggagtgtgccaaacaggacctagctaccaagaactctgtagatggtgctgtcgggattctcgtgcatatctggctgttcccaattatcgttttaattagcatcctgtccccaaggaggtag

SEQ ID NO: 42734 - DNA, 3078 bp, Artificial Sequence
  derived and/or modified sequence
atgtctgtttggagcgctgggctccttcggagtgctcgaagaagaaggcgtggccgaactgatggcaggcgatttcttctgcgacgcgctgtgccaggacacctgggtctagcgagggccagagttgagagagcatggttggctgcaggactgctgaaagttcctctgaggacaccctgggcaggctacgtgcatgtccacgttaagatggacttgttatatgggttggtgtggcttctcactgtcctcctggaggggatcagcgggcagggggtgtacgcaccacctaccgtcaggatcgttcatagtggccttgcttgtaacatcgaggaggaacggtatagcgagcgagtctataccatccgcgagggggaaaccttggagctgacatgccttgtgactgggcaccctagacctcagatacgttggacaaagactgccggatccgccagcgaccgatttcaggactcgtcagtcttcaacgagacactcagaatcaccaatatccagcggcaccagggaggcaggtattactgcaaggcggaaaacggactcgggtcccctgcgattaaaagcattagggttgacgtatattacctcgatgacccagtggtaacagtgcaccagtcgatcggcgaggcaaaggagcagttttattatgagcggacagtcttcctgagatgtgtggcaaactctaatccgcctgtgagatatagttggaggagaggccaggaggttctcttgcaggggagtgacaaaggagtggaaatttacgagccgttctttacccagggcgaaacaaaaattctgaagctgaaaaacttgagacctcaagattatgctaattattcttgtatcgcatctgtgaggaacgtgtgcaatatcccagataagatggtgtcatttcggctttcaaacaaaacagcaagcccctcaatcaagttgctggtagacgatccaattgtcgtgaaccctggtgaggctattacattagtttgcgtgaccaccgggggtgaacctgccccttcactgacgtgggtgcgaagctttggcacacttcccgaaaaaactgtcctaaatggcggtaccctcacaatccctgccataacttcagacgacgccggaacctactcttgcattgccaacaacaacgttgggaaccctgccaagaaatcaaccaacataattgtaagagccctcaagaaaggcaggttctggatcacccctgacccttatcacaaggacgacaacatacaaatcggtagagaggtgaagatatcatgccaggtagaagccgtgccttccgaggagctgacctttagctggttcaagaacggaagacccctccgatctagcgaacgtatggtaatcacccagacagatcctgacgtgtcgcctggcacaaccaaccttgacattatcgacctgaaatttacagactttgggacgtatacatgtgttgcctctctgaaaggcggaggaatctctgatatcagtatagatgtgaatattagctcctcaactgtgccacccaacctgaccgtcccacaggagaagagcccacttgtgacacgggagggcgacacaattgagctgcagtgccaagtgactgggaagccaaagcccatcattttatggtctcgtgccgacaaagaggtcgccatgccagatggctctatgcaaatggaaagttacgatggtacactgcggatagtcaatgtttcacgggagatgtccggaatgtacaggtgccagacaagtcaatacaacgggtttaatgtcaaaccaagagaggccctggtacagctgatagtacagtatcccccagctgtcgagcccgcttttctggaaattagacagggtcaggacagaagcgtgactatgtcatgccgggtgctgagagcatatcccatccgggtgttgacttatgagtggagactgggtaacaagctgctccgcacaggtcaattcgacagtcaggaatacacggaatacgccgtgaagtcgctttctaacgagaattacggcgtctataactgcagtataatcaatgaagcaggagctggcaggtgttctttcctcgtgactggaaaagcctacgctcccgagttctactacgacacttacaatcctgtctggcagaacagacaccgagtatactcatatagtctccaatggacccaaatgaatcccgatgcagttgatcgcatcgttgcataccgcctggggatccgacaggcaggtcaacagcgctggtgggaacaggaaatcaaaattaacggaaatattcagaaaggagagttgatcacctataacttgacagagctgattaagccagaagcatatgaggttaggctgacaccattaaccaagtttggggagggagacagcacgataagggtgatcaagtatagcgccccagtgaacccgcatctgcgtgaatttcattgcgggttcgaggacggaaacatctgcctgttcactcaggacgacacagataattttgattggacaaaacagtccacagccacccgtaacaccaaatatactccaaatacagggccaaacgcggatcggtcaggttcaaaggaaggattttacatgtacattgagacttcgaggccccgactggaaggggaaaaagcccgtttactgtcaccagtgttcagtatcgctccgaagaacccctatggaccgaccaacaccgcgtactgcttctccttcttttaccatatgtatggccagcacatcggtgtgctcaacgtgtatctgcggctgaagggacagaccaccatagagaacccactgtggagctcctctggtaataagggccagcgctggaacgaggctcatgttaatatctaccctatcacctccttccaactgatattcgagggtataaggggcccagggattgaaggcgacatcgctatcgacgacgtgtcaatcgccgagggtgaatgcgccaagcaggaccttgctacaaagaactctgtcgatggcgctgtcgggatcctggtccacatttggcttttcccaatcatcgtactgatttcaattctgtcccctagacggtag

SEQ ID NO: 42735 - DNA, 2871 bp, Artificial Sequence
  derived and/or modified sequence
atggacctgctttacggcctcgtctggttattgactgtcctgctcgagggaattagcggacaaggcgtctatgccccacctacagtcagaatcgttcacagtggactagcatgtaacattgaagaagagcggtattccgaaagagtgtacaccatccgcgagggggagaccctggaactcacttgtctcgtcaccggccacccacggccacagatacgatggaccaaaacagctggaagcgcaagcgacagattccaagattcctctgtctttaatgagacactccgcataactaacattcagcggcaccagggaggcagatattattgtaaagccgagaatggattgggctcgccagccatcaagagcattcgagtagatgtctactacctcgatgacccagtcgtgaccgtgcatcagtcaatcggtgaggccaaagagcagttctattatgaacggaccgtattccttcgctgtgttgctaactcgaatcctccagtgaggtattcctggcgacgtggacaagaagtgctgctgcagggctccgataaaggcgtcgagatctacgaacctttctttacccaaggcgaaacaaaaatcctgaagctgaaaaaccttcgccctcaggattacgccaattactcctgtatcgccagcgtgcggaacgtttgtaacatccccgataaaatggtgtccttccgcctgagcaataaaaccgcttctcccagcataaagctgcttgtggatgaccctattgtggttaacccaggagaagctattactctcgtgtgtgtaacaacaggcggtgagcccgcaccaagcctgacgtgggttaggagcttcgggacgttacctgagaagaccgtgctgaatggcggaactcttacaattccagctataacgagtgatgacgctggcacatattcttgcatcgctaacaataatgtgggaaaccccgctaagaagtctacgaacataattgtccgggcactgaaaaagggccgtttctggatcactccagatccatatcacaaagatgataatatacaaattgggcgagaggtgaaaataagctgtcaggtcgaagccgttccatcggaagagttgacattctcctggttcaaaaatggtcgccctctgcgttcctcagagagaatggtgattacacagaccgatcctgacgtgtcgcctggaaccacaaacttagacatcatagatttgaagttcactgattttggtacatacacttgtgttgccagtctgaaaggtggcggaatatctgacatctcaatagatgttaatatctcatcatctacagtaccccctaacctaactgtgcctcaggagaagagccccctggttacaagggaaggggacacaattgaacttcagtgtcaagtaacaggcaagcccaaacccattattttgtggtctcgagctgacaaggaggtcgcaatgccagacggatcaatgcagatggaatcctatgatggcacgttacggatcgtgaatgtgagtagagaaatgtcaggaatgtaccgctgccagaccagccagtacaacggtttcaacgtcaaacctcgagaggcattggttcaactgatcgtacagtatcctccggctgtagaaccagcatttctagaaattcggcagggacaggatcgttccgtgacaatgagctgtcgggtgctgcgtgcatacccaatccgagtgctaacttacgaatggcgactgggcaacaaactactccgcaccggacagtttgatagtcaggaatacaccgagtatgccgttaagagcctgtcaaatgaaaattatggggtctacaactgttcgatcattaacgaagctggagctggcaggtgctcattccttgtcaccggaaaggcttacgcacccgaattttactacgatacctacaacccggtctggcagaacaggcaccgtgtgtattcatactccctacagtggactcagatgaatccagatgccgtggaccggatcgtcgcgtaccggttaggcattcgccaagctggtcagcagagatggtgggaacaagaaattaagataaatggtaacatccaaaaaggagagctgatcacctacaacctcaccgagcttataaaaccagaggcgtatgaagtcaggctgacacccctcactaaatttggcgagggcgacagcacaattcgggtcattaaatacagcgcaccagtgaacccacatctgagggaatttcactgcggtttcgaagacgggaacatctgcctgttcacgcaggacgatactgataactttgactggactaaacagtccacagcaactaggaataccaaatacactcctaacactggcccaaatgcagaccgctccgggagtaaggaaggtttctatatgtatatcgaaacctctagaccaaggcttgagggagaaaaggctcggctgctctcacctgtattctcgatagctcccaaaaatccctatggccctacaaacacagcttactgcttcagcttcttttatcatatgtacggtcagcacatcggcgttctcaacgtgtacctgagactcaaggggcagacaacaattgagaaccctctctggagttcttcaggaaataagggacagagatggaacgaggcccatgtcaatatctaccccatcaccagtttccagctcatctttgaggggattcgcggacctggcatcgaaggggacatcgctattgacgacgtctctatcgccgaaggcgaatgcgccaaacaagacttggcaaccaagaatagcgtggatggagccgtcgggatcctggtgcatatctggctgtttcctatcatcgtgttaatttctatcttgagtcctagacgctag

SEQ ID NO: 42736 - DNA, 3078 bp, Artificial Sequence
  derived and/or modified sequence
atgagcgtgtggagcgccggcctgctgagaagcgccagaagaagaagaagaggcagaaccgacggcagaagattcctgctgagaagagccgtgcccggccacctgggcctggccagagccagagtggagagagcctggctggccgccggcctgctgaaggtgcccctgagaaccccctgggccggctacgtgcacgtgcacgtgaagatggacctgctgtacggcctggtgtggctgctgaccgtgctgctggagggcatcagcggccagggcgtgtacgccccccccaccgtgagaatcgtgcacagcggcctggcctgcaacatcgaggaggagagatacagcgagagagtgtacaccatcagagagggcgagaccctggagctgacctgcctggtgaccggccaccccagaccccagatcagatggaccaagaccgccggcagcgccagcgacagattccaggacagcagcgtgttcaacgagaccctgagaatcaccaacatccagagacaccagggcggcagatactactgcaaggccgagaacggcctgggcagccccgccatcaagagcatcagagtggacgtgtactacctggacgaccccgtggtgaccgtgcaccagagcatcggcgaggccaaggagcagttctactacgagagaaccgtgttcctgagatgcgtggccaacagcaacccccccgtgagatacagctggagaagaggccaggaggtgctgctgcagggcagcgacaagggcgtggagatctacgagcccttcttcacccagggcgagaccaagatcctgaagctgaagaacctgagaccccaggactacgccaactacagctgcatcgccagcgtgagaaacgtgtgcaacatccccgacaagatggtgagcttcagactgagcaacaagaccgccagccccagcatcaagctgctggtggacgaccccatcgtggtgaaccccggcgaggccatcaccctggtgtgcgtgaccaccggcggcgagcccgcccccagcctgacctgggtgagaagcttcggcaccctgcccgagaagaccgtgctgaacggcggcaccctgaccatccccgccatcaccagcgacgacgccggcacctacagctgcatcgccaacaacaacgtgggcaaccccgccaagaagagcaccaacatcatcgtgagagccctgaagaagggcagattctggatcacccccgacccctaccacaaggacgacaacatccagatcggcagagaggtgaagatcagctgccaggtggaggccgtgcccagcgaggagctgaccttcagctggttcaagaacggcagacccctgagaagcagcgagagaatggtgatcacccagaccgaccccgacgtgagccccggcaccaccaacctggacatcatcgacctgaagttcaccgacttcggcacctacacctgcgtggccagcctgaagggcggcggcatcagcgacatcagcatcgacgtgaacatcagcagcagcaccgtgccccccaacctgaccgtgccccaggagaagagccccctggtgaccagagagggcgacaccatcgagctgcagtgccaggtgaccggcaagcccaagcccatcatcctgtggagcagagccgacaaggaggtggccatgcccgacggcagcatgcagatggagagctacgacggcaccctgagaatcgtgaacgtgagcagagagatgagcggcatgtacagatgccagaccagccagtacaacggcttcaacgtgaagcccagagaggccctggtgcagctgatcgtgcagtacccccccgccgtggagcccgccttcctggagatcagacagggccaggacagaagcgtgaccatgagctgcagagtgctgagagcctaccccatcagagtgctgacctacgagtggagactgggcaacaagctgctgagaaccggccagttcgacagccaggagtacaccgagtacgccgtgaagagcctgagcaacgagaactacggcgtgtacaactgcagcatcatcaacgaggccggcgccggcagatgcagcttcctggtgaccggcaaggcctacgcccccgagttctactacgacacctacaaccccgtgtggcagaacagacacagagtgtacagctacagcctgcagtggacccagatgaaccccgacgccgtggacagaatcgtggcctacagactgggcatcagacaggccggccagcagagatggtgggagcaggagatcaagatcaacggcaacatccagaagggcgagctgatcacctacaacctgaccgagctgatcaagcccgaggcctacgaggtgagactgacccccctgaccaagttcggcgagggcgacagcaccatcagagtgatcaagtacagcgcccccgtgaacccccacctgagagagttccactgcggcttcgaggacggcaacatctgcctgttcacccaggacgacaccgacaacttcgactggaccaagcagagcaccgccaccagaaacaccaagtacacccccaacaccggccccaacgccgacagaagcggcagcaaggagggcttctacatgtacatcgagaccagcagacccagactggagggcgagaaggccagactgctgagccccgtgttcagcatcgcccccaagaacccctacggccccaccaacaccgcctactgcttcagcttcttctaccacatgtacggccagcacatcggcgtgctgaacgtgtacctgagactgaagggccagaccaccatcgagaaccccctgtggagcagcagcggcaacaagggccagagatggaacgaggcccacgtgaacatctaccccatcaccagcttccagctgatcttcgagggcatcagaggccccggcatcgagggcgacatcgccatcgacgacgtgagcatcgccgagggcgagtgcgccaagcaggacctggccaccaagaacagcgtggacggcgccgtgggcatcctggtgcacatctggctgttccccatcatcgtgctgatcagcatcctgagccccagaagatag

SEQ ID NO: 42737 - DNA, 2871 bp, Artificial Sequence
  derived and/or modified sequence
atggacctgctgtacggcctggtgtggctgctgaccgtgctgctggagggcatcagcggccagggcgtgtacgccccccccaccgtgagaatcgtgcacagcggcctggcctgcaacatcgaggaggagagatacagcgagagagtgtacaccatcagagagggcgagaccctggagctgacctgcctggtgaccggccaccccagaccccagatcagatggaccaagaccgccggcagcgccagcgacagattccaggacagcagcgtgttcaacgagaccctgagaatcaccaacatccagagacaccagggcggcagatactactgcaaggccgagaacggcctgggcagccccgccatcaagagcatcagagtggacgtgtactacctggacgaccccgtggtgaccgtgcaccagagcatcggcgaggccaaggagcagttctactacgagagaaccgtgttcctgagatgcgtggccaacagcaacccccccgtgagatacagctggagaagaggccaggaggtgctgctgcagggcagcgacaagggcgtggagatctacgagcccttcttcacccagggcgagaccaagatcctgaagctgaagaacctgagaccccaggactacgccaactacagctgcatcgccagcgtgagaaacgtgtgcaacatccccgacaagatggtgagcttcagactgagcaacaagaccgccagccccagcatcaagctgctggtggacgaccccatcgtggtgaaccccggcgaggccatcaccctggtgtgcgtgaccaccggcggcgagcccgcccccagcctgacctgggtgagaagcttcggcaccctgcccgagaagaccgtgctgaacggcggcaccctgaccatccccgccatcaccagcgacgacgccggcacctacagctgcatcgccaacaacaacgtgggcaaccccgccaagaagagcaccaacatcatcgtgagagccctgaagaagggcagattctggatcacccccgacccctaccacaaggacgacaacatccagatcggcagagaggtgaagatcagctgccaggtggaggccgtgcccagcgaggagctgaccttcagctggttcaagaacggcagacccctgagaagcagcgagagaatggtgatcacccagaccgaccccgacgtgagccccggcaccaccaacctggacatcatcgacctgaagttcaccgacttcggcacctacacctgcgtggccagcctgaagggcggcggcatcagcgacatcagcatcgacgtgaacatcagcagcagcaccgtgccccccaacctgaccgtgccccaggagaagagccccctggtgaccagagagggcgacaccatcgagctgcagtgccaggtgaccggcaagcccaagcccatcatcctgtggagcagagccgacaaggaggtggccatgcccgacggcagcatgcagatggagagctacgacggcaccctgagaatcgtgaacgtgagcagagagatgagcggcatgtacagatgccagaccagccagtacaacggcttcaacgtgaagcccagagaggccctggtgcagctgatcgtgcagtacccccccgccgtggagcccgccttcctggagatcagacagggccaggacagaagcgtgaccatgagctgcagagtgctgagagcctaccccatcagagtgctgacctacgagtggagactgggcaacaagctgctgagaaccggccagttcgacagccaggagtacaccgagtacgccgtgaagagcctgagcaacgagaactacggcgtgtacaactgcagcatcatcaacgaggccggcgccggcagatgcagcttcctggtgaccggcaaggcctacgcccccgagttctactacgacacctacaaccccgtgtggcagaacagacacagagtgtacagctacagcctgcagtggacccagatgaaccccgacgccgtggacagaatcgtggcctacagactgggcatcagacaggccggccagcagagatggtgggagcaggagatcaagatcaacggcaacatccagaagggcgagctgatcacctacaacctgaccgagctgatcaagcccgaggcctacgaggtgagactgacccccctgaccaagttcggcgagggcgacagcaccatcagagtgatcaagtacagcgcccccgtgaacccccacctgagagagttccactgcggcttcgaggacggcaacatctgcctgttcacccaggacgacaccgacaacttcgactggaccaagcagagcaccgccaccagaaacaccaagtacacccccaacaccggccccaacgccgacagaagcggcagcaaggagggcttctacatgtacatcgagaccagcagacccagactggagggcgagaaggccagactgctgagccccgtgttcagcatcgcccccaagaacccctacggccccaccaacaccgcctactgcttcagcttcttctaccacatgtacggccagcacatcggcgtgctgaacgtgtacctgagactgaagggccagaccaccatcgagaaccccctgtggagcagcagcggcaacaagggccagagatggaacgaggcccacgtgaacatctaccccatcaccagcttccagctgatcttcgagggcatcagaggccccggcatcgagggcgacatcgccatcgacgacgtgagcatcgccgagggcgagtgcgccaagcaggacctggccaccaagaacagcgtggacggcgccgtgggcatcctggtgcacatctggctgttccccatcatcgtgctgatcagcatcctgagccccagaagatag

SEQ ID NO: 42738 - protein, 803 aa, Artificial Sequence
  derived and/or modified sequence
MNSAEQTVTWLITLGVLESPKKTISDPEGFLQASLKDGVVLCRLLERLLPGTIEKVYPEPRSESECLSNIREFLRGCGASLRLELLFPPSQPPQHLVTTILLSASTFDANDLYQGQNFNKVLSSLVTLNKVTADIGLGSDSVCARPSSHRIKSFDSLGSQSLHTRTSKLFQGQYRSLDMTDNSNNQLVVRAKFNFQQTNEDELSFSKGDVIHVTRVEEGGWWEGTLNGRTGWFPSNYVREVKASEKPVSPKSGTLKSPPKGFDTTAINKSYYNVVLQNILETENEYSKELQTVLSTYLRPLQTSEKLSSANISYLMGNLEEICSFQQMLVQSLEECTKLPEAQQRVGGCFLNLMPQMKTLYLTYCANHPSAVNVLTEHSEELGEFMETKGASSPGILVLTTGLSKPFMRLDKYPTLLKELERHMEDYHTDRQDIQKSMAAFKNLSAQCQEVRKRKELELQILTEAIRNWEGDDIKTLGNVTYMSQVLIQCAGSEEKNERYLLLFPNVLLMLSASPRMSGFIYQGKLPTTGMTITKLEDSENHRNAFEISGSMIERILVSCNNQQDLQEWVEHLQKQTKVTSVGNPTIKPHSVPSHTLPSHPVTPSSKHADSKPAPLTPAYHTLPHPSHHGTPHTTINWGPLEPPKTPKPWSLSCLRPAPPLRPSAALCYKEDLSKSPKTMKKLLPKRKPERKPSDEEFASRKSTAALEEDAQILKVIEAYCTSAKTRQTLNSTWQGTDLMHNHVLADDDQPSLDSLGRRSSLSRLEPSDLSEDSDYDSIWTAHSYRMGSTSRKSCCSYISHQN

SEQ ID NO: 42739 - protein, 66 aa, Artificial Sequence
  derived and/or modified sequence
MTDNSNNQLVVRAKFNFQQTNEDELSFSKGDVIHVTRVEEGGWWEGTLNGRTGWFPSNYVREVKAS

SEQ ID NO: 42740 - protein, 61 aa, Artificial Sequence
  derived and/or modified sequence
MTDNSNNQLVVRAKFNFQQTNEDELSFSKGDVIHVTRVEEGGWWEGTLNGRTGWFPSNYVR

SEQ ID NO: 42741 - DNA, 2412 bp, Artificial Sequence
  derived and/or modified sequence
atgaacagcgccgagcagaccgtgacctggctgatcaccctgggcgtgctggagagccccaagaagaccatcagcgaccccgagggcttcctgcaggccagcctgaaggacggcgtggtgctgtgcagactgctggagagactgctgcccggcaccatcgagaaggtgtaccccgagcccagaagcgagagcgagtgcctgagcaacatcagagagttcctgagaggctgcggcgccagcctgagactggagctgctgttcccccccagccagcccccccagcacctggtgaccaccatcctgctgagcgccagcaccttcgacgccaacgacctgtaccagggccagaacttcaacaaggtgctgagcagcctggtgaccctgaacaaggtgaccgccgacatcggcctgggcagcgacagcgtgtgcgccagacccagcagccacagaatcaagagcttcgacagcctgggcagccagagcctgcacaccagaaccagcaagctgttccagggccagtacagaagcctggacatgaccgacaacagcaacaaccagctggtggtgagagccaagttcaacttccagcagaccaacgaggacgagctgagcttcagcaagggcgacgtgatccacgtgaccagagtggaggagggcggctggtgggagggcaccctgaacggcagaaccggctggttccccagcaactacgtgagagaggtgaaggccagcgagaagcccgtgagccccaagagcggcaccctgaagagcccccccaagggcttcgacaccaccgccatcaacaagagctactacaacgtggtgctgcagaacatcctggagaccgagaacgagtacagcaaggagctgcagaccgtgctgagcacctacctgagacccctgcagaccagcgagaagctgagcagcgccaacatcagctacctgatgggcaacctggaggagatctgcagcttccagcagatgctggtgcagagcctggaggagtgcaccaagctgcccgaggcccagcagagagtgggcggctgcttcctgaacctgatgccccagatgaagaccctgtacctgacctactgcgccaaccaccccagcgccgtgaacgtgctgaccgagcacagcgaggagctgggcgagttcatggagaccaagggcgccagcagccccggcatcctggtgctgaccaccggcctgagcaagcccttcatgagactggacaagtaccccaccctgctgaaggagctggagagacacatggaggactaccacaccgacagacaggacatccagaagagcatggccgccttcaagaacctgagcgcccagtgccaggaggtgagaaagagaaaggagctggagctgcagatcctgaccgaggccatcagaaactgggagggcgacgacatcaagaccctgggcaacgtgacctacatgagccaggtgctgatccagtgcgccggcagcgaggagaagaacgagagatacctgctgctgttccccaacgtgctgctgatgctgagcgccagccccagaatgagcggcttcatctaccagggcaagctgcccaccaccggcatgaccatcaccaagctggaggacagcgagaaccacagaaacgccttcgagatcagcggcagcatgatcgagagaatcctggtgagctgcaacaaccagcaggacctgcaggagtgggtggagcacctgcagaagcagaccaaggtgaccagcgtgggcaaccccaccatcaagccccacagcgtgcccagccacaccctgcccagccaccccgtgacccccagcagcaagcacgccgacagcaagcccgcccccctgacccccgcctaccacaccctgccccaccccagccaccacggcaccccccacaccaccatcaactggggccccctggagccccccaagacccccaagccctggagcctgagctgcctgagacccgccccccccctgagacccagcgccgccctgtgctacaaggaggacctgagcaagagccccaagaccatgaagaagctgctgcccaagagaaagcccgagagaaagcccagcgacgaggagttcgccagcagaaagagcaccgccgccctggaggaggacgcccagatcctgaaggtgatcgaggcctactgcaccagcgccaagaccagacagaccctgaacagcacctggcagggcaccgacctgatgcacaaccacgtgctggccgacgacgaccagcccagcctggacagcctgggcagaagaagcagcctgagcagactggagcccagcgacctgagcgaggacagcgactacgacagcatctggaccgcccacagctacagaatgggcagcaccagcagaaagagctgctgcagctacatcagccaccagaactag

SEQ ID NO: 42742 - DNA, 2412 bp, Artificial Sequence
  derived and/or modified sequence
atgaatagtgccgaacagactgtgacttggctaattacactgggtgtattggagtcccccaagaagaccatttccgatccggaggggttccttcaggcatctctcaaagatggcgtcgtgctctgcaggctcctggagcggctgctccccggcacgattgagaaagtgtatcccgagcccaggtctgaaagcgaatgcctgtcaaacatccgcgagtttctgaggggatgtggagctagcctgcgcctggaacttctttttccaccatcgcagcccccccaacatctcgtgacgacaatactgttaagcgcctccactttcgacgctaatgacttataccaaggacagaatttcaacaaggtcctgagtagccttgtgacattaaacaaggtcactgcagacatcggactgggttctgactccgtctgcgcaagaccttcctcacaccggattaagtcatttgacagtctcgggagccagtccctgcataccaggacttccaaactgttccagggccagtataggtctctggacatgaccgacaatagcaataaccagctggtggtgagggccaagttcaatttccagcaaaccaatgaagatgaactgagcttctccaagggcgatgttattcacgtaacaagagtagaagagggcggctggtgggagggcactctgaacgggaggactggctggttccctagcaactacgtccgcgaagtgaaagcctcagagaaaccagtgtctcctaaatctggaacgttgaaatccccgccgaaaggattcgacacgacggcgataaacaagagctattataatgtagtactgcagaatatcttggagacggagaacgaatattctaaggagctgcagactgtgctgagcacctatctcagacccttgcagaccagtgaaaaacttagcagtgctaatatttcctatctgatgggcaacctcgaagaaatatgcagcttccagcagatgctagtgcagagcttggaagagtgcacaaaactgccagaggcccaacagagagtaggtgggtgctttttgaatctgatgcctcagatgaagaccctgtaccttacttattgcgccaaccacccctccgccgtgaatgtgttgacagagcactcagaggaactgggtgagtttatggagaccaagggcgctagtagccccggaatcctcgtgcttaccacaggcttgtccaagcctttcatgcggttggataagtatcctacactgcttaaagagctagagagacacatggaggattaccacactgataggcaggatatacaaaagtctatggctgcttttaaaaacctttccgcccagtgccaagaagttcggaaaagaaaggaactcgagctgcagatattgaccgaagcaataagaaattgggaaggcgacgacataaaaacactgggtaatgttacatatatgtctcaggtgctcatccagtgtgccggctctgaggagaagaacgagaggtaccttttgctcttccctaacgtgctgctaatgttatccgcgagcccacgaatgtccgggttcatttaccagggtaaattaccaacaacaggaatgacaataacgaagctggaggactccgagaaccacaggaatgctttcgagatcagcgggtccatgatcgaaagaatactggtgagctgcaacaaccagcaagacctccaagaatgggtagaacacctccagaaacagacgaaggtcacctcagtgggaaacccaacaatcaaaccccactctgtcccgtcccacactctgccgtcacatcccgtgacccccagtagtaaacacgcagattccaaacctgctcctcttacccctgcatatcatacgctcccgcaccccagtcaccacggcactccgcacacaactatcaactggggtcccctggaacccccaaaaacccccaagccctggtctttgtcatgcctgcgtcccgcgccaccactccggccttccgccgccttgtgctacaaagaggatctgtcaaagtcccccaagaccatgaagaagctgctgcctaagaggaaacccgagcggaagccgagtgatgaggagtttgcaagccggaaaagtacggctgcattagaagaagacgcccaaattctgaaagttattgaggcctattgcacttcggccaagaccagacagaccctaaattccacttggcagggaaccgacctcatgcacaaccatgttctagccgatgatgatcagcccagtctcgacagcctggggagaagatcatccctgagtagactcgaaccttctgacctctcagaagacagtgattatgacagtatctggacagcgcattcatatcggatgggctccacaagccggaagtcttgttgttcttacatatcacatcagaattag

SEQ ID NO: 42743 - DNA, 2412 bp, Artificial Sequence
  derived and/or modified sequence
atgaacagcgctgagcagacagtgacctggctgatcaccctgggcgtgctggagagccccaagaagaccatcagtgaccctgagggcttcctgcaggccagcctgaaggatggagtggtgctgtgccgcctgctggagcggctgctgcccggcaccatcgagaaggtgtacccagagcccaggtctgagagtgaatgtctgagcaacatccgggagttcctgcggggctgtggggccagcctgcggctggagctgctcttcccccccagccagcccccccagcacctggtgaccaccatcctgctgagcgccagcacctttgatgccaatgacctgtaccagggccagaacttcaacaaggtgctgagcagcctggtgaccctgaacaaggtgacagctgacatcggcctgggcagtgacagcgtgtgtgcccggcccagcagccaccgcatcaagagctttgacagcctgggcagccagagcctgcacaccaggaccagcaagctgttccagggccagtaccgcagcctggacatgacagacaacagcaacaaccagctggtggtgcgggccaagttcaacttccagcagaccaatgaagatgagctgtccttcagcaaaggagatgtgatccacgtgaccagggtggaggagggcggctggtgggagggcaccctgaatggaagaacaggctggttccccagcaactacgtgcgggaggtgaaggccagcgagaagcctgtgagccccaagagcggcaccctgaagagcccccccaagggctttgacaccacagccatcaacaagagctactacaacgtggtgctgcagaacatcctggagacagaaaatgagtacagcaaggagctgcagacagtgctgagcacctacctgcggcccctgcagaccagcgagaagctgagcagcgccaacatctcctacctgatgggcaacctggaggagatctgcagcttccagcagatgctggtgcagagcctggaggagtgcaccaagctgcctgaggcccagcagagggtgggcggctgcttcctgaacctgatgccccagatgaagaccctgtacctgacctactgtgccaaccaccccagcgctgtgaatgtgctgacagagcacagcgaggagctgggggagttcatggagaccaagggggccagcagccctggcatcctggtgctgaccaccggcctgagcaagcccttcatgaggctggacaagtaccccaccctgctgaaggagctggagcggcacatggaggactaccacacagaccggcaggacatccagaagtccatggccgccttcaagaacctgagcgcccagtgccaggaggtgaggaagaggaaggagctggagctgcagatcctgacagaggccatccggaactgggagggagatgacatcaagaccctgggcaatgtgacctacatgagccaggtgctgatccagtgtgccggcagcgaggagaagaatgaaagatacctgctgctcttccccaacgtgctgctgatgctgagcgccagccccaggatgagcggcttcatctaccagggcaagctgcccaccaccggcatgaccatcaccaagctggaggacagcgagaaccacagaaatgcctttgagatcagcggctccatgattgagcgcatcctggtgtcctgcaacaaccagcaggacctgcaggagtgggtggagcacctgcagaagcagaccaaggtgacctctgtgggcaaccccaccatcaagccccacagcgtgcccagccacaccctgcccagccaccctgtgacccccagcagcaagcatgctgacagcaagccagcccccctgaccccagcctaccacaccctgccccaccccagccaccacggcaccccccacaccaccatcaactggggccccctggagccccccaagacccccaagccctggagcctgagctgcctgcggcctgccccacccctgcggcccagcgctgccctgtgctacaaggaggacctgagcaagagccccaagaccatgaagaagctgctgcccaagaggaagccagagaggaagcccagtgatgaggagtttgccagcaggaagagcacagctgccctggaggaggatgcccagatcctgaaggtgattgaggcctactgcaccagcgccaagacccggcagaccctgaacagcacctggcagggcacagacctgatgcacaaccacgtgctggctgatgatgaccagcccagcctggacagcctgggccgccgcagcagcctgagccggctggagcccagcgacctgtctgaggacagcgactatgacagcatctggacagcccacagctacaggatgggcagcaccagcaggaagagctgctgcagctacatcagccaccagaactag

SEQ ID NO: 42744 - DNA, 2412 bp, Artificial Sequence
  derived and/or modified sequence
atgaacagcgccgagcagaccgtgacctggctgatcaccctgggcgtccttgagtctccaaaaaaaactatcagcgatccagaggggttccttcaggcgagtttaaaggatggcgtcgtactgtgtcgtctgctcgaacggctgctgccaggcaccatagagaaggtctatcctgagccccgcagtgaaagtgagtgtttaagcaacatcagggagttcctgaggggctgcggggcgtccctacgtctggaactcttatttccgccatcacagccaccacagcacctggtgacgaccatactgctcagtgctagtacttttgatgcaaacgacctttatcagggacagaacttcaataaagtgctgtccagccttgttacactcaataaagttactgccgacatcggcctcggcagtgatagcgtgtgtgctaggccaagtagccataggatcaaaagtttcgattcattggggtcccagtctctgcacactaggacctccaagctgttccaggggcaatatagatcacttgacatgaccgataactctaataatcagctggttgttagagctaaattcaatttccagcagacaaatgaagatgagctgagcttctctaaaggggacgttattcatgttactagggtggaggaagggggctggtgggagggtacccttaatggccgcactggctggtttccgtcaaattacgtcagagaggtaaaggcctccgagaagccagtgagtcccaaaagcgggactctaaagagtccccccaagggcttcgataccacggctatcaacaagtcctactacaacgtcgtacttcagaatatcctggagaccgagaatgaatatagcaaagagctgcagacagtcctgagcacctatctcaggcctctgcagacatcagaaaagttaagttccgccaatatctcctatctgatgggaaacctcgaagagatctgctccttccagcagatgctggtgcaatcactggaggagtgtacaaagctgccagaggcgcagcagagagtgggtgggtgcttcttgaacctcatgccgcagatgaagactctctatctaacctattgcgccaatcatccatccgctgtgaacgtgctgactgagcactctgaagagctgggcgagtttatggagacaaaaggggcttcctcaccaggcattctcgtgctgaccactgggctgagcaagccttttatgcgcctggataagtacccaacactgctgaaggaattggagcgccacatggaagactatcacactgacagacaggatatccagaagagcatggcggcattcaagaatttgagtgcccagtgccaggaggtccgaaagcgcaaagaattggaactccagatcctgacggaagcaatccgcaattgggaaggggacgacatcaagacactgggcaatgtgacgtatatgagtcaggtgcttatccagtgcgcgggatctgaagagaagaatgagagatatctccttctgtttcccaacgtcttattgatgctcagcgcatcaccgcgaatgtcaggcttcatttaccaagggaagcttcccaccactggaatgacgattaccaagcttgaagattctgagaaccatcgtaacgcctttgaaatttccggaagcatgattgagaggatcttagtctcatgcaataaccaacaggatctccaggaatgggtcgaacatttacagaaacagacgaaagtgacgagtgtgggcaaccccaccatcaaaccccactcagtgcctagccatacactgccaagccacccagtcactccatcatcgaagcacgctgactccaaacctgcacccttaactcctgcctaccacaccctgccacacccgtcgcatcatggaacacctcacacaacaatcaactggggcccgcttgaaccgcccaaaacccctaaaccatggtcactcagctgtttaagacctgcccctcccctccggcccagcgctgctttatgttataaggaggacctgtctaagagccctaaaaccatgaaaaagttgttgccaaagagaaagcccgaacggaaaccctccgacgaggaattcgcctcacgaaaaagtacagcagcgttggaagaggacgctcagattctcaaggtgattgaagcttattgcacgtccgcaaagaccagacaaacactaaacagtacatggcaggggaccgatcttatgcacaatcacgttcttgctgacgatgaccagccaagcctggattctctcggacgacgctcaagtttatcccggttggaaccaagtgatctgtccgaggattcagattatgacagcatatggaccgcacattcatacagaatgggctcaacatcacgaaagtcctgctgttcctacatttcacatcagaactag

SEQ ID NO: 42745 - DNA, 2412 bp, Artificial Sequence
  derived and/or modified sequence
atgaattccgccgagcagaccgtgacctggctaattacgctcggagtcctagaatccccaaagaaaactatcagcgaccccgaaggtttcctgcaggccagcctcaaagatggggtcgtattatgcagattgcttgagagactgctccccggtaccattgagaaggtctatccggaaccaaggagcgagagtgaatgtctgtctaacatccgcgaatttctcaggggctgtggagcatcactgaggctggagctgctattccctccttctcagcccccacagcacttggttaccaccatactgctgagtgcgagtacattcgacgccaacgacctctatcaaggacagaactttaacaaagttcttagttccctcgtgacacttaacaaggtgactgctgacataggcctgggttccgattctgtgtgcgccagacccagcagtcatagaatcaagtcgttcgacagcctaggatcgcagtccctccacacacggacaagtaagctcttccagggacaatacaggagcctcgacatgacagacaactcaaataatcagctcgtggtgagggcgaagtttaattttcaacagacgaatgaggacgaactttccttctctaagggggatgtcattcacgtcacacgagtcgaagagggaggttggtgggaaggaacgctcaatggaagaaccggctggttcccatccaattatgtccgagaggttaaggcaagtgagaaaccagtaagccccaaaagtgggacactcaagtctccacctaagggattcgacaccactgctataaataaaagctactataatgtcgtgctccagaacattcttgagactgagaacgagtacagcaaggaactacagactgtgctatcgacctatttacgcccattgcagacgtcagagaaattgagcagtgcgaacataagctacctcatgggaaacctggaggaaatctgttcttttcagcagatgctcgttcagtctctggaggagtgcacaaaattgcccgaagctcagcagagagtgggagggtgtttcctgaacctgatgccgcagatgaagaccctgtacttaacgtattgcgccaaccatccctctgccgtgaatgtgctgacagaacacagtgaggagttgggcgagtttatggagactaaaggcgcaagtagccccggaatactggtactcaccaccgggctttctaagccattcatgagactcgataagtatcctaccctcctgaaggagctggaacgccatatggaagactaccatactgatcgacaggacatccagaagtcaatggcggcttttaagaacctaagcgctcaatgtcaggaggtccggaaacgaaaggaactggagctccaaatcctgacagaggccatcaggaactgggaaggcgacgacattaagacactgggaaacgtgacttatatgtcgcaggtgttgatccaatgcgccggatctgaggagaaaaatgaacggtacttactgcttttcccaaatgtgctgctgatgctctctgcatctccacggatgtcaggtttcatatatcagggcaaacttcctacaaccggaatgaccattaccaagttggaagatagcgaaaaccatcggaacgcgttcgaaatatccggttccatgattgagcgaattttagtgagctgtaataaccagcaggatctccaggaatgggtggaacatctacaaaaacagaccaaagtgaccagtgtcgggaatccaacaatcaaaccacattctgtgccgtctcataccctgccatcccacccggtgacaccaagtagtaagcacgctgatagtaagccagcacctctcactcctgcttaccatacattaccgcaccctagccaccacgggacacctcacaccacaataaattggggacccctggagcctcctaaaactccaaaaccatggtcactgtcttgcttaaggcccgctccccctttacgaccaagtgccgcactatgttataaggaagacttatctaagagccccaagacgatgaaaaaacttctgccaaagcgcaaaccggaacgtaagcctagcgacgaagagttcgcctcccggaagagtaccgcagcattggaggaagatgctcagattttaaaggtcatagaggcatactgcacctccgcaaagacccgccaaacgttgaattctacttggcagggtacggacctgatgcataatcatgttctggccgacgacgaccagcctagtctggacagtctcggcagaagatcctctctatctagacttgagccttccgacctgtcagaagattctgactacgattctatttggactgcacacagttacaggatggggagcacaagtaggaaaagctgctgcagttatattagccaccaaaattag

SEQ ID NO: 42746 - DNA, 5525 bp, Artificial Sequence
  derived and/or modified sequence
gcggccgaggccggggggcggcggcgggcgcccgcaggttcccgagccgctcctgagaaggcgcctgacagcgggccggggcgcacggagaagcgggccgggccggacctgctgggccgcgccgagccaatcgccggcgccggccgctcgatgggcgaggcggcggcggcggcggcgggggccgcgggccgggccgccgctccgaggtgaaggcgcgcgcccctccccgcctgcctcccgggccgcagcgatgaattccgccgagcaaaccgttacgtggctcatcactctgggggtgctggagtcgcccaaaaaaaccatctcggacccggagggctttctgcaggcgtcgctgaaggatggggtggtcctctgcaggctgctggagcgcctgctccccgggaccatcgagaaagtctaccccgagccccggagcgagagcgagtgcctgagcaacatccgcgagttcctgcgcggctgcggggcttccctgcggctggagctcctgtttcctccttcccagcctcctcagcatctggtaaccaccattctcttgtctgcttctacgtttgatgcaaatgatttgtatcaggggcagaattttaacaaggtcctcagttccttagtgactctaaataaagtaacagcagacatcgggctggggagtgactccgtgtgtgcccggccctcgtctcaccgcataaagtcttttgactcccttggatcacagtctttgcacactcggacttcaaaactgttccagggccagtatcggagtttggacatgaccgataatagcaacaatcaactggtagtaagagcaaagtttaacttccagcagaccaatgaggacgagctttccttctcaaaaggagacgtcatccatgtcacccgtgtggaagagggaggctggtgggagggcacactcaacggccggaccggctggttccccagcaactacgtgcgcgaggtcaaggccagcgagaagcctgtgtctcccaaatcaggaacactgaagagccctcccaaaggatttgatacgactgccataaacaaaagctattacaatgtggtgctacagaatattttagaaacagaaaatgaatattctaaagaacttcagactgtgctttcaacgtacctacggccattgcagaccagtgagaagttaagttcagcaaacatttcatatttaatgggaaatctagaagaaatatgttctttccagcaaatgctcgtacagtctttagaagaatgcaccaagttgcccgaagctcagcagagagtcggaggctgctttttaaacctgatgccacagatgaaaaccctgtacctcacgtattgtgccaatcacccttctgcagtgaatgtcctcacggaacacagtgaggagttgggggagttcatggagaccaaaggtgccagcagccctgggattctcgtgctgaccacgggcctgagcaaacccttcatgcgcctggataaataccctacgctgctcaaagagctcgagagacacatggaggattatcatacagatagacaagatattcaaaaatccatggctgccttcaaaaacctttcagcccaatgtcaagaagtccggaagaggaaagagcttgagctgcagatcctgacggaagccatccggaactgggagggcgatgacattaaaactctgggcaacgtcacttacatgtcccaggtcctgattcagtgtgccggaagtgaggaaaagaatgaaagatatcttctactcttcccaaatgttttgctaatgttgtctgccagtcctaggatgagtggctttatctatcagggaaagcttccaacgacaggaatgacaatcacaaagcttgaggacagtgaaaatcatagaaatgcatttgaaatatcagggagcatgattgagcggatattagtgtcgtgcaacaaccagcaggatctgcaggaatgggtggagcacctacagaagcaaacgaaggtcacgtctgtgggaaaccccaccataaagcctcattcagtgccatctcataccctcccctcccacccggtcactccgtccagcaagcacgcagacagcaagcccgcgccgctgacgcccgcctaccacacgctgccccacccctcccaccacggcaccccgcacaccaccatcaactggggacccctggagcctccgaaaacacccaagccctggagcctgagctgcctgcggcccgcgcctcccctccggccctcagctgctctctgctacaaggaggatcttagtaagagccctaagaccatgaaaaagctgctgcccaagcgcaaacctgaacggaagccttcagatgaggagttcgcgtcccggaaaagcacagctgctttggaagaagatgctcagattctgaaagtcattgaagcttactgcaccagcgccaaaacaaggcaaacactcaattcaacatggcaaggcactgacctgatgcataatcacgtcttggctgatgatgaccaaccaagcctagactccctggggcgtcgcagtagcctttctcgtttggagccttcagacctctcggaagactctgactatgacagtatatggacagcccatagttacagaatgggttctacatctcgtaagagctgttgctcatatatctctcaccagaactaatgcacttctgagcttttcttaacaaatgcttgttgtatcgcagcctgcttttcttagatgttttcttgctgttccttgtctcttttatgtgatattttaacaacttttgagagtgttcctgatatttcccattgtactttgtggaggcttaactgccgatgcgagtatacattcgaatgactgactattggagggaggtggtgtgttcacgtgagcctacatccgagggtgctcttcgtaaggggtagttgttgttttatagctccaaatggtttttttattctcagtgtagcaactgtttgatttctttctggatacagctgtatgaacacttttctattttatactgaaatcacacaggtttgtgatctaagtgccagaaccatggaggagactctggccttatctgtagggacctaaattttttaagtgctatgaacactgatcaagtagttgtggagagatgagaagaatatatgcagcaaaggtgctgtgagcccagttccaacggctgtgttctggtaatcgtgcagaacagcatgtgggctctgggccttggcaggtgcacagacgggcgggcgtcacgtgtgttcagagcttgtctccacctcacggctctgtgctcttctgtgtgctgcgttgtggccgtgaagtgggagctctcctttccaaaggcagagcttactgtcatggctcagatgttcactcgcatcttcaccccaaacttccctgaattgcagtgatttctgttataaggcacatagcaagcctgtaccactctacagtaaaatctctacactaacagtttaaagcccgaaagctgaagcattcagcctctgcaagtgtagactactggactgtagtagaggcatttggaatacttacaaagtcaagtgctgtggcttcagttcccccggctccccacccctgacatccatacttatgttgtctggaagagccatggacacatcattattttcagcaaccagctgcagtgaaactccatttacagcaaccccatagtataaaaccacaatgcctcattgtaatgggatattgaagttcattgaagaattactaggttgccatgtggctcacttatttaaaaaaaaaaaaaaaaaactcacccgttttcctgggatttgttgtaaggagttttcactggcctcactcagaccaatttctgcttcaaaaagcactgaatgtgacctgttgcattcagttgtagcatcaaatccacacctagtcattgcttgaggggccaaattgtgttctgtcccatgcacgctctatttggtgttaaaatggaaccttacggttgtgttttaagtattcattgaaaccagcttcagaaaacaagatgccatagtaaattgagaataacattttttccttcttcagggtggctgtaattccaggtggccgtgatttctttcttccccactgcccactccttcgccaaacccacgtattcagtgttctgatcttgtttgtgcagagtgaactctgatgcagtatcagtcttgtcctgggagccgggtcctgctgctcacaagcccagagctgccagggagctcctggcagtagcacgttgtttagaaagttgggtggcttcattcagcatggaacaagctaatggcacaggagacatcagggcagctgttaattccaaatatttgttcccaagtagctactgaactgctcacaccattggaagattttgtattttcataccaattagtaaaaataagaacattgaggagcagtcagagcccagtgttaatctccggcagagatggggtttatgtatgttcagccagatagtaaatgggatttttggagaaataagataactacaaagtttctatacttactataagtggatttagaagcgattttggttttgtattacatacggtagtcctctgcgtcagggagcacttttttgtttgcctcgagactactcattagcgcactggctaagctgcctttgccttctcgtaggcgtgggttgcctgtgtcatgggctgtgtagaccacaacactcaaacacagttgctgcacttggattttcctttaataccaagtatcatttggttatcttactgggacattttcattgatattctatacaccaaagttttgacggtttaccatcattccattttgtaccagttaaaggcattttgatgatgctttttcttgatgctaagatcactgcagaagaataacctgaccttttctttgcatttgttttgaatgtctaacaccattagcttttgtgatctggttaagaagtattagtgccacaagcctgaaaagacagttctcctgtggcagtggcgatgtggcatccagagggccattgtttctacttttgtgggacttcagtcatgctgataatagaatcttctgttcatacaattctgtaatatttatttgtacagttagtattctaatgaaaggatgaagagtctgaactagaaggtaggtttaagccatcaccaggcctttgcaaatggcctaaatggtgttccctttgaaataacgcttgccacaagtatataataagctatattaattgtgttttgcataaaattgccaaaacacagtaatgtgtatatagtggtataagatcttgaaaaaaatctctataattgtgctctttatctgtgaatgggaaaagccatttttagtaggtgactaccatttgaaaaactcaattggatgtatatctgaatgttgcattgtattgtacagtatgcatattattgtttgtggttgcatatggcaatgaagtgtttgttttatattaaaaaaaacctgttatgtacagttgaaataaattttgcatttgctagcc

SEQ ID NO: 42747 - protein, 625 aa, Artificial Sequence
  derived and/or modified sequence
MTDNSNNQLVVRAKFNFQQTNEDELSFSKGDVIHVTRVEEGGWWEGTLNGRTGWFPSNYVREVKASEKPVSPKSGTLKSPPKGFDTTAINKSYYNVVLQNILETENEYSKELQTVLSTYLRPLQTSEKLSSANISYLMGNLEEICSFQQMLVQSLEECTKLPEAQQRVGGCFLNLMPQMKTLYLTYCANHPSAVNVLTEHSEELGEFMETKGASSPGILVLTTGLSKPFMRLDKYPTLLKELERHMEDYHTDRQDIQKSMAAFKNLSAQCQEVRKRKELELQILTEAIRNWEGDDIKTLGNVTYMSQVLIQCAGSEEKNERYLLLFPNVLLMLSASPRMSGFIYQGKLPTTGMTITKLEDSENHRNAFEISGSMIERILVSCNNQQDLQEWVEHLQKQTKVTSVGNPTIKPHSVPSHTLPSHPVTPSSKHADSKPAPLTPAYHTLPHPSHHGTPHTTINWGPLEPPKTPKPWSLSCLRPAPPLRPSAALCYKEDLSKSPKTMKKLLPKRKPERKPSDEEFASRKSTAALEEDAQILKVIEAYCTSAKTRQTLNSTWQGTDLMHNHVLADDDQPSLDSLGRRSSLSRLEPSDLSEDSDYDSIWTAHSYRMGSTSRKSCCSYISHQN

SEQ ID NO: 42748 - protein, 753 aa, Artificial Sequence
  derived and/or modified sequence
MNSAEQTVTWLITLGVLESPKKTISDPEGFLQASLKDGVVLCRLLERLLPGTIEKTFDANDLYQGQNFNKVLSSLVTLNKVTADIGLGSDSVCARPSSHRIKSFDSLGSQSLHTRTSKLFQGQYRSLDMTDNSNNQLVVRAKFNFQQTNEDELSFSKGDVIHVTRVEEGGWWEGTLNGRTGWFPSNYVREVKASEKPVSPKSGTLKSPPKGFDTTAINKSYYNVVLQNILETENEYSKELQTVLSTYLRPLQTSEKLSSANISYLMGNLEEICSFQQMLVQSLEECTKLPEAQQRVGGCFLNLMPQMKTLYLTYCANHPSAVNVLTEHSEELGEFMETKGASSPGILVLTTGLSKPFMRLDKYPTLLKELERHMEDYHTDRQDIQKSMAAFKNLSAQCQEVRKRKELELQILTEAIRNWEGDDIKTLGNVTYMSQVLIQCAGSEEKNERYLLLFPNVLLMLSASPRMSGFIYQGKLPTTGMTITKLEDSENHRNAFEISGSMIERILVSCNNQQDLQEWVEHLQKQTKVTSVGNPTIKPHSVPSHTLPSHPVTPSSKHADSKPAPLTPAYHTLPHPSHHGTPHTTINWGPLEPPKTPKPWSLSCLRPAPPLRPSAALCYKEDLSKSPKTMKKLLPKRKPERKPSDEEFASRKSTAALEEDAQILKVIEAYCTSAKTRQTLNSTWQGTDLMHNHVLADDDQPSLDSLGRRSSLSRLEPSDLSEDSDYDSIWTAHSYRMGSTSRKSCCSYISHQN

SEQ ID NO: 42749 - DNA, 2262 bp, Artificial Sequence
  derived and/or modified sequence
atgaacagcgccgagcagaccgtgacctggctgatcaccctgggcgtgctggagagccccaagaagaccatcagcgaccccgagggcttcctgcaggccagcctgaaggacggcgtggtgctgtgcagactgctggagagactgctgcccggcaccatcgagaagaccttcgacgccaacgacctgtaccagggccagaacttcaacaaggtgctgagcagcctggtgaccctgaacaaggtgaccgccgacatcggcctgggcagcgacagcgtgtgcgccagacccagcagccacagaatcaagagcttcgacagcctgggcagccagagcctgcacaccagaaccagcaagctgttccagggccagtacagaagcctggacatgaccgacaacagcaacaaccagctggtggtgagagccaagttcaacttccagcagaccaacgaggacgagctgagcttcagcaagggcgacgtgatccacgtgaccagagtggaggagggcggctggtgggagggcaccctgaacggcagaaccggctggttccccagcaactacgtgagagaggtgaaggccagcgagaagcccgtgagccccaagagcggcaccctgaagagcccccccaagggcttcgacaccaccgccatcaacaagagctactacaacgtggtgctgcagaacatcctggagaccgagaacgagtacagcaaggagctgcagaccgtgctgagcacctacctgagacccctgcagaccagcgagaagctgagcagcgccaacatcagctacctgatgggcaacctggaggagatctgcagcttccagcagatgctggtgcagagcctggaggagtgcaccaagctgcccgaggcccagcagagagtgggcggctgcttcctgaacctgatgccccagatgaagaccctgtacctgacctactgcgccaaccaccccagcgccgtgaacgtgctgaccgagcacagcgaggagctgggcgagttcatggagaccaagggcgccagcagccccggcatcctggtgctgaccaccggcctgagcaagcccttcatgagactggacaagtaccccaccctgctgaaggagctggagagacacatggaggactaccacaccgacagacaggacatccagaagagcatggccgccttcaagaacctgagcgcccagtgccaggaggtgagaaagagaaaggagctggagctgcagatcctgaccgaggccatcagaaactgggagggcgacgacatcaagaccctgggcaacgtgacctacatgagccaggtgctgatccagtgcgccggcagcgaggagaagaacgagagatacctgctgctgttccccaacgtgctgctgatgctgagcgccagccccagaatgagcggcttcatctaccagggcaagctgcccaccaccggcatgaccatcaccaagctggaggacagcgagaaccacagaaacgccttcgagatcagcggcagcatgatcgagagaatcctggtgagctgcaacaaccagcaggacctgcaggagtgggtggagcacctgcagaagcagaccaaggtgaccagcgtgggcaaccccaccatcaagccccacagcgtgcccagccacaccctgcccagccaccccgtgacccccagcagcaagcacgccgacagcaagcccgcccccctgacccccgcctaccacaccctgccccaccccagccaccacggcaccccccacaccaccatcaactggggccccctggagccccccaagacccccaagccctggagcctgagctgcctgagacccgccccccccctgagacccagcgccgccctgtgctacaaggaggacctgagcaagagccccaagaccatgaagaagctgctgcccaagagaaagcccgagagaaagcccagcgacgaggagttcgccagcagaaagagcaccgccgccctggaggaggacgcccagatcctgaaggtgatcgaggcctactgcaccagcgccaagaccagacagaccctgaacagcacctggcagggcaccgacctgatgcacaaccacgtgctggccgacgacgaccagcccagcctggacagcctgggcagaagaagcagcctgagcagactggagcccagcgacctgagcgaggacagcgactacgacagcatctggaccgcccacagctacagaatgggcagcaccagcagaaagagctgctgcagctacatcagccaccagaactag

SEQ ID NO: 42750 - DNA, 2262 bp, Artificial Sequence
  derived and/or modified sequence
atgaattctgcggaacaaacagtcacttggttgataacattaggggtccttgaatcacccaagaagactatcagcgaccccgaagggtttctgcaggcatctcttaaggatggggttgtattgtgcagactcctggagcgcttgctgcccggtacaattgaaaaaacttttgatgccaatgacttgtaccaaggtcagaattttaacaaggtgctctcgtccttggtgaccctgaataaggtgaccgcagacatcggcctcgggtccgatagcgtgtgcgctcgcccctcttcacatagaatcaagagctttgatagtttgggttctcaatctctccatacccgtaccagtaagctctttcagggacagtatcgctcactcgatatgactgataattccaacaatcaattggttgtgcgggcgaaattcaattttcagcagacaaacgaagatgagcttagttttagtaaaggggacgttatccatgtgacgcgcgtcgaagagggaggctggtgggaaggaactctgaacgggcggactggatggtttccaagcaattacgttcgagaagtaaaggcaagcgaaaagccggtgagcccaaaatcaggaactctgaaatcgccgccgaaaggattcgataccactgctatcaacaagagctactacaacgtggtactgcagaacattctggaaaccgaaaatgagtatagtaaagaactacagactgtcctgtccacctatttgagaccactgcagacgagtgaaaagctatctagcgcaaacatctcctacttgatgggaaatctggaagaaatttgctcgtttcagcaaatgctcgtacaatcacttgaggagtgtactaaacttccggaagcccagcagagagtgggaggatgttttttgaacctgatgccccagatgaaaacactttacctgacatactgtgccaatcacccctctgcagtcaacgtcttgactgaacattcagaggagcttggtgaatttatggagaccaaaggcgcctcctctccgggcatactggtcctcaccacgggtctgagcaaacccttcatgcggcttgacaagtatcctacactcctgaaggaattagaaaggcatatggaggactaccataccgacagacaagatatacagaagagcatggccgcatttaagaatctgagcgcccagtgccaggaagtcaggaagagaaaagaacttgaacttcaaatacttactgaggctattcgcaattgggagggagacgatattaaaaccttggggaacgtgacctacatgagccaagtcctaattcagtgcgccggcagtgaagagaaaaacgaacgctacctattgctcttcccaaatgtgttgctaatgttgtccgcctctccaagaatgtctggcttcatttaccaaggcaagttgcctacgaccggaatgacgataactaagttagaggactcagaaaaccataggaatgccttcgagattagcggaagcatgatcgagcgtatactcgtcagctgtaataatcagcaggacctccaggagtgggtggagcatctgcaaaaacagactaaggtgacgtcagtgggcaatcccacgatcaaacctcattctgtgcccagtcatactctgcccagccaccctgtcactccatcctcaaagcacgctgactcaaagcctgcccctttaacaccagcctatcatactttacctcatcctagccatcacggaacacctcacacgacaatcaattgggggcccctggagccaccgaagaccccaaaaccttggtcccttagttgtttgcgacctgccccacccctccgtcccagcgccgcactgtgttataaggaagaccttagtaagagtcctaaaacgatgaagaagctgctgcccaagcgaaaaccggagagaaaaccaagtgacgaggagtttgccagccggaaatccaccgcggcattagaggaagatgcccagatcctcaaggtcatcgaggcgtattgcacatccgccaaaacgaggcagaccctgaactctacatggcagggcacggatctcatgcacaaccacgtgcttgctgacgacgaccagccctctctggattcacttggaagacgttcatctttgtctaggctcgaaccctctgacctaagcgaagatagcgactacgacagcatttggaccgcgcatagctatcgaatggggtcaacaagcaggaagtcgtgctgttcgtatatttcacaccagaactag

SEQ ID NO: 42751 - DNA, 2262 bp, Artificial Sequence
  derived and/or modified sequence
atgaacagcgctgagcagacagtgacctggctgatcaccctgggcgtgctggagagccccaagaagaccatcagtgaccctgagggcttcctgcaggccagcctgaaggatggagtggtgctgtgccgcctgctggagcggctgctgcccggcaccatcgagaagacctttgatgccaatgacctgtaccagggccagaacttcaacaaggtgctgagcagcctggtgaccctgaacaaggtgacagctgacatcggcctgggcagtgacagcgtgtgtgcccggcccagcagccaccgcatcaagagctttgacagcctgggcagccagagcctgcacaccaggaccagcaagctgttccagggccagtaccgcagcctggacatgacagacaacagcaacaaccagctggtggtgcgggccaagttcaacttccagcagaccaatgaagatgagctgtccttcagcaaaggagatgtgatccacgtgaccagggtggaggagggcggctggtgggagggcaccctgaatggaagaacaggctggttccccagcaactacgtgcgggaggtgaaggccagcgagaagcctgtgagccccaagagcggcaccctgaagagcccccccaagggctttgacaccacagccatcaacaagagctactacaacgtggtgctgcagaacatcctggagacagaaaatgagtacagcaaggagctgcagacagtgctgagcacctacctgcggcccctgcagaccagcgagaagctgagcagcgccaacatctcctacctgatgggcaacctggaggagatctgcagcttccagcagatgctggtgcagagcctggaggagtgcaccaagctgcctgaggcccagcagagggtgggcggctgcttcctgaacctgatgccccagatgaagaccctgtacctgacctactgtgccaaccaccccagcgctgtgaatgtgctgacagagcacagcgaggagctgggggagttcatggagaccaagggggccagcagccctggcatcctggtgctgaccaccggcctgagcaagcccttcatgaggctggacaagtaccccaccctgctgaaggagctggagcggcacatggaggactaccacacagaccggcaggacatccagaagtccatggccgccttcaagaacctgagcgcccagtgccaggaggtgaggaagaggaaggagctggagctgcagatcctgacagaggccatccggaactgggagggagatgacatcaagaccctgggcaatgtgacctacatgagccaggtgctgatccagtgtgccggcagcgaggagaagaatgaaagatacctgctgctcttccccaacgtgctgctgatgctgagcgccagccccaggatgagcggcttcatctaccagggcaagctgcccaccaccggcatgaccatcaccaagctggaggacagcgagaaccacagaaatgcctttgagatcagcggctccatgattgagcgcatcctggtgtcctgcaacaaccagcaggacctgcaggagtgggtggagcacctgcagaagcagaccaaggtgacctctgtgggcaaccccaccatcaagccccacagcgtgcccagccacaccctgcccagccaccctgtgacccccagcagcaagcatgctgacagcaagccagcccccctgaccccagcctaccacaccctgccccaccccagccaccacggcaccccccacaccaccatcaactggggccccctggagccccccaagacccccaagccctggagcctgagctgcctgcggcctgccccacccctgcggcccagcgctgccctgtgctacaaggaggacctgagcaagagccccaagaccatgaagaagctgctgcccaagaggaagccagagaggaagcccagtgatgaggagtttgccagcaggaagagcacagctgccctggaggaggatgcccagatcctgaaggtgattgaggcctactgcaccagcgccaagacccggcagaccctgaacagcacctggcagggcacagacctgatgcacaaccacgtgctggctgatgatgaccagcccagcctggacagcctgggccgccgcagcagcctgagccggctggagcccagcgacctgtctgaggacagcgactatgacagcatctggacagcccacagctacaggatgggcagcaccagcaggaagagctgctgcagctacatcagccaccagaactag

SEQ ID NO: 42752 - DNA, 2262 bp, Artificial Sequence
  derived and/or modified sequence
atgaacagcgccgagcagaccgtgacctggctgatcaccctgggcgtcttggaaagccccaagaagactattagtgatccggaggggtttttgcaggcttccctaaaagatggagtcgttctctgccggctattggagcggctgttgccaggcacaatcgaaaaaactttcgatgcaaatgatctctatcagggccagaattttaacaaagtcctcagtagccttgtgacactgaacaaagttactgcagacatcggtttggggtcggactccgtgtgcgctcgcccttcaagccacagaattaaaagcttcgattcgctgggtagtcagagcttgcatactagaacatcaaaattgtttcaggggcagtacagaagccttgatatgacagacaatagcaataaccagctcgtcgtcagagcgaagtttaattttcagcagacgaatgaagacgagctgagctttagcaagggagatgttatccacgtgacccgcgtcgaggaaggcggctggtgggaagggactctcaacggcaggaccggatggttccctagcaactatgtcagagaggtgaaagcatcagagaaacccgtctcacctaaaagtggtaccctcaaatcccccccgaaagggttcgatactaccgctatcaataagtcttattataacgtggtccttcagaacattctggagacggagaatgagtattctaaggagttgcagacagtgttgtcaacctacctgaggccattgcagaccagtgaaaaactgtcttctgcaaacatatcgtatctgatgggaaacttggaagagatttgtagctttcagcaaatgctggttcagagtttggaggagtgcactaaacttccagaagcacagcaacgcgtgggaggatgttttctgaatctgatgccacagatgaagactctgtacctgacatactgtgcaaaccatccatcagcggttaatgtgctcaccgaacactctgaagagctgggagaattcatggagactaagggagcttcttcccccggaattttggtgctgactactggcctttctaaaccattcatgcgcttggataagtacccgacactgctgaaagaacttgaaaggcacatggaggactaccataccgatagacaggacatccagaaatcaatggctgcatttaagaacctttcagcccagtgtcaggaggtccggaaaagaaaggaactcgagctgcagatactgacagaagccattcgcaactgggaaggggacgacatcaaaaccttggggaacgtcacatacatgtctcaagtgctcatccagtgtgccggcagtgaggagaaaaatgagcgctatctgctgctgtttcctaatgtcctgctgatgctgtcagctagcccgaggatgagcggctttatataccagggaaagctgcccactacaggtatgacgataacaaagttagaagatagtgagaatcataggaacgcctttgaaatctctggtagcatgatcgaacgcattctagtatcatgcaataaccagcaggacctacaggagtgggtcgagcatctacagaaacagaccaaagtaacctctgtggggaatcccaccattaagccccattccgtgccttctcacacactgccaagtcacccagtgactccttcctctaaacatgccgacagcaagcccgcgcccctgacccccgcttatcatactcttcctcacccctcccaccacggaaccccccacacaacgattaactgggggcccctcgaaccacctaagacgcccaagccttggagtctctcatgcctgaggccagcgcccccactgcgaccaagtgctgcactgtgctataaggaggacctcagcaaaagccccaaaactatgaaaaagcttctgcccaaaagaaaacccgaacgaaaaccaagtgacgaagagttcgcgtcccgcaagagcaccgccgcactggaggaagatgcccagatcctgaaagtcatagaggcgtattgtacgtcggctaagacacggcaaacactgaacagcacttggcagggaaccgacctgatgcacaaccacgtcctggccgacgacgaccaacccagtttggactccctgggacgtcggtcttcattgagtcgcttggagccttccgatctgagtgaagattccgactatgactccatttggacggcccactcatacagaatggggtcaacatcaaggaagtcttgctgttcctacataagtcaccagaactag

SEQ ID NO: 42753 - DNA, 2262 bp, Artificial Sequence
  derived and/or modified sequence
atgaacagcgccgagcagaccgtcacatggctgattaccctgggcgtgttagagtcacctaagaaaactatttcagaccctgagggatttctgcaagctagtctgaaggatggtgtggtgctttgccgactgctggagcgactcctgcctggtaccattgagaaaactttcgatgcgaacgacctttaccaggggcagaattttaacaaagtgttatcttcattagtgacactgaacaaggtaaccgctgacataggattgggctcagatagtgtgtgcgccaggccatcatcgcaccggataaagagttttgatagcttgggctctcagtccttgcatacccgcacctccaaactatttcagggacagtatcgctctctggatatgaccgacaattcgaacaatcaactcgtggtcagagccaagttcaattttcaacaaaccaatgaggacgaactctctttcagtaagggagacgttattcacgtcacgcgcgtagaggaaggcggatggtgggagggaaccctgaatggaagaacgggatggttcccaagcaattatgtgcgcgaggtgaaggctagtgagaaaccagtttcaccaaagtcaggcaccctcaagagccccccaaaagggttcgataccacggccattaacaaaagctattacaacgtggtgctccaaaacatcctggagacagagaatgagtacagcaaagagcttcagactgtgttatctacttacctgagaccactgcagacatctgagaaactgagtagcgcaaacatatcttacctgatggggaacctagaagaaatttgcagtttccaacagatgcttgtacaatctctcgaggaatgtaccaaactgccggaggcccaacaaagggtaggtgggtgttttcttaaccttatgccacagatgaagactctctacctcacttactgcgctaaccacccatcagctgtcaatgtcctgactgaacactctgaggaactgggtgagttcatggaaacaaagggagcctcaagtccaggaatcctggtgctcacaactggcctctccaagccttttatgaggctggacaagtaccctacactactgaaagagttggaacgccacatggaggactatcacacagataggcaggatatccagaaatctatggctgccttcaaaaatcttagtgcacagtgccaagaggttcggaagaggaaagagctggagctgcagatcctgaccgaagccataagaaactgggagggggacgacatcaaaaccctgggcaatgtgacttacatgtcccaggtgctgattcagtgcgccggtagtgaggagaagaatgagagatacctgttgttgtttcccaatgtcctgctgatgctttccgcgtccccacggatgagcggtttcatataccaggggaagcttccaacgacagggatgactatcaccaagttggaggacagcgaaaaccaccgcaatgccttcgagatctctggaagtatgatcgagaggattctggtttcctgtaataaccaacaggatctccaggaatgggtggaacacctccagaaacagacgaaggtgacaagcgtgggcaaccccactattaaaccacacagcgtaccttcccatactttaccatcgcacccagtgaccccatcttctaaacacgccgattccaagcccgctcctctgacacccgcttatcatactttgccccacccttctcaccacggcacgccgcacaccaccatcaactggggacccctcgagccccctaagactccaaagccttggtccctgagctgtctgaggcccgctccccctctacgcccatcggcagccctctgttacaaagaggacctgagcaagtcacctaaaactatgaagaagttgctccctaagcgcaaacctgagagaaagccgagcgacgaagaattcgctagccggaaaagcactgccgctctcgaggaagacgcgcagatcctgaaagtcatagaggcttattgtactagcgctaaaacaagacagacactgaatagcacatggcagggcacagatctgatgcataatcatgtgctggctgacgacgaccaacccagtctggatagcctggggaggagaagttctttaagtcggctcgagccatcggacttgtctgaagattcagactatgattccatttggactgcccacagctaccgaatggggtcgacttcccgcaagtcatgctgctcttacatctctcatcagaattag

SEQ ID NO: 42754 - DNA, 5375 bp, Artificial Sequence
  derived and/or modified sequence
gcggccgaggccggggggcggcggcgggcgcccgcaggttcccgagccgctcctgagaaggcgcctgacagcgggccggggcgcacggagaagcgggccgggccggacctgctgggccgcgccgagccaatcgccggcgccggccgctcgatgggcgaggcggcggcggcggcggcgggggccgcgggccgggccgccgctccgaggtgaaggcgcgcgcccctccccgcctgcctcccgggccgcagcgatgaattccgccgagcaaaccgttacgtggctcatcactctgggggtgctggagtcgcccaaaaaaaccatctcggacccggagggctttctgcaggcgtcgctgaaggatggggtggtcctctgcaggctgctggagcgcctgctccccgggaccatcgagaaaacgtttgatgcaaatgatttgtatcaggggcagaattttaacaaggtcctcagttccttagtgactctaaataaagtaacagcagacatcgggctggggagtgactccgtgtgtgcccggccctcgtctcaccgcataaagtcttttgactcccttggatcacagtctttgcacactcggacttcaaaactgttccagggccagtatcggagtttggacatgaccgataatagcaacaatcaactggtagtaagagcaaagtttaacttccagcagaccaatgaggacgagctttccttctcaaaaggagacgtcatccatgtcacccgtgtggaagagggaggctggtgggagggcacactcaacggccggaccggctggttccccagcaactacgtgcgcgaggtcaaggccagcgagaagcctgtgtctcccaaatcaggaacactgaagagccctcccaaaggatttgatacgactgccataaacaaaagctattacaatgtggtgctacagaatattttagaaacagaaaatgaatattctaaagaacttcagactgtgctttcaacgtacctacggccattgcagaccagtgagaagttaagttcagcaaacatttcatatttaatgggaaatctagaagaaatatgttctttccagcaaatgctcgtacagtctttagaagaatgcaccaagttgcccgaagctcagcagagagtcggaggctgctttttaaacctgatgccacagatgaaaaccctgtacctcacgtattgtgccaatcacccttctgcagtgaatgtcctcacggaacacagtgaggagttgggggagttcatggagaccaaaggtgccagcagccctgggattctcgtgctgaccacgggcctgagcaaacccttcatgcgcctggataaataccctacgctgctcaaagagctcgagagacacatggaggattatcatacagatagacaagatattcaaaaatccatggctgccttcaaaaacctttcagcccaatgtcaagaagtccggaagaggaaagagcttgagctgcagatcctgacggaagccatccggaactgggagggcgatgacattaaaactctgggcaacgtcacttacatgtcccaggtcctgattcagtgtgccggaagtgaggaaaagaatgaaagatatcttctactcttcccaaatgttttgctaatgttgtctgccagtcctaggatgagtggctttatctatcagggaaagcttccaacgacaggaatgacaatcacaaagcttgaggacagtgaaaatcatagaaatgcatttgaaatatcagggagcatgattgagcggatattagtgtcgtgcaacaaccagcaggatctgcaggaatgggtggagcacctacagaagcaaacgaaggtcacgtctgtgggaaaccccaccataaagcctcattcagtgccatctcataccctcccctcccacccggtcactccgtccagcaagcacgcagacagcaagcccgcgccgctgacgcccgcctaccacacgctgccccacccctcccaccacggcaccccgcacaccaccatcaactggggacccctggagcctccgaaaacacccaagccctggagcctgagctgcctgcggcccgcgcctcccctccggccctcagctgctctctgctacaaggaggatcttagtaagagccctaagaccatgaaaaagctgctgcccaagcgcaaacctgaacggaagccttcagatgaggagttcgcgtcccggaaaagcacagctgctttggaagaagatgctcagattctgaaagtcattgaagcttactgcaccagcgccaaaacaaggcaaacactcaattcaacatggcaaggcactgacctgatgcataatcacgtcttggctgatgatgaccaaccaagcctagactccctggggcgtcgcagtagcctttctcgtttggagccttcagacctctcggaagactctgactatgacagtatatggacagcccatagttacagaatgggttctacatctcgtaagagctgttgctcatatatctctcaccagaactaatgcacttctgagcttttcttaacaaatgcttgttgtatcgcagcctgcttttcttagatgttttcttgctgttccttgtctcttttatgtgatattttaacaacttttgagagtgttcctgatatttcccattgtactttgtggaggcttaactgccgatgcgagtatacattcgaatgactgactattggagggaggtggtgtgttcacgtgagcctacatccgagggtgctcttcgtaaggggtagttgttgttttatagctccaaatggtttttttattctcagtgtagcaactgtttgatttctttctggatacagctgtatgaacacttttctattttatactgaaatcacacaggtttgtgatctaagtgccagaaccatggaggagactctggccttatctgtagggacctaaattttttaagtgctatgaacactgatcaagtagttgtggagagatgagaagaatatatgcagcaaaggtgctgtgagcccagttccaacggctgtgttctggtaatcgtgcagaacagcatgtgggctctgggccttggcaggtgcacagacgggcgggcgtcacgtgtgttcagagcttgtctccacctcacggctctgtgctcttctgtgtgctgcgttgtggccgtgaagtgggagctctcctttccaaaggcagagcttactgtcatggctcagatgttcactcgcatcttcaccccaaacttccctgaattgcagtgatttctgttataaggcacatagcaagcctgtaccactctacagtaaaatctctacactaacagtttaaagcccgaaagctgaagcattcagcctctgcaagtgtagactactggactgtagtagaggcatttggaatacttacaaagtcaagtgctgtggcttcagttcccccggctccccacccctgacatccatacttatgttgtctggaagagccatggacacatcattattttcagcaaccagctgcagtgaaactccatttacagcaaccccatagtataaaaccacaatgcctcattgtaatgggatattgaagttcattgaagaattactaggttgccatgtggctcacttatttaaaaaaaaaaaaaaaaaactcacccgttttcctgggatttgttgtaaggagttttcactggcctcactcagaccaatttctgcttcaaaaagcactgaatgtgacctgttgcattcagttgtagcatcaaatccacacctagtcattgcttgaggggccaaattgtgttctgtcccatgcacgctctatttggtgttaaaatggaaccttacggttgtgttttaagtattcattgaaaccagcttcagaaaacaagatgccatagtaaattgagaataacattttttccttcttcagggtggctgtaattccaggtggccgtgatttctttcttccccactgcccactccttcgccaaacccacgtattcagtgttctgatcttgtttgtgcagagtgaactctgatgcagtatcagtcttgtcctgggagccgggtcctgctgctcacaagcccagagctgccagggagctcctggcagtagcacgttgtttagaaagttgggtggcttcattcagcatggaacaagctaatggcacaggagacatcagggcagctgttaattccaaatatttgttcccaagtagctactgaactgctcacaccattggaagattttgtattttcataccaattagtaaaaataagaacattgaggagcagtcagagcccagtgttaatctccggcagagatggggtttatgtatgttcagccagatagtaaatgggatttttggagaaataagataactacaaagtttctatacttactataagtggatttagaagcgattttggttttgtattacatacggtagtcctctgcgtcagggagcacttttttgtttgcctcgagactactcattagcgcactggctaagctgcctttgccttctcgtaggcgtgggttgcctgtgtcatgggctgtgtagaccacaacactcaaacacagttgctgcacttggattttcctttaataccaagtatcatttggttatcttactgggacattttcattgatattctatacaccaaagttttgacggtttaccatcattccattttgtaccagttaaaggcattttgatgatgctttttcttgatgctaagatcactgcagaagaataacctgaccttttctttgcatttgttttgaatgtctaacaccattagcttttgtgatctggttaagaagtattagtgccacaagcctgaaaagacagttctcctgtggcagtggcgatgtggcatccagagggccattgtttctacttttgtgggacttcagtcatgctgataatagaatcttctgttcatacaattctgtaatatttatttgtacagttagtattctaatgaaaggatgaagagtctgaactagaaggtaggtttaagccatcaccaggcctttgcaaatggcctaaatggtgttccctttgaaataacgcttgccacaagtatataataagctatattaattgtgttttgcataaaattgccaaaacacagtaatgtgtatatagtggtataagatcttgaaaaaaatctctataattgtgctctttatctgtgaatgggaaaagccatttttagtaggtgactaccatttgaaaaactcaattggatgtatatctgaatgttgcattgtattgtacagtatgcatattattgtttgtggttgcatatggcaatgaagtgtttgttttatattaaaaaaaacctgttatgtacagttgaaataaattttgcatttgctagcc

SEQ ID NO: 42755 - DNA, 682 bp, Artificial Sequence
  derived and/or modified sequence
tgggcgaggcggcggcggcggcggcgggggccgcgggccgggccgccgctccgaggtgaaggcgcgcgcccctccccgcctgcctcccgggccgcagcgatgaattccgccgagcaaaccgttacgtggctcatcactctgggggtgctggagtcgcccaaaaaaaccatctcggacccggagggctttctgcaggcgtcgctgaaggatggggtggtcctctgcaggctgctggagcgcctgctccccgggaccatcgagaaaacgtttgatgcaaatgatttgtatcaggggcagaattttaacaaggtcctcagttccttagtgactctaaataaagtaacagcagacatcgggctggggagtgactccgtgtgtgcccggccctcgtctcaccgcataaagtcttttgactcccttggatcacagtctttgcacactcggacttcaaaactgttccagggccagtatcggagtttggacatgaccgataatagcaacaatcaactggtagtaagagcaaagtttaacttccagcagaccaatgaggacgagctttccttctcaaaaggagacgtcatccatgtcacccgtgtggaagagggaggctggtgggagggcacactcaacggccggaccggctggttccccagcaactacgtgcgcgaggtcaaggccagcg

SEQ ID NO: 42756 - DNA, 1941 bp, Artificial Sequence
  derived and/or modified sequence
atgaccgacaacagcaacaaccagctggtggtgagagccaagttcaacttccagcagaccaacgaggacgagctgagcttcagcaagggcgacgtgatccacgtgaccagagtggaggagggcggctggtgggagggcaccctgaacggcagaaccggctggttccccagcaactacgtgagagaggtgaaggccagcgagaagcccgtgagccccaagagcggcaccctgaagagcccccccaagggcttcgacaccaccgccatcaacaagagctactacaacgtggtgctgcagaacatcctggagaccgagaacgagtacagcaaggagctgcagaccgtgctgagcacctacctgagacccctgcagaccagcgagaagctgagcagcgccaacatcagctacctgatgggcaacctggaggagatctgcagcttccagcagatgctggtgcagagcctggaggagtgcaccaagctgcccgaggcccagcagagagtgggcggctgcttcctgaacctgatgccccagatgaagaccctgtacctgacctactgcgccaaccaccccagcgccgtgaacgtgctgaccgagcacagcgaggagctgggcgagttcatggagaccaagggcgccagcagccccggcatcctggtgctgaccaccggcctgagcaagcccttcatgagactggacaagtaccccaccctgctgaaggagctggagagacacatggaggactaccacaccgacagacaggacatccagaagagcatggccgccttcaagaacctgagcgcccagtgccaggaggtgagaaagagaaaggagctggagctgcagatcctgaccgaggccatcagaaactgggagggcgacgacatcaagaccctgggcaacgtgacctacatgagccaggtgctgatccagtgcgccggcagcgaggagaagaacgagagatacctgctgctgttccccaacgtgctgctgatgctgagcgccagccccagaatgagcggcttcatctaccagggcaagctgcccaccaccggcatgaccatcaccaagctggaggacagcgagaaccacagaaacgccttcgagatcagcggcagcatgatcgagagaatcctggtgagctgcaacaaccagcaggacctgcaggagtgggtggagcacctgcagaagcagaccaaggtgaccagcgtgggcaaccccaccatcaagccccacagcgtgcccagccacaccctgcccagccaccccgtgacccccagcagcaagcacgccgacagcaagcccgcccccctgacccccgcctaccacaccctgccccaccccagccaccacggcaccccccacaccaccatcaactggggccccctggagccccccaagacccccaagccctggagcctgagctgcctgagacccgccccccccctgagacccagcgccgccctgtgctacaaggaggacctgagcaagagccccaagaccatgaagaagctgctgcccaagagaaagcccgagagaaagcccagcgacgaggagttcgccagcagaaagagcaccgccgccctggaggaggacgcccagatcctgaaggtgatcgaggcctactgcaccagcgccaagaccagacagaccctgaacagcagcagcagaaaggagagcgccccccaggtgctgctgcccgaggaggagaagatcatcgtggaggagaccaagagcaacggccagaccgtgatcgaggagaagagcctggtggacaccgtgtacgccctgaaggacgaggtgcaggagctgagacaggacaacaagaagatgaagaagagcctggaggaggagcagagagccagaaaggacctggagaagctggtgagaaaggtgctgaagaacatgaacgaccccgcctgggacgagaccaacctgtag

SEQ ID NO: 42757 - DNA, 1941 bp, Artificial Sequence
  derived and/or modified sequence
atgaccgataatagcaacaatcagctcgtcgtaagagccaagttcaattttcagcagaccaatgaagatgagctttccttctccaagggcgacgtcatccacgtgacacgcgtggaggagggtgggtggtgggaaggcacactaaacggcagaactgggtggttccctagtaactacgttcgtgaggtgaaagcgtccgagaaacctgtgagtccaaaatctgggaccttgaagtctcctcctaaagggtttgatactacagccatcaataaaagctactataacgttgtcctgcaaaacatcctcgaaaccgaaaatgagtattcaaaggagctgcaaaccgtgttatctacctatctgagacccctgcagacttctgaaaagctatcctcggcgaacatcagctacctcatgggcaatctggaggagatctgttcttttcagcagatgcttgtacagagtctggaagagtgtactaagctcccagaggctcagcagagagtcggagggtgcttcctgaatttgatgcctcagatgaaaactctctatctgacgtattgtgccaaccatcctagcgccgtaaacgtgctgaccgagcactcagaagagttgggcgagttcatggaaaccaagggggccagtagccctggcatcctagttctgaccacagggttgtccaaaccattcatgcggctggataagtaccccactctgttaaaagaactggagcggcacatggaggactaccacaccgaccggcaagacatacagaagtctatggccgcgttcaaaaacctgtctgctcagtgccaagaagtccgcaaacgaaaggagctggagctccaaatcctgaccgaggccatccgaaattgggagggggacgacatcaaaacactgggtaacgttacttacatgtcgcaggtactgattcagtgcgccgggtcagaagagaagaatgagcgctatctgctgctctttccaaatgtccttctgatgctttcagcctccccccgcatgtccggtttcatctatcagggtaagctcccaactacaggaatgaccatcactaaacttgaagattcagaaaatcatcgcaatgccttcgagatctccggctccatgattgaaagaatcctggtgagctgtaacaaccagcaggatctccaggaatgggtcgagcacctgcagaagcagaccaaagtgacttctgtgggaaatccgaccatcaagccccattctgttccttcccacacattgccatctcaccctgtgacaccgtcttctaagcatgccgactctaagcccgcacccctgacaccagcctatcacacacttcctcacccatcacaccacggtacaccgcacacaactataaattggggaccactcgaaccccctaagacaccaaaaccatggtcactgagttgcttgagacccgcgccacccctcaggcccagcgctgccctgtgttacaaggaggatctgtcaaaatcaccaaaaaccatgaagaagcttttgccgaaaaggaaaccagaacgaaagcccagcgatgaggagttcgcttctcggaaatctaccgctgctctggaggaggacgcccaaattcttaaagtcattgaggcgtattgcacttcagcgaaaactcggcagaccttgaattccagtagccgcaaggagtcagccccccaagtgttgttacccgaggaagaaaaaatcatagttgaggaaacgaagtctaacggccagactgtcatcgaagaaaagtctctggtagatacagtatatgccctgaaagacgaagtgcaggagttgcggcaggataacaaaaagatgaaaaaatccctggaggaagagcagcgggctagaaaagacttggagaagttggtgcggaaagtgttgaaaaacatgaatgatcccgcatgggacgagactaatctctag

SEQ ID NO: 42758 - DNA, 1941 bp, Artificial Sequence
  derived and/or modified sequence
atgacagacaactccaataaccaacttgttgtgagagctaaatttaactttcagcagacgaacgaggacgaactgtcgttctcaaagggcgatgttatccatgtaacgcgtgtggaagaaggaggatggtgggagggtactctgaacggccggacaggttggttcccgtccaactatgttcgcgaggtgaaagcctcagagaaacctgtcagtcccaagtccgggaccttgaagagcccaccaaaaggcttcgatacaaccgctataaataagagctattacaacgtggtgctccagaacatcctcgagactgaaaatgagtactcaaaggagctgcaaactgtcctgtcaacatatttgagaccactgcagacatccgaaaaactgtcatcagccaatatcagctatctcatgggcaatcttgaggagatttgtagttttcaacaaatgcttgtgcagtctctggaggagtgcaccaaactaccagaagctcagcaaagagtagggggctgcttcttgaatctgatgccacagatgaaaaccctatatttgacttattgcgccaatcatcctagcgccgtaaatgtgcttacagaacactcggaggaactcggcgagttcatggaaacgaaaggtgcatcgagccctggtatacttgttctcaccaccggtctgagcaaaccctttatgaggctggacaaatatcccacgctgctcaaagagctcgagcggcacatggaggattatcatactgaccggcaagacatccagaaaagcatggccgcgtttaaaaatttgtcagcccagtgtcaggaggtgaggaaaaggaaggaactggagctgcaaattttaacggaggcaatccggaattgggagggagacgatattaagacattgggtaatgtgacctatatgtctcaagtgctcatacagtgcgccggttcagaagaaaaaaacgagagatatctactgttgttcccgaatgtcctgcttatgctaagcgccagtccccgaatgagtggttttatctaccaggggaaattaccgacgactgggatgaccattaccaaactggaagactccgagaaccaccgcaacgctttcgagatcagcgggtcaatgatcgaaaggatcctggtatcttgcaacaaccagcaggatctccaggagtgggtcgagcatctccaaaagcagaccaaggtcacctcagtgggcaacccgaccatcaagccacatagcgtgccctctcatacattaccttctcacccagttaccccatcgagtaagcacgccgacagcaagcctgctcccctgaccccagcttatcacaccttgccacacccaagtcatcacgggacaccacatacgacaatcaattggggcccgctggagccaccaaagacaccaaagccatggagtctgtcatgtttaaggccagcccctcccctaaggcctagcgctgccctctgctacaaggaagacctttcaaagagcccaaaaacgatgaagaagctccttcccaaaaggaaaccggaacggaagccaagtgatgaggaattcgcttcccgcaagagtactgccgccctcgaagaggatgcccaaattctgaaggtcatcgaagcctactgcacctcggctaaaacccggcagactcttaacagtagcagtcgaaaggaatccgccccacaggtgttactgccagaagaggaaaaaatcatcgtggaggagaccaagtctaatggtcaaacagtgatcgaggagaagtccctcgtggacacagtctatgcccttaaagacgaggtgcaggaactacgacaggacaataagaaaatgaagaagtcgcttgaggaggagcagcgtgctagaaaggatctggagaaacttgtgcgaaaggtccttaaaaatatgaacgacccagcatgggacgaaaccaatctgtag

SEQ ID NO: 42759 - DNA, 1941 bp, Artificial Sequence
  derived and/or modified sequence
atgacagacaacagcaacaaccagctggtggtgcgggccaagttcaacttccagcagaccaatgaagatgagctgtccttcagcaaaggagatgtgatccacgtgaccagggtggaggagggcggctggtgggagggcaccctgaatggaagaacaggctggttccccagcaactacgtgcgggaggtgaaggccagcgagaagcctgtgagccccaagagcggcaccctgaagagcccccccaagggctttgacaccacagccatcaacaagagctactacaacgtggtgctgcagaacatcctggagacagaaaatgagtacagcaaggagctgcagacagtgctgagcacctacctgcggcccctgcagaccagcgagaagctgagcagcgccaacatctcctacctgatgggcaacctggaggagatctgcagcttccagcagatgctggtgcagagcctggaggagtgcaccaagctgcctgaggcccagcagagggtgggcggctgcttcctgaacctgatgccccagatgaagaccctgtacctgacctactgtgccaaccaccccagcgctgtgaatgtgctgacagagcacagcgaggagctgggggagttcatggagaccaagggggccagcagccctggcatcctggtgctgaccaccggcctgagcaagcccttcatgaggctggacaagtaccccaccctgctgaaggagctggagcggcacatggaggactaccacacagaccggcaggacatccagaagtccatggccgccttcaagaacctgagcgcccagtgccaggaggtgaggaagaggaaggagctggagctgcagatcctgacagaggccatccggaactgggagggagatgacatcaagaccctgggcaatgtgacctacatgagccaggtgctgatccagtgtgccggcagcgaggagaagaatgaaagatacctgctgctcttccccaacgtgctgctgatgctgagcgccagccccaggatgagcggcttcatctaccagggcaagctgcccaccaccggcatgaccatcaccaagctggaggacagcgagaaccacagaaatgcctttgagatcagcggctccatgattgagcgcatcctggtgtcctgcaacaaccagcaggacctgcaggagtgggtggagcacctgcagaagcagaccaaggtgacctctgtgggcaaccccaccatcaagccccacagcgtgcccagccacaccctgcccagccaccctgtgacccccagcagcaagcatgctgacagcaagccagcccccctgaccccagcctaccacaccctgccccaccccagccaccacggcaccccccacaccaccatcaactggggccccctggagccccccaagacccccaagccctggagcctgagctgcctgcggcctgccccacccctgcggcccagcgctgccctgtgctacaaggaggacctgagcaagagccccaagaccatgaagaagctgctgcccaagaggaagccagagaggaagcccagtgatgaggagtttgccagcaggaagagcacagctgccctggaggaggatgcccagatcctgaaggtgattgaggcctactgcaccagcgccaagacccggcagaccctgaacagcagcagcaggaaggagagcgccccccaggtgctgctgcctgaggaggagaagatcatcgtggaggagaccaagagcaatggccagacagtgattgaggagaagagcctggtggacacagtgtatgccctgaaggatgaggtgcaggagctgcggcaggacaacaagaagatgaagaagagcctggaggaggagcagagggccaggaaggacctggagaagctggtgaggaaggtgctgaagaacatgaatgaccctgcctgggatgagaccaacctgtag

SEQ ID NO: 42760 - DNA, 1941 bp, Artificial Sequence
  derived and/or modified sequence
atgaccgacaacagcaacaaccagctggtggtgcgggccaagttcaactttcagcaaaccaatgaagatgagctgtcattcagcaaaggggatgtgatccacgtgaccagagtggaggagggcggatggtgggaaggaaccctgaacggtcggactggttggtttccctccaattacgtgcgcgaggtaaaggcttcggagaagcctgtgtcaccaaagagtggtactctcaagagtccaccaaaggggtttgacacgaccgctatcaataaatcttattataatgtggtacttcaaaatatcctggagaccgagaacgagtactccaaagagcttcaaacagtgctatcgacgtatctcaggcccttgcagaccagtgagaaactgtcttccgctaacatctcatatttaatgggtaatcttgaagaaatctgttcctttcagcaaatgttagtgcagtcactagaagaatgcaccaaacttcctgaggcccagcaaagggtgggtggttgttttcttaacttgatgcctcagatgaaaaccctatatctgacctactgcgcaaatcacccgtccgctgtcaacgtgcttactgaacacagcgaggagctgggcgagtttatggaaaccaaaggcgcttcatctccagggattctggttttaactaccggtctgtccaagccttttatgcggcttgataaataccctacgctactaaaggagctggaaagacatatggaggactatcacaccgaccgacaggatatccagaagagcatggccgcttttaagaatctgtctgcacaatgtcaagaagttcgcaagcgtaaggagctcgagcttcagatcttgaccgaggccattcgcaactgggaaggtgatgacatcaaaaccctgggcaatgttacctacatgtcacaggttctgatccagtgcgcagggagtgaagagaaaaatgagaggtatctgctactcttccctaacgttctgctaatgctctctgcctcgcctagaatgtctggcttcatttatcaggggaaactccccacaactgggatgactatcacaaaactggaagactccgagaaccaccggaacgcttttgagattagtgggagtatgattgagcgcatcctcgtgtcctgcaataatcagcaggacttgcaggagtgggtcgagcatttgcagaaacagaccaaagtgacgagtgtaggtaatcccactatcaaacctcacagcgtcccaagccatacgctccctagccatcccgttacaccttctagcaagcatgcagatagtaaaccagcacccctaacacccgcgtaccatactctaccccacccgtcgcaccacggaactccccacaccaccatcaactggggccccttggaaccacccaagacccctaagccttggtctttgtcctgcctacgccccgccccgcctctgcgcccttctgctgccctgtgttacaaggaggacctcagtaaaagccccaagaccatgaagaaactgcttccaaaaaggaaaccagaacggaaaccctcggacgaggagttcgcctcccgcaaatccactgccgctctggaagaagacgctcagattttgaaagtaatagaggcatattgtacttccgcaaagacacgacaaaccctcaactcctcttcacgaaaagagtcagctcctcaggtgcttctcccagaagaggagaaaattatcgtagaggaaaccaagtctaacgggcaaaccgtaatcgaggaaaaatccttggttgataccgtttacgcactcaaggacgaggtgcaggaattgaggcaggataacaagaagatgaaaaagtctctcgaggaggagcagcgggccagaaaggacctcgagaagcttgttcgcaaggtactcaaaaatatgaacgatcccgcgtgggatgagactaatctgtag

SEQ ID NO: 42761 - DNA, 1941 bp, Artificial Sequence
  derived and/or modified sequence
atgaccgacaacagcaacaaccagctggtggtgcgggccaagttcaattttcagcaaaccaacgaagatgaactgagtttctccaaaggtgacgtgattcacgtaacacgagtggaagagggcgggtggtgggaggggaccctgaatggcaggactggctggttcccctcgaactatgtgagggaagtcaaggcttcagagaagcccgtgagccctaaatcaggcaccttaaaaagcccgcccaagggctttgacaccaccgccattaacaaatcatattacaacgtcgtcctccagaacattctggagaccgaaaatgagtactcgaaagagttgcagaccgtgctgtctacatatctgagacctctgcagacgagtgagaaattatccagcgcaaatatcagctacctgatgggcaatttggaagaaatctgctcattccagcagatgctggttcagtctttggaggagtgcacaaagctccctgaagcacagcagcgcgtcggaggatgctttctgaatctgatgcctcaaatgaagactctctacctcacttactgcgcgaaccacccaagtgcagttaacgtgctgaccgagcattccgaggagctcggtgagttcatggagacaaaaggggcctcctccccaggaatccttgtgttaactacaggactgagtaaaccgttcatgcggctagacaagtatccaactctgctgaaggagctggaaagacacatggaggattatcatacagaccgacaggatattcagaagtcaatggctgcttttaaaaatctctccgctcagtgccaggaggtacggaagcgcaaagaactggagcttcaaatattaacagaagccatccgcaattgggaaggtgacgatattaagactctggggaacgtgacttacatgtcccaggtgttgatccaatgtgccggctctgaggagaaaaacgaacgatatttgctgctgttccctaatgtcctgttgatgttgagtgcctctccgcgtatgtccgggttcatctaccagggcaagttgccaacaacagggatgacgatcacaaagcttgaagacagcgagaaccacaggaacgcttttgaaatctccggatccatgatagagcggatactggtgagttgcaacaaccagcaagatctccaggagtgggtggaacatctgcagaaacagaccaaggtgacatctgtggggaatcccacaattaagccccattctgttccaagccatacactcccgagccaccccgtaacgcctagcagcaaacatgcagatagcaagcctgcacctctgactcccgcctaccacaccttgccccacccatctcatcacggcacaccacatacaacaataaattggggcccgctggaacctcccaaaacacccaagccttggagtctttcatgtcttaggcccgccccgcccctcagacccagtgccgccctgtgttataaggaggacctctctaagagccctaagaccatgaaaaagctgctgcctaaaaggaagccagaaaggaaaccctcagacgaggagttcgccagcaggaaaagtacagccgccctggaggaggacgcccagatcttgaaagtgattgaagcttactgtaccagtgctaagactaggcagactttgaactccagcagccggaaagaaagtgccccccaggtgctgcttcccgaggaggagaaaattattgtggaagaaacaaagagcaacggacagaccgttattgaggagaagtcactcgtcgatacagtttacgccctgaaggacgaggtccaggagcttcgacaggacaataagaaaatgaagaagtcactggaggaggaacagcgcgcgagaaaggacctggagaaacttgttcggaaggtgctaaagaatatgaatgatccagcttgggatgaaacaaatctgtag

SEQ ID NO: 42762 - DNA, 1941 bp, Artificial Sequence
  derived and/or modified sequence
atgacagataattcaaacaatcagctggtggtacgggcaaagttcaacttccaacagaccaatgaggatgagctctccttttccaagggtgacgtcatccacgtgacacgggttgaggagggtggctggtgggaggggacactgaatggaagaactggatggttcccgagtaactatgtgcgcgaagtgaaggcatccgaaaagccagtgagtcccaagtcaggcacacttaagtcccccccaaagggcttcgataccactgcaatcaacaagagttactataacgtggtgctgcagaacattctggagacggaaaacgaatattcaaaagagctgcagactgtgctatctacttacctgcgccctctccaaaccagcgaaaagcttagcagtgccaacatctcctacctgatgggtaacctggaagagatatgctctttccagcagatgctcgtccagagtcttgaggagtgtacgaaactgcctgaggcccaacaacgagttggcggttgtttcttaaatcttatgccacagatgaagacactttatctcacgtactgtgcgaaccacccctccgctgtgaatgtgttgacggagcatagcgaagaactaggagagtttatggagaccaagggcgcatcctccccaggtatactagttctcactacagggcttagcaagccgttcatgagactggacaagtacccaaccctgttgaaagaacttgaaagacatatggaagactaccataccgacagacaggacatacaaaagtccatggctgcattcaagaacctctcagcgcaatgccaggaagtccgtaaacgcaaagagctcgagctccagatcttgactgaggctatcagaaattgggagggggacgatatcaagaccctgggaaacgtgacatacatgtctcaagtccttatacagtgcgcagggtctgaggaaaaaaacgagcgctacttgctcttatttcctaacgtgcttttgatgctgagcgcaagcccacggatgtcaggctttatttaccagggcaagctaccgaccactggaatgaccatcaccaaactcgaggatagcgagaatcacaggaatgccttcgagatcagcggttctatgatcgagcggatcctggtctcctgcaataaccaacaggatctgcaggaatgggtggagcacctgcaaaagcagactaaggtgacatctgttggaaatcccactattaagccacattcagttccttcccacacactgccttctcatcctgtgacaccatctagcaagcatgcggactctaagcctgctcccctcactcccgcttaccacaccctgccccatccctctcatcacgggaccccgcataccactattaattggggcccactggaacctccaaagacccctaagccctggtccctttcttgccttcggcctgccccacctttgcggccatccgctgccctctgctataaagaggacctcagcaagagccctaaaacgatgaagaagctgctgcccaagaggaagccagagcgaaagccctctgacgaggagtttgcgtcacgaaagagcacagccgcactggaggaggatgcacagattctcaaggtcatagaagcatactgcacctccgccaagacgcgccagacgttaaactcttccagtcgcaaggagtctgctcctcaggttctccttccggaagaagagaagattatcgtggaggagactaagagcaacggccaaaccgtaatcgaggaaaagagcctggtggacacggtttatgctttgaaagacgaagtacaagaactaagacaagataacaaaaagatgaagaagtcactcgaagaggagcagagggctaggaaggacctggagaagttggtgcgaaaggtgttgaagaatatgaacgaccctgcctgggacgagaccaatctttag

SEQ ID NO: 42763 - DNA, 1941 bp, Artificial Sequence
  derived and/or modified sequence
atgactgacaattcgaataaccaactggtggtcagagccaagttcaactttcagcagacaaatgaggatgaactgtctttcagtaagggcgacgtgatccacgttacaagagtcgaggagggcggttggtgggaggggaccttgaacggcaggaccgggtggtttccttctaattatgtccgagaagtcaaggcctccgagaaaccagtaagccctaagtccggtactctcaaatctcctcccaaggggtttgacaccacagcgatcaataagagttattacaacgtggtgcttcagaacatactcgagacggagaacgagtatagtaaggaattacaaacggtcctgtctacgtacctccgccctctgcagacaagcgaaaaactcagctctgctaacatcagctaccttatgggtaatttggaggagatctgttcattccaacagatgttggttcaatctctggaagagtgtactaagctgcctgaggcgcagcaacgagttggcggatgcttcctgaacctgatgcctcaaatgaaaacactgtatctgacctactgcgccaatcacccttcagccgtgaacgtgctcactgaacattccgaagaactcggggagtttatggagactaaaggcgcttcttctcctggtatcctagttctgacaacgggcctctctaagcccttcatgaggttggacaaataccccactcttttgaaggaactggagcgccacatggaggattatcacacagacaggcaagatatacagaaaagcatggccgcattcaagaatctgagtgcacaatgtcaggaggtcagaaagcgcaaagagcttgagctgcagatcttgaccgaagctattaggaactgggaaggtgatgatataaagacactcgggaacgtgacttatatgtcgcaggttcttattcaatgcgcgggatccgaggaaaagaatgagcggtaccttcttctttttcccaacgtgctcctaatgctgtctgcatcccctcgcatgtccgggtttatataccagggtaaacttcccactaccggcatgacaatcacgaaactggaagattctgagaatcatagaaacgcttttgagatcagcgggtccatgatcgagaggatactagtctcttgcaataaccaacaggatcttcaagaatgggtggagcatctgcaaaaacagacaaaggtgacatcggtcggcaacccaaccatcaagccccacagcgtgccttctcataccctaccctctcacccggtgaccccgtcaagcaaacacgccgattctaagcccgcaccactgacccctgcttaccacactttgccacacccttcccaccatggcacaccacatactacgattaattggggccctcttgaaccgccaaaaaccccaaaaccatggtctttgtcgtgcctcaggcctgcgcctcccctcaggccttctgcagccctctgctacaaggaggatctgagcaagtctccgaagaccatgaagaagctgctcccaaaaaggaagcctgagcgaaagccgagtgacgaggaatttgcttctagaaaatctaccgcagctctcgaggaggacgcccaaatcctcaaggtgatcgaggcttattgtacctccgcaaagacgcgacagacactgaattcatccagccggaaagagtcagctccacaggtcctgctgccagaagaggagaaaattatcgtggaagagacaaaatcaaatgggcagactgtcatagaagagaagtcacttgtggatactgtctacgccctgaaggacgaggtgcaggaactgcgccaagacaataagaagatgaagaaatcacttgaggaggagcagcgagcgagaaaagatcttgaaaaactggtgcgcaaagtgctgaagaacatgaatgaccccgcttgggacgagaccaatttatag

SEQ ID NO: 42764 - protein, 678 aa, Artificial Sequence
  derived and/or modified sequence
MAAPGPLPAAALSPGAPTPRELMHGVAGVTSRAGRDREAGSVLPAGNRGARKASRRSSSRSMSRDNKFSKKDCLSIRNVVASIQTKEGLNLKLISGDVLYIWADVIVNSVPMNLQLGGGPLSRAFLQKAGPMLQKELDDRRRETEEKVGNIFMTSGCNLDCKAVLHAVAPYWNNGAETSWQIMANIIKKCLTTVEVLSFSSITFPMIGTGSLQFPKAVFAKLILSEVFEYSSSTRPITSPLQEVHFLVYTNDDEGCQAFLDEFTNWSRINPNKARIPMAGDTQGVVGTVSKPCFTAYEMKIGAITFQVATGDIATEQVDVIVNSTARTFNRKSGVSRAILEGAGQAVESECAVLAAQPHRDFIITPGGCLKCKIIIHVPGGKDVRKTVTSVLEECEQRKYTSVSLPAIGTGNAGKNPITVADNIIDAIVDFSSQHSTPSLKTVKVVIFQPELLNIFYDSMKKRDLSASLNFQSTFSMTTCNLPEHWTDMNHQLFCMVQLEPGQSEYNTIKDKFTRTCSSYAIEKIERIQNAFLWQSYQVKKRQMDIKNDHKNNERLLFHGTDADSVPYVNQHGFNRSCAGKNAVSYGKGTYFAVDASYSAKDTYSKPDSNGRKHMYVVRVLTGVFTKGRAGLVTPPPKNPHNPTDLFDSVTNNTRSPKLFVVFFDNQAYPEYLITFTA

SEQ ID NO: 42765 - DNA, 2037 bp, Artificial Sequence
  derived and/or modified sequence
atggcggccccgggacccctaccagctgctgcgctgtctccaggggcccccacgccccgagagctgatgcacggagtggctggagtgacgagtcgcgctgggcgggacagagaggctggaagtgtcctcccagcgggaaatcggggcgcgcgaaaggcttcccgtcggagctcatctcggagcatgagtcgcgacaacaagttttccaaaaaagactgtttgagtattcgcaatgtcgtcgcctctatccagactaaagagggcttaaatctcaagcttatcagtggtgatgtactgtacatttgggctgacgttattgtcaactcagtccctatgaatttgcagctcggcgggggccctctgtctcgcgcgtttcttcagaaagcaggacccatgttgcaaaaggaattggacgataggcgaagggaaaccgaggagaaagtgggcaacatcttcatgacgagtggatgtaacctggactgcaaagcagtgctgcatgcagtagccccttactggaacaacggggcagagacgagctggcagataatggccaacataatcaagaagtgtctgactacagtggaggtcctgagcttttcatctatcaccttccccatgatcgggacagggtccctacagtttcccaaggctgtattcgcaaagctcatcctctctgaagtgtttgagtattcttcgagcactcgaccaattacctctcccctccaggaggtgcattttctcgtgtataccaacgatgatgaaggatgtcaggccttcttagatgagtttacaaattggtcccggattaatcccaacaaggcccgcattcctatggcgggcgacacccaaggtgttgtgggtacagtgtctaagccgtgcttcactgcctacgaaatgaagattggtgccattacctttcaggtggccactggagatatcgccaccgagcaggttgacgtgattgtgaacagcacggcccgtaccttcaataggaaatctggagttagtcgcgcaatccttgagggagccggacaggcagtggaaagcgaatgcgccgtcctagcagcccagcctcatcgggactttatcatcactcctggaggatgtttgaaatgcaagattataattcatgtgcctggcggaaaagatgtaaggaagacggtgacgagtgtgcttgaggagtgtgagcagagaaagtatacatccgtcagtctccccgctatcggtaccggaaacgcagggaagaatcccattacagttgccgataacattattgatgccatcgtggactttagtagccagcactccaccccctcattgaagacggttaaagtggtaatatttcagccagagctgctcaacatattctatgattcaatgaaaaagcgggacctttctgcctccttgaattttcaatcaacattcagcatgacaacatgtaacctccctgagcattggacagatatgaaccaccagttattttgcatggttcagctggagccagggcagtcggaatacaatacaatcaaagacaaattcacccgcacatgttcctcgtatgctatcgagaagatcgaaagaatccagaatgctttcctttggcaatcataccaggtgaaaaaaagacagatggatatcaagaatgatcataaaaacaatgagaggttattgttccacggaactgacgctgacagtgtgccctatgtaaaccagcatgggttcaataggtcctgtgcagggaaaaacgccgtctcctacggtaagggaacatatttcgccgtggacgctagctacagtgctaaagatacttattccaaacctgatagcaacgggcgcaaacacatgtacgtagtaagggtgctgacaggagttttcacaaaaggaagagccggtctggtcacacccccacccaagaacccccacaaccccaccgatcttttcgactccgtcaccaacaatacaagatcccctaagctcttcgtggtattctttgataaccaggcttatccggagtacttaatcacctttaccgcttag

SEQ ID NO: 42766 - DNA, 2037 bp, Artificial Sequence
  derived and/or modified sequence
atggccgcccctggccccctgcctgctgctgccctgagccctggggcccccaccccccgggagctgatgcacggcgtggccggcgtgaccagcagagctggccgggaccgggaggccggctctgtgctgcctgctggcaacagaggagccaggaaggccagcagaagaagcagcagccgctccatgagccgggacaacaagttcagcaagaaggactgcctgagcatcagaaatgtggtggccagcatccagaccaaggagggcctgaacctgaagctgatctctggagatgtgctgtacatctgggcagatgtgattgtgaacagcgtgcccatgaacctgcagctgggcggcggccccctgagccgggccttcctgcagaaggccggccccatgctgcagaaggagctggatgacagaagaagagaaacagaggagaaggtgggcaacatcttcatgaccagcggctgcaacctggactgcaaggctgtgctgcatgctgtggccccctactggaacaacggggctgagacctcctggcagatcatggccaacatcatcaagaagtgcctgaccaccgtggaggtgctgtccttcagcagcatcaccttccccatgattggaacaggcagcctgcagttccccaaggctgtgtttgccaagctgatcctgtctgaggtgtttgagtacagcagcagcacccggcccatcaccagccccctgcaggaggtgcacttcctggtgtacaccaatgatgatgagggctgccaggccttcctggatgagttcaccaactggagccgcatcaaccccaacaaggcccgcatccccatggccggggacacccagggcgtggtgggcaccgtgtccaagccctgcttcaccgcctatgagatgaagattggagccatcaccttccaggtggccaccggggacatcgccacagagcaggtggatgtgattgtgaacagcacagcccggaccttcaacaggaagtctggagtgtcccgggccatcctggagggcgccggccaggccgtggagagtgaatgtgctgtgctggccgcccagccccaccgggacttcatcatcacccctgggggctgcctgaagtgcaagatcatcatccacgtgcctgggggcaaggatgtgaggaagacagtgacctctgtgctggaggagtgtgagcagaggaagtacacctctgtgtccctgcctgccatcggcactggaaatgccggcaagaaccccatcaccgtggccgacaacatcattgatgccatcgtggacttcagcagccagcacagcacccccagcctgaagacagtgaaggtggtgatcttccagcctgagctgctgaacatcttctatgacagcatgaagaagagggacctgagcgccagcctgaacttccagagcaccttctccatgaccacctgcaacctgcctgagcactggacagacatgaaccaccagctgttctgcatggtgcagctggagcccggccagagcgagtacaacaccatcaaggacaagttcaccaggacctgcagcagctatgccatcgagaagattgagcgcatccagaatgccttcctgtggcagagctaccaggtgaagaagaggcagatggacatcaagaatgaccacaagaacaatgaaaggctgctcttccatggaacagatgctgacagcgtgccctacgtgaaccagcacggcttcaacagaagctgtgccggcaagaatgctgtgtcctatggcaagggcacctactttgctgtggatgccagctacagcgccaaggacacctacagcaagccagacagcaatggaaggaagcacatgtatgtggtgcgggtgctgactggagtcttcaccaagggccgggccggcctggtgaccccaccacccaagaacccccacaaccccacagacctgtttgattctgtgaccaacaacaccaggagccccaagctgtttgtggtgttctttgacaaccaggcctacccagagtacctgatcaccttcaccgcctag

SEQ ID NO: 42767 - DNA, 2037 bp, Artificial Sequence
  derived and/or modified sequence
atggccgcccccggccccctgcccgccgccgccctgagccccggcgccccaacacccagagaactgatgcacggcgtagctggggtgacgagtagagccggtcgagatcgtgaagccggttcagttctgcctgctggcaaccgcggagcacggaaggctagccgacgcagttcatccagatctatgagccgggacaataaattttccaagaaagactgcctctctattagaaatgtggtggcttcaatccagacgaaagaaggcctgaatctcaaactcatctccggggatgtcttatatatttgggccgatgttattgtgaacagtgtgcccatgaatctccagctggggggtggtccgctgagcagggctttcctgcagaaggctggccctatgctgcaaaaagagcttgacgatcgaaggcgagaaactgaagaaaaagttggaaatattttcatgactagtggttgcaacctagattgtaaagcagtcctccatgccgttgccccttactggaacaacggggctgagacctcatggcagataatggccaatattattaagaaatgcctgacaactgtggaggtgttatcttttagttctattacttttccgatgatcggcaccggaagcttacagtttcctaaggctgtcttcgccaagctcatcctgtctgaggtcttcgaatattccagcagcactcgccctatcacttcacctctgcaagaagtacattttctagtgtacacaaatgatgacgaaggttgtcaggctttcctggacgagtttactaactggagccgaatcaatcctaataaggccagaatccctatggccggtgacacacagggcgtggttgggaccgtgagcaaaccttgcttcacagcttacgaaatgaagattggggctatcaccttccaggtcgccacaggcgacatagcaactgaacaggtggacgtgattgtgaactctactgcacgcacctttaatcgcaaatctggagtcagcagggcgattcttgagggtgcaggacaagcggttgagagcgagtgtgctgtgcttgcagctcagcctcatcgggactttattatcacccccggcggctgtctgaagtgcaagatcataattcacgttccaggggggaaggacgtgcgcaagacagtcacatccgtgctggaggagtgcgagcaaagaaaatacactagcgttagcctacccgccataggaactggcaatgctggcaagaaccccataaccgtcgctgacaatattatagacgccattgtggatttttccagtcagcacagcacaccatcgctgaagacagtgaaagtcgttatctttcagcctgaactgctgaacatcttttatgactcaatgaaaaagagagatctgtctgcaagtttgaatttccagtcaacatttagcatgaccacctgcaacctgcctgaacattggactgatatgaatcaccagctcttttgtatggtacagctggagcccggccagtcagaatataacacaatcaaagacaagtttacgcgaacttgtagctcctacgcaatcgaaaaaatcgaaagaattcagaacgcctttctttggcagtcctatcaggtgaagaagcgccagatggatatcaagaacgaccacaaaaataacgagagactgctttttcacgggactgacgctgatagtgtgccatatgtcaatcagcacggtttcaaccggtcttgtgctggtaaaaatgctgtttcttacggcaaaggcacatacttcgctgtagacgccagctacagtgctaaggacacgtatagcaagcccgactcgaacggtaggaagcacatgtacgtggtcagagtgttaactggcgtgttcaccaaaggaagagctggcttggtcaccccccctccaaagaaccctcataatcccacggacttgttcgactccgtcacaaacaacacccgaagccccaagttgttcgtggtgttcttcgacaatcaggcataccctgagtacctaatcacatttaccgcatag

SEQ ID NO: 42768 - DNA, 2156 bp, Artificial Sequence
  derived and/or modified sequence
agagaaaagaagttcgaggcacaagcctgttgggtggggcgcaactgcagtcccagcgagctgaggatggctgcgccaggcccccttcctgccgctgctctgagtccaggggctccgacccccagagaacttatgcacggagttgcaggtgttacttccagagccggacgagatcgggaggcggggagcgtgctgccggccgggaaccgtggggcgcggaaggcctcccggcgctcttcctcccggagtatgtccagagacaacaagttcagcaagaaagattgtctttcaatcaggaatgttgtagcttcaatccaaaccaaagaaggtctgaatctcaagttgataagtggagatgttctgtacatctgggccgatgtcattgtcaacagcgttcccatgaatcttcagcttggaggaggaccactatctcgggcatttttgcagaaagctggtcccatgctccagaaagagttagatgacagaaggcgggaaacagaggaaaaagtaggtaacatattcatgacaagcggctgcaatctggactgcaaagctgtgctccatgctgtggctccatactggaataatggagcagagacttcttggcagatcatggcaaatataatcaagaaatgtttgacaactgtagaagtgctatctttctcatcaatcacatttcccatgattggaacaggaagtttgcagtttcccaaagctgtttttgctaaactaatcctttcagaagtgttcgaatacagtagcagcacaaggccgataactagccctttacaagaagtccactttctggtatatacaaatgacgatgaaggctgtcaggcatttttagatgaattcactaactggtcaagaataaatcccaacaaggccaggattcccatggcaggagatacccaaggtgtggtcgggactgtctctaagccttgtttcacagcatatgaaatgaaaatcggtgcaattacttttcaggttgctactggagatatagccactgaacaggtagatgttattgtaaactcaacagcaaggacatttaatcggaaatcaggtgtgtcaagagctattttagaaggtgctggacaagctgtggaaagtgaatgtgctgtactagctgcacagcctcacagagattttataattacaccaggtggatgcttaaagtgcaaaataataattcatgttcctgggggaaaagatgtcaggaaaacggtcaccagtgttctagaagagtgtgaacagaggaagtacacatcggtttcccttccagccattggaacaggaaatgccggaaaaaaccctatcacagttgctgataacataatcgatgctattgtagacttctcatcacaacattccaccccatcattaaaaacagttaaagttgtcatttttcaacctgagctgctaaatatattctacgacagcatgaaaaaaagagacctctctgcatcactgaactttcagtccacattctccatgactacatgtaatcttcctgaacactggactgacatgaatcatcagctgttttgcatggtccagctagagccaggacaatcagaatataataccataaaggacaagttcacccgaacttgttcttcctacgcaatagagaagattgagaggatacagaatgcatttctctggcagagctaccaggtaaagaaaaggcaaatggatatcaagaatgaccataagaataatgagagactcctcttccatgggacagatgcagactcagtgccatatgtcaatcagcacggctttaatagaagttgtgctgggaaaaatgctgtatcctatggaaaaggaacctattttgctgtggatgccagttattctgccaaggacacctactccaagccagacagcaatgggagaaagcacatgtacgttgtgcgagtacttactggagtcttcacaaagggacgtgcaggattagtcacccctccacccaagaatcctcacaatcccacagatctctttgactcagtgacaaacaatacacgatctccaaagctatttgtggtattctttgataatcaggcttacccagaatatctcataactttcacggcttaaaaatatttttatcatcaaagagatgatttaagtcatctgtaagaacaacatgc

SEQ ID NO: 42769 - DNA, 2037 bp, Artificial Sequence
  derived and/or modified sequence
atggccgctcctggcccactgcccgcagctgcacttagccccggagccccaacgccccgtgagcttatgcacggtgtggccggtgtgacgtctcgggcaggacgtgaccgcgaggcgggttccgtgcttcctgccggtaatcggggagctagaaaagcttccaggcgctcatccagccgctctatgagtcgggataataagttctcaaagaaggattgtttatcgatccgcaatgtagtagctagtattcaaaccaaagagggcttgaatcttaaactgatttcaggcgatgtgctctatatatgggctgacgttatagtcaacagtgtccccatgaacctgcagctgggcggaggaccactaagtcgagctttcctccagaaggctggtcctatgctgcagaaagagctggatgaccggcgacgcgagaccgaagagaaagtgggaaacatttttatgaccagcggctgcaatctcgactgcaaggccgtgttgcacgctgttgccccttactggaacaacggtgcagagacctcatggcagatcatggccaacattatcaagaaatgtctcacaacagtggaggtgctatcgtttagctctatcacttttccgatgatcgggaccggatctcttcagttccccaaggccgttttcgctaagctgattttatcagaagtattcgagtattcaagctccacccgacctatcacatctccactacaagaggtgcacttcctggtgtataccaacgacgacgaggggtgtcaggcatttcttgacgagttcactaattggtccagaattaatcctaacaaagctcggatccccatggcaggcgacacacaaggagtggtgggtactgtgtccaaaccctgctttactgcatacgaaatgaaaatcggagcaatcactttccaggtcgcaacaggggacatcgcgaccgaacaggtggacgtgatcgtgaactctaccgccaggacctttaatcgcaaatccggcgtgagtcgagcaatcttggagggagccggacaagccgttgaatctgagtgcgccgtcctggctgcccagcctcacagagatttcatcatcacccctggcggttgcctcaaatgcaagatcatcatccacgttcctggcggtaaagacgtgcgaaaaacagttacatccgtgcttgaggaatgtgaacagaggaaatatacttctgttagcctccctgctatcggtactgggaatgccggtaaaaacccaatcaccgtagcggataacattatcgacgccatcgtggacttctcatcacaacacagtacacctagtctcaagacggttaaggtcgtgatattccagcccgaacttctgaacatcttttacgactctatgaagaaaagagacctttcggcatccctgaacttccagagcacattctccatgacaacatgtaatctccccgagcactggacagacatgaaccaccagctattctgcatggtgcagttggagccgggacagtccgagtacaataccataaaggacaaatttactagaacttgttcatcatatgctatcgagaaaatcgagagaattcaaaacgctttcctgtggcagtcttatcaggtgaagaaacgtcagatggatataaagaacgaccacaaaaacaacgaaagactcctgtttcacggaactgacgcagatagcgtaccatacgttaatcagcacgggtttaataggtcctgtgcaggcaagaacgccgtgtcctacggaaagggtacatacttcgccgtcgacgcctcctactcagctaaagatacatacagcaagccggactctaacggcagaaagcacatgtatgtggtgagggtactgacaggggtgtttacaaaagggagagcaggactggtgaccccccctccaaagaacccgcacaatcccaccgacctttttgactccgtaaccaataatacccgctctccaaagcttttcgtcgtgttcttcgacaaccaggcctacccggaatacctaataaccttcactgcttag

SEQ ID NO: 42770 - DNA, 2037 bp, Artificial Sequence
  derived and/or modified sequence
atggccgcccccggccccctgcccgccgccgccctgagccccggcgcccccacccccagagagctgatgcacggcgtggccggcgtgaccagcagagccggcagagacagagaggccggcagcgtgctgcccgccggcaacagaggcgccagaaaggccagcagaagaagcagcagcagaagcatgagcagagacaacaagttcagcaagaaggactgcctgagcatcagaaacgtggtggccagcatccagaccaaggagggcctgaacctgaagctgatcagcggcgacgtgctgtacatctgggccgacgtgatcgtgaacagcgtgcccatgaacctgcagctgggcggcggccccctgagcagagccttcctgcagaaggccggccccatgctgcagaaggagctggacgacagaagaagagagaccgaggagaaggtgggcaacatcttcatgaccagcggctgcaacctggactgcaaggccgtgctgcacgccgtggccccctactggaacaacggcgccgagaccagctggcagatcatggccaacatcatcaagaagtgcctgaccaccgtggaggtgctgagcttcagcagcatcaccttccccatgatcggcaccggcagcctgcagttccccaaggccgtgttcgccaagctgatcctgagcgaggtgttcgagtacagcagcagcaccagacccatcaccagccccctgcaggaggtgcacttcctggtgtacaccaacgacgacgagggctgccaggccttcctggacgagttcaccaactggagcagaatcaaccccaacaaggccagaatccccatggccggcgacacccagggcgtggtgggcaccgtgagcaagccctgcttcaccgcctacgagatgaagatcggcgccatcaccttccaggtggccaccggcgacatcgccaccgagcaggtggacgtgatcgtgaacagcaccgccagaaccttcaacagaaagagcggcgtgagcagagccatcctggagggcgccggccaggccgtggagagcgagtgcgccgtgctggccgcccagccccacagagacttcatcatcacccccggcggctgcctgaagtgcaagatcatcatccacgtgcccggcggcaaggacgtgagaaagaccgtgaccagcgtgctggaggagtgcgagcagagaaagtacaccagcgtgagcctgcccgccatcggcaccggcaacgccggcaagaaccccatcaccgtggccgacaacatcatcgacgccatcgtggacttcagcagccagcacagcacccccagcctgaagaccgtgaaggtggtgatcttccagcccgagctgctgaacatcttctacgacagcatgaagaagagagacctgagcgccagcctgaacttccagagcaccttcagcatgaccacctgcaacctgcccgagcactggaccgacatgaaccaccagctgttctgcatggtgcagctggagcccggccagagcgagtacaacaccatcaaggacaagttcaccagaacctgcagcagctacgccatcgagaagatcgagagaatccagaacgccttcctgtggcagagctaccaggtgaagaagagacagatggacatcaagaacgaccacaagaacaacgagagactgctgttccacggcaccgacgccgacagcgtgccctacgtgaaccagcacggcttcaacagaagctgcgccggcaagaacgccgtgagctacggcaagggcacctacttcgccgtggacgccagctacagcgccaaggacacctacagcaagcccgacagcaacggcagaaagcacatgtacgtggtgagagtgctgaccggcgtgttcaccaagggcagagccggcctggtgacccccccccccaagaacccccacaaccccaccgacctgttcgacagcgtgaccaacaacaccagaagccccaagctgttcgtggtgttcttcgacaaccaggcctaccccgagtacctgatcaccttcaccgcctag

SEQ ID NO: 42771 - protein, 539 aa, Artificial Sequence
  derived and/or modified sequence
MGHCRLCHGKFSSRSLRSISERAPGASMERPSAEERVLVRDFQRLLGVAVRQDPTLSPFVCKSCHAQFYQCHSLLKSFLQRVNASPAGRRKPCAKVGAQPPTGAEEGACLVDLITSSPQCLHGLVGWVHGHAASCGALPHLQRTLSSEYCGVIQVVWGCDQGHDYTMDTSSSCKAFLLDSALAVKWPWDKETAPRLPQHRGWNPGDAPQTSQGRGTGTPVGAETKTLPSTDVAQPPSDSDAVGPRSGFPPQPSLPLCRAPGQLGEKQLPSSTSDDRVKDEFSDLSEGDVLSEDENDKKQNAQSSDESFEPYPERKVSGKKSESKEAKKSEEPRIRKKPGPKPGWKKKLRCEREELPTIYKCPYQGCTAVYRGADGMKKHIKEHHEEVRERPCPHPGCNKVFMIDRYLQRHVKLIHTEVRNYICDECGQTFKQRKHLLVHQMRHSGAKPLQCEVCGFQCRQRASLKYHMTKHKAETELDFACDQCGRRFEKAHNLNVHMSMVHPLTQTQDKALPLEAEPPPGPPSPSVTTEGQAVKPEPT

SEQ ID NO: 42772 - protein, 614 aa, Artificial Sequence
  derived and/or modified sequence
MKRDRLGRFLSPGSSRQCGASDGGGGVSRTRGRPSLSGGPRVDGATARRAWGPVGSCGDAGEDGADEAGAGRALAMGHCRLCHGKFSSRSLRSISERAPGASMERPSAEERVLVRDFQRLLGVAVRQDPTLSPFVCKSCHAQFYQCHSLLKSFLQRVNASPAGRRKPCAKVGAQPPTGAEEGACLVDLITSSPQCLHGLVGWVHGHAASCGALPHLQRTLSSEYCGVIQVVWGCDQGHDYTMDTSSSCKAFLLDSALAVKWPWDKETAPRLPQHRGWNPGDAPQTSQGRGTGTPVGAETKTLPSTDVAQPPSDSDAVGPRSGFPPQPSLPLCRAPGQLGEKQLPSSTSDDRVKDEFSDLSEGDVLSEDENDKKQNAQSSDESFEPYPERKVSGKKSESKEAKKSEEPRIRKKPGPKPGWKKKLRCEREELPTIYKCPYQGCTAVYRGADGMKKHIKEHHEEVRERPCPHPGCNKVFMIDRYLQRHVKLIHTEVRNYICDECGQTFKQRKHLLVHQMRHSGAKPLQCEVCGFQCRQRASLKYHMTKHKAETELDFACDQCGRRFEKAHNLNVHMSMVHPLTQTQDKALPLEAEPPPGPPSPSVTTEGQAVKPEPT

SEQ ID NO: 42773 - DNA, 4611 bp, Artificial Sequence
  derived and/or modified sequence
gcacttccggcgacgggccccctccgcgcgtactgcgggccccacgggtgttagtggcgggggcggcagagtccgggtgggttgtcgcgacggagccgggcctcttcgccgtcttgagacggggctggcgagaagggcccctcacggagttgccatgggcgtctaaccgcggcagccaggcccctctctacgtgagaccccggcccccctcccctttctgcagcccgcccgccacctgcgcgccgcgtggcctccgccggcgcctgcccgccccgcgcctccgtctcccacggagcaggccgggctctcgccatgggtcactgtcgcctctgccacgggaagttttcctcgagaagcctgcgcagcatctccgagagggcgcctggagcgagcatggagaggccatccgcagaggagcgcgtgctcgtacgggacttccagcgcctgcttggtgtggctgtccgccaggaccccaccttgtctccgtttgtctgcaagagctgccacgcccagttctaccagtgccacagccttctcaagtccttcctgcagagggtcaacgcctccccggctggtcgccggaagccttgtgcaaaggtcggtgcccagcccccaacaggggcagaggagggagcgtgtctggtggatctgatcacatccagcccccagtgcctgcacggcttggtggggtgggtgcatggacatgcggccagctgcggggccctgccccaccttcagaggacactgtcctccgagtactgcggcgtcatccaggtcgtgtggggctgcgaccagggccacgactacaccatggataccagctccagctgcaaggccttcttgctggacagtgcgctggcagtcaagtggccatgggacaaagagacggcgccacggctgccccagcaccgagggtggaaccctggggatgcccctcagacctcccagggtagagggacagggaccccagttggggctgagaccaagaccctgcccagcacggatgtggcccagcctccttcggacagcgacgcggtggggcccaggtcgggcttcccacctcagccaagcctgcccctttgcagggccccagggcagttgggtgagaagcagcttccatcttcaacctcggatgatcgggtaaaagacgagttcagtgacctttctgagggagacgtcttgagtgaagatgaaaatgacaagaagcaaaatgcccagtcttcggacgagtcctttgagccttacccagaaaggaaagtctctggtaagaagagtgaaagcaaagaagccaagaagtctgaagaaccaagaattcggaagaagccgggacccaagcccggatggaagaagaagcttcgttgtgagagggaggagcttcccaccatctacaagtgtccttaccagggctgcacggccgtgtaccgaggcgctgacggcatgaagaagcacatcaaggagcaccacgaggaggtccgggagcggccctgcccccaccctggctgcaacaaggttttcatgatcgaccgctacctgcagcgccacgtgaagctcatccacacagaggtgcggaactatatctgtgacgaatgtggacaaaccttcaagcagcggaagcaccttctcgtccaccaaatgcgacattcgggagccaagcctttgcagtgtgaggtctgtgggttccagtgcaggcagcgggcatccctcaagtaccacatgaccaaacacaaggctgagactgagctggactttgcctgtgaccagtgtggccggcggtttgagaaggcccacaacctcaatgtacacatgtccatggtgcacccgctgacacagacccaggacaaggccctgcccctggaggcggaaccaccacctgggccaccgagcccctctgtgaccacagagggccaggcggtgaagcccgaacccacctgaggacggcagtgaggatgagcacctctagcagcctggactccgcagtggctgtgtcagcctcacccttcgtgtgcacccgcatgggagggtcggagggtgctgcccgcccttggtgctggaggcgggcttggtgtccggctcaagtagccttcctctgctctgggaccagtggtttattttcccgcaaacgctgagtgactcggggccggacagttcataaataattgattcctttccccactaaagcagtcgaggagatttgtaatccactttttagtgcaacaagagctccatgttatgcttgtaataaattatttacacgggagctgggctggtgtgcagtggcaggtcccgtcagaagagatgaggctcctgggacaggtcagcgtcaggggcagcctgctgtctgctctggagggcggcgctcacctctgggtcgcagtccccacgatcagccagcagctgtgagagaggagcaggtcctcagcccatgccgcccactaggcctcagaccacaggggaggggctctggcagaaatagtcgagttgtattgccagccaggcaggcacatggcccaggcagctgtcaattctcatgtcccccacatggcccaaggtgggcatcttgacgttacctctgccacgtgtgagaagctctttttcgggcaccgaggtattaactgcagcagaaaaagacgagcttttgttatcagttccacggggttgccctagagagaaaacaggcaaactcacaggttagaagacatacagaaacagggctggtgtgtcccccatagtctgcatgctgtgccggaacattctttggcagaaggagcctccggctggggggagctcccctggaggtgggactggcccttgcacctgcctgacccttgagctccaggctcctgccagctggaggtgaaactgtgcttgtatccccagccacgaagagctggaccagcttcaagtacatgtccacagcaacatgcaggaaggcctcttccctgatggccgcgtcttcatggaagtaggagagaagactagaggtaaagacatagtgacaaatggctacagactgctggaaaggtagcaggtgatgccaagggatactgctcatctgtggagcagaggcacagacaacccttcccatctggcgggacccagaggtgctgagatgggggtctgggaaacactgcccagccctgaccagccctgtgggtggaggtacctgtaaaaagcgaaaggcagcagcctggtgtgctgatccggggccacacggaggaggagccgccccagcctgaggtctgcaacaccaagaagtggctcaggcaactctggacatctctgcctattatcagtgctggggacacccctgggggtcgggacgtgtaccctgggaggcctggctgtggggatagtgtggggcgaacagcctgagctgaggatacccaggtacctgtcagcagctgggagaggatgggggggtcgacctcttgcaggagggtgggtgtggtgcagagagaggcagtccccatgataggcccattggtcctggggttgaccagtgagccagtaaattatcttattgctttaaacaagtttgtgcttaatctgtcccaactaaaatggagcttataaacttacttagcaaggaacctcaaggagggctcgttcttaaccatttgcaagatgcctctgaaaagagcggccctccgcatttgtgcctcagcagcgtgtttcttaccactctctgtcaactgaaagagtgccagccaggatatcttcctcttctctaaacactcgaggattgctgcacaaacgtggaaagcctttggcaggtctgtggtgctctgtaaaccgcaggagaccaaccctgagaatggccgacctggtgctcccatgggtaggagggtacagccctcagcacagaagagggcatttcctctttgcttattgtaagtcttaaaactggtgacagttttacctatagaaggtaatactgggcctctggacagaagaggctcaggtaggaggccagggacttcgagcacccacaccaaggctgctgcaccacgtcctcaaataagacattaaaagaaaggcccacaggccggatgcagtggctcatgcctgtaatcccaacactttgggaggccgaggtcggcggatcactgaggccagttcaagaccagcctggcaatatggtgaaaccccgtctctactaaaaatacaaaaattagccgggtgtgacagactcacgcctgtaatcccagctactcgggaggctgatgcaggagaattgcttgaacccaggaggctgaggttgcagtgagctgagatcacaccactgcactccagcctgggtgacagagtgagacccccatctcaaaaaaaaaaaaaaaaaacccacggcctgggagttctcactcacacttccgcaaacacaaggagctcctgagctagtctggaaaccctgacttggaagctggctgcctggtgcccctgcctggcccacagtgggagaggacaccttggctggtaaggtctgacttacatttgaggtcagatgtgacgacagcaggcccatcaaggagaagaagaaaaggaaaaccaatagctgtaaataaaaacgtgcacttattattacattaaaattacctgtgctgtcattctaaa

SEQ ID NO: 42774 - DNA, 1620 bp, Artificial Sequence
  derived and/or modified sequence
atgggccactgcagactgtgccacggcaagttcagcagcagaagcctgagaagcatcagcgagagagcccccggcgccagcatggagagacccagcgccgaggagagagtgctggtgagagacttccagagactgctgggcgtggccgtgagacaggaccccaccctgagccccttcgtgtgcaagagctgccacgcccagttctaccagtgccacagcctgctgaagagcttcctgcagagagtgaacgccagccccgccggcagaagaaagccctgcgccaaggtgggcgcccagccccccaccggcgccgaggagggcgcctgcctggtggacctgatcaccagcagcccccagtgcctgcacggcctggtgggctgggtgcacggccacgccgccagctgcggcgccctgccccacctgcagagaaccctgagcagcgagtactgcggcgtgatccaggtggtgtggggctgcgaccagggccacgactacaccatggacaccagcagcagctgcaaggccttcctgctggacagcgccctggccgtgaagtggccctgggacaaggagaccgcccccagactgccccagcacagaggctggaaccccggcgacgccccccagaccagccagggcagaggcaccggcacccccgtgggcgccgagaccaagaccctgcccagcaccgacgtggcccagccccccagcgacagcgacgccgtgggccccagaagcggcttccccccccagcccagcctgcccctgtgcagagcccccggccagctgggcgagaagcagctgcccagcagcaccagcgacgacagagtgaaggacgagttcagcgacctgagcgagggcgacgtgctgagcgaggacgagaacgacaagaagcagaacgcccagagcagcgacgagagcttcgagccctaccccgagagaaaggtgagcggcaagaagagcgagagcaaggaggccaagaagagcgaggagcccagaatcagaaagaagcccggccccaagcccggctggaagaagaagctgagatgcgagagagaggagctgcccaccatctacaagtgcccctaccagggctgcaccgccgtgtacagaggcgccgacggcatgaagaagcacatcaaggagcaccacgaggaggtgagagagagaccctgcccccaccccggctgcaacaaggtgttcatgatcgacagatacctgcagagacacgtgaagctgatccacaccgaggtgagaaactacatctgcgacgagtgcggccagaccttcaagcagagaaagcacctgctggtgcaccagatgagacacagcggcgccaagcccctgcagtgcgaggtgtgcggcttccagtgcagacagagagccagcctgaagtaccacatgaccaagcacaaggccgagaccgagctggacttcgcctgcgaccagtgcggcagaagattcgagaaggcccacaacctgaacgtgcacatgagcatggtgcaccccctgacccagacccaggacaaggccctgcccctggaggccgagcccccccccggcccccccagccccagcgtgaccaccgagggccaggccgtgaagcccgagcccacctag

SEQ ID NO: 42775 - DNA, 1845 bp, Artificial Sequence
  derived and/or modified sequence
atgaagagagacagactgggcagattcctgagccccggcagcagcagacagtgcggcgccagcgacggcggcggcggcgtgagcagaaccagaggcagacccagcctgagcggcggccccagagtggacggcgccaccgccagaagagcctggggccccgtgggcagctgcggcgacgccggcgaggacggcgccgacgaggccggcgccggcagagccctggccatgggccactgcagactgtgccacggcaagttcagcagcagaagcctgagaagcatcagcgagagagcccccggcgccagcatggagagacccagcgccgaggagagagtgctggtgagagacttccagagactgctgggcgtggccgtgagacaggaccccaccctgagccccttcgtgtgcaagagctgccacgcccagttctaccagtgccacagcctgctgaagagcttcctgcagagagtgaacgccagccccgccggcagaagaaagccctgcgccaaggtgggcgcccagccccccaccggcgccgaggagggcgcctgcctggtggacctgatcaccagcagcccccagtgcctgcacggcctggtgggctgggtgcacggccacgccgccagctgcggcgccctgccccacctgcagagaaccctgagcagcgagtactgcggcgtgatccaggtggtgtggggctgcgaccagggccacgactacaccatggacaccagcagcagctgcaaggccttcctgctggacagcgccctggccgtgaagtggccctgggacaaggagaccgcccccagactgccccagcacagaggctggaaccccggcgacgccccccagaccagccagggcagaggcaccggcacccccgtgggcgccgagaccaagaccctgcccagcaccgacgtggcccagccccccagcgacagcgacgccgtgggccccagaagcggcttccccccccagcccagcctgcccctgtgcagagcccccggccagctgggcgagaagcagctgcccagcagcaccagcgacgacagagtgaaggacgagttcagcgacctgagcgagggcgacgtgctgagcgaggacgagaacgacaagaagcagaacgcccagagcagcgacgagagcttcgagccctaccccgagagaaaggtgagcggcaagaagagcgagagcaaggaggccaagaagagcgaggagcccagaatcagaaagaagcccggccccaagcccggctggaagaagaagctgagatgcgagagagaggagctgcccaccatctacaagtgcccctaccagggctgcaccgccgtgtacagaggcgccgacggcatgaagaagcacatcaaggagcaccacgaggaggtgagagagagaccctgcccccaccccggctgcaacaaggtgttcatgatcgacagatacctgcagagacacgtgaagctgatccacaccgaggtgagaaactacatctgcgacgagtgcggccagaccttcaagcagagaaagcacctgctggtgcaccagatgagacacagcggcgccaagcccctgcagtgcgaggtgtgcggcttccagtgcagacagagagccagcctgaagtaccacatgaccaagcacaaggccgagaccgagctggacttcgcctgcgaccagtgcggcagaagattcgagaaggcccacaacctgaacgtgcacatgagcatggtgcaccccctgacccagacccaggacaaggccctgcccctggaggccgagcccccccccggcccccccagccccagcgtgaccaccgagggccaggccgtgaagcccgagcccacctag

SEQ ID NO: 42776 - DNA, 1620 bp, Artificial Sequence
  derived and/or modified sequence
atggggcactgtagactttgtcatgggaaattcagttcaagaagcctgcggtcaatctctgaacgagcacccggggcttctatggaaaggcctagtgctgaggagagagtgcttgtcagggacttccagagactgctgggcgtggctgtcagacaagaccctactctcagccccttcgtatgcaaatcatgccatgcacagttctatcagtgtcatagtctgctcaaatccttcctacagagagtgaacgctagccctgccgggcggcgcaaaccctgtgctaaggttggggctcaaccccccacgggcgcagaagagggcgcttgcctggtggatctgattacatcctcaccccagtgcctgcatggacttgtgggatgggtgcatggacacgcagcaagctgtggagccctaccccacctccaacgcaccctctcctctgagtattgcggggtcattcaggtggtgtgggggtgcgaccaagggcatgactacactatggatacctccagttcctgcaaggcctttttattagactcggccctagcggtgaaatggccttgggacaaagagactgccccccggttgccacagcatagaggctggaatccgggtgacgcccctcagacatcacagggtagagggaccggtactccagttggagcagaaacgaagacactacctagcaccgatgtcgcccagccgccttctgactcagatgccgtgggaccccggtcaggatttcctccacagccatccctgcctctgtgcagagcacccggccaacttggcgagaagcaactgccctcaagcactagcgacgatagggttaaagacgagtttagcgatttgagcgaaggtgacgttctgtctgaggatgagaatgataaaaagcaaaacgcacagtccagtgatgagagcttcgagccctatcccgaaagaaaggtatctggcaaaaaatcagagagcaaagaagccaagaaaagtgaggagccgcgcattagaaagaagccgggacccaagccaggctggaagaaaaaactccgctgtgagcgcgaagagctccccacgatctataagtgcccttatcagggatgtacagcagtgtacagaggagccgacggaatgaagaagcacatcaaggagcaccacgaggaagtcagggagcgaccctgcccgcaccctgggtgtaataaagttttcatgattgatcgatatctacagcggcacgtgaagttgattcacactgaggtaagaaattatatctgtgacgagtgcggccagaccttcaagcaacggaaacacctccttgtccatcagatgcgccactctggagccaagccattacaatgtgaggtgtgtggcttccaatgtcgccaacgagctagcctaaaataccacatgaccaaacataaagcggagactgagctggacttcgcctgcgaccaatgtggtagacgctttgaaaaggcacacaatctcaatgttcacatgtctatggtccacccccttacgcaaacacaggacaaagcactcccgcttgaggctgaacccccgcctggccccccctctcccagcgtgacaacggagggccaagcagtcaagcccgagcccacctag

SEQ ID NO: 42777 - DNA, 1845 bp, Artificial Sequence
  derived and/or modified sequence
atgaaaagagacaggctaggaaggttcctgtccccggggagtagccgtcagtgtggtgcttcagatggcggggggggcgtgtcaaggacccgcggccggccgtcattatctggtggacctcgagttgacggggccacagctaggagagcatggggaccagtcgggtcttgcggggacgccggcgaagatggggccgacgaggctggagccggacgcgcgctggctatggggcactgtaggctttgtcacggcaaattctccagccgctctctgcgtagtatttccgagcgagcaccaggcgcctctatggagcgaccctccgctgaggagcgggttttggtccgggattttcagaggctgctcggcgtggccgttcggcaggacccaactctctccccttttgtatgcaaaagttgccacgcccagttctatcagtgccacagtctactcaaatctttcttgcagcgagtaaacgcaagccccgctggccgaaggaaaccgtgtgccaaagtgggagctcaaccacctacaggagcagaggagggcgcatgcttggttgatctcatcacatcgagtccacaatgtttgcacggtttagtagggtgggtccatggacatgctgctagctgcggagccctcccccatctgcaacggaccctatcttctgagtactgtggggttatacaggtcgtatgggggtgcgaccaaggacacgattatacaatggatacttcaagctcgtgcaaagcctttctccttgacagtgccctggcagttaaatggccctgggacaaagaaaccgcccctagactaccccagcaccgggggtggaatcctggggacgcacctcagaccagtcagggccgcggcactggcacccccgtgggagcagaaaccaagaccttgcccagtacagatgtggcccaaccaccttccgattcagacgccgtcggacctaggtcaggattcccccctcagccaagcttacccctttgccgggcaccaggccagcttggcgagaaacaactcccctcgagtaccagtgacgaccgtgttaaggatgagttctccgaccttagtgaaggcgacgtgctatctgaagacgaaaacgacaagaaacagaatgcacaatccagcgacgagagctttgaaccctaccctgaacggaaagtctctgggaagaagagtgaatcaaaggaagcaaagaagagcgaagagccaaggattcgaaaaaagcccgggcccaaacccggatggaagaagaaattgcggtgcgaacgtgaggaactgcccaccatatataaatgcccgtaccaaggctgtacagccgtgtatcgcggcgcggatggcatgaaaaagcatatcaaggaacaccacgaagaggtgcgtgagagaccgtgcccccacccggggtgtaataaagttttcatgatcgatcgctacctccagaggcatgttaaactgatccacaccgaagtgcggaattacatctgtgacgagtgtggacaaactttcaagcagcgaaagcacctgcttgtccaccagatgagacactccggcgccaagcctctgcaatgcgaggtgtgcggctttcaatgtagacaacgagcttctttgaagtatcatatgaccaaacacaaggcagaaacagagcttgactttgcttgtgaccagtgtggccggaggttcgagaaagcccataacctaaatgtccatatgtccatggtccacccattgactcagacccaagataaggccctcccgttggaagctgagccaccaccaggccccccctcccccagcgtgacgaccgaggggcaagcagtgaaacctgaacctacatag

SEQ ID NO: 42778 - DNA, 1620 bp, Artificial Sequence
  derived and/or modified sequence
atgggccactgccgcctgtgccacggcaagttcagcagccgcagcctgcggagcatcagcgagcgggcccctggggcctccatggagcggcccagcgctgaggagcgggtgctggtgcgggacttccagaggctgctgggcgtggccgtgcggcaggaccccaccctgagcccctttgtgtgcaagagctgccacgcccagttctaccagtgccacagcctgctgaagagcttcctgcagagggtgaatgccagccctgctggaagaaggaagccctgtgccaaggtgggcgcccagccccccaccggggctgaggagggcgcctgcctggtggacctgatcaccagcagcccccagtgcctgcacggcctggtgggctgggtgcacggccacgccgccagctgtggggccctgccccacctgcagaggaccctgagcagcgagtactgtggggtcatccaggtggtgtggggctgtgaccagggccatgactacaccatggacaccagcagcagctgcaaggccttcctgctggacagcgccctggccgtgaagtggccctgggacaaggagacagccccccggctgccccagcaccggggctggaaccctggagatgccccccagaccagccagggccggggcaccggcacccctgtgggcgctgagaccaagaccctgcccagcacagatgtggcccagcccccaagtgacagtgatgctgtgggccccaggagcggcttccccccccagcccagcctgcccctgtgccgggcccctggccagctgggggagaagcagctgcccagcagcaccagtgatgacagagtgaaggatgagttcagtgacctgtctgaaggagatgtgctgtctgaagatgaaaatgacaagaagcagaatgcccagagcagtgatgagagctttgagccctacccagagaggaaggtgtctgggaagaagtctgagagcaaggaggccaagaagtctgaggagccccgcatcaggaagaagccaggccccaagccaggctggaagaagaagctgcgctgtgagcgggaggagctgcccaccatctacaagtgcccctaccagggctgcacagctgtgtacagaggagcagatggcatgaagaagcacatcaaggagcaccacgaggaggtgcgggagcggccctgcccccaccctggctgcaacaaggtgttcatgattgaccgctacctgcagagacatgtgaagctgatccacacagaggtgaggaactacatctgtgatgaatgtggccagaccttcaagcagaggaagcacctgctggtgcaccagatgaggcacagcggggccaagcccctgcagtgtgaggtgtgtggcttccagtgccggcagagggccagcctgaagtaccacatgaccaagcacaaggccgagacagagctggactttgcctgtgaccagtgtggccgccgctttgagaaggcccacaacctgaatgtgcacatgtccatggtgcaccccctgacccagacccaggacaaggccctgcccctggaggccgagcccccacctggcccccccagccccagcgtgaccacagagggccaggccgtgaagccagagcccacctag

SEQ ID NO: 42779 - DNA, 1845 bp, Artificial Sequence
  derived and/or modified sequence
atgaagagggaccggctgggccgcttcctgagccctggcagcagccggcagtgtggggccagtgatggcggcggcggcgtgtccaggacccggggccggcccagcctgagcggcggcccccgggtggatggagccacagcccggcgggcctggggccctgtgggcagctgtggagatgctggggaggatggagcagatgaggccggggccggccgggccctggccatgggccactgccgcctgtgccacggcaagttcagcagccgcagcctgcggagcatcagcgagcgggcccctggggcctccatggagcggcccagcgctgaggagcgggtgctggtgcgggacttccagaggctgctgggcgtggccgtgcggcaggaccccaccctgagcccctttgtgtgcaagagctgccacgcccagttctaccagtgccacagcctgctgaagagcttcctgcagagggtgaatgccagccctgctggccgcaggaagccctgtgccaaggtgggcgcccagcccccaactggagctgaggagggcgcctgcctggtggacctgatcaccagcagcccccagtgcctgcacggcctggtgggctgggtgcacggccatgctgccagctgtggggccctgccccacctgcagaggaccctgagcagcgagtactgtggggtcatccaggtggtgtggggctgtgaccagggccatgactacaccatggacaccagcagcagctgcaaggccttcctgctggacagcgccctggccgtgaagtggccctgggacaaggagacagccccccggctgccccagcaccggggctggaaccctggagatgccccccagaccagccagggccggggcaccggcacccctgtgggcgctgagaccaagaccctgcccagcacagatgtggcccagccccccagcgacagtgatgctgtgggccccaggagcggcttccccccccagcccagcctgcccctgtgccgggcccctggccagctgggggagaagcagctgcccagcagcaccagtgatgacagagtgaaggatgagttcagtgacctgtctgaaggagatgtgctgtctgaagatgaaaatgacaagaagcagaatgcccagagcagtgatgagagctttgagccctacccagagaggaaggtgtctgggaagaagtctgagagcaaggaggccaagaagtctgaggagccccgcatcaggaagaagccaggccccaagccaggctggaagaagaagctgcgctgtgagcgggaggagctgcccaccatctacaagtgcccctaccagggctgcacagctgtgtacagaggagcagatggcatgaagaagcacatcaaggagcaccacgaggaggtgcgggagcggccctgcccccaccctggctgcaacaaggtgttcatgattgaccgctacctgcagagacatgtgaagctgatccacacagaggtgaggaactacatctgtgatgaatgtggccagaccttcaagcagaggaagcacctgctggtgcaccagatgaggcacagcggggccaagcccctgcagtgtgaggtgtgtggcttccagtgccggcagagggccagcctgaagtaccacatgaccaagcacaaggccgagacagagctggactttgcctgtgaccagtgtggcagaagatttgagaaggcccacaacctgaatgtgcacatgtccatggtgcaccccctgacccagacccaggacaaggccctgcccctggaggccgagcccccacctggcccccccagccccagcgtgaccacagagggccaggccgtgaagccagagcccacctag

SEQ ID NO: 42780 - DNA, 1620 bp, Artificial Sequence
  derived and/or modified sequence
atgggccactgccggctgtgccacggcaagttcagcagccggagcctgcggagcataagtgagcgcgcacccggtgcatctatggagaggccatccgccgaagagagagtgctagtgcgggactttcaaagactgcttggggtggctgtcagacaggatcctactctgagtccctttgtgtgcaaaagttgtcatgctcagttctaccagtgtcactcactgctgaaatcatttctgcaacgggttaatgctagtccagctggcaggaggaaaccttgcgccaaagtgggagcccaaccacctactggtgccgaagagggagcttgcctggttgacttgattacgtccagcccacaatgcctccacggacttgtgggttgggttcatgggcacgctgcctcctgtggggccctgccacacctccagagaacactctctagtgagtactgcggggtgatccaggtcgtctggggttgcgaccagggccatgactatacgatggatacttcaagctcgtgcaaagccttcctcttggattctgctcttgcagtgaagtggccttgggacaaggaaaccgccccgagattaccgcagcatcgcggatggaatccgggcgatgctccccagacctcccaggggaggggcaccggaacccccgtcggagccgaaacgaagaccctgccatctacagatgtcgctcagccaccatccgacagtgacgcggtaggcccaagaagcgggttcccacctcaaccctcgttgcctctgtgtagggcccctgggcagttaggcgaaaaacaactacctagcagcacttctgacgatagagtgaaggatgagttctcagacctgtcagaaggcgatgttcttagtgaggacgaaaacgacaaaaaacaaaatgctcagagtagcgatgagtcattcgagccttatcccgagcgaaaagtgagcgggaagaagtccgagtctaaagaagcgaagaaatctgaagagcctcgtatccgaaagaagcctggccctaaaccaggctggaagaagaaactgcggtgtgagagagaagaacttccgaccatttacaaatgcccctatcagggttgtaccgccgtatacagaggcgcggacggcatgaaaaagcacatcaaagagcaccatgaggaagtgagggaaaggccctgcccacaccccgggtgcaacaaggtgtttatgatcgatagatacctccagcgccacgttaaactgatccatacagaagtgaggaattacatctgtgacgaatgcgggcagacattcaagcagcgaaaacacctgcttgtccaccagatgaggcacagcggggctaagcctttgcagtgtgaggtttgcggctttcagtgcaggcagcgcgcatccctgaagtatcatatgacaaaacacaaggcagagacggagctcgatttcgcatgcgaccagtgcggaagaaggttcgagaaggcacataatcttaacgtgcatatgtcaatggtgcacccgctgacacagacccaggataaggcactccctctggaggctgaacctccaccaggcccgccctccccaagcgtgaccaccgaagggcaagccgtaaagcccgagcccacctag

SEQ ID NO: 42781 - DNA, 1845 bp, Artificial Sequence
  derived and/or modified sequence
atgaagcgggaccggctgggccggttcctgagccccggcagcagccgacagtgtggtgcttcggacggcggcggaggagtgtcccgaactaggggcaggccctctttgtccggcggtcctcgcgtagatggggccacagcacgtagggcgtggggcccagtcggaagctgcggcgatgccggcgaagatggggctgatgaagctggagccggaagggctttagctatgggtcactgtcggctttgccatgggaaatttagctctcgttctttgagaagcatctcagaaagggccccaggtgccagcatggaaaggccatctgcggaggagagggttctggttagggacttccagcgccttttgggtgtcgctgtgcggcaagatccaaccctgtccccattcgtttgtaaatcgtgccatgctcaattttaccaatgtcacagcttgctcaagtcctttttgcagagagtgaatgcttcccccgccggccgccgaaagccatgtgctaaggtgggggctcagcctccaactggcgccgaggagggcgcctgtctagtggacctaatcacaagctcgccccagtgtttgcatggacttgtgggttgggttcacggtcatgccgcctcatgtggcgcattgcctcacctgcagaggacgctgagttcagaatattgcggggtgatccaggtggtgtggggatgcgaccagggccatgattatactatggacacctcatcatcttgcaaagcatttttgctggattccgcactcgcagttaaatggccctgggacaaagagactgctccgaggctgccgcagcacagaggctggaaccccggcgatgctccccaaacgagtcaggggcgagggactggtacccctgtgggggcagaaacgaaaaccctgcccagcaccgatgtcgcccaacctccctcagactccgacgccgtgggacctcgtagcgggttcccgcctcaaccctccctgccattgtgccgcgctcctggacaactgggagagaaacagttgccaagctccacctctgatgacagagttaaagacgaatttagcgacttgtctgaaggtgacgtgctgagcgaggatgagaatgataagaaacagaacgctcagtcgagcgatgagagctttgaaccatacccagagcgcaaagtgtccggcaagaaaagcgagtcaaaggaagctaagaagagcgaggagccccgaattcggaagaaaccggggcctaagccagggtggaagaagaagcttcggtgtgagagagaagaattgccgaccatttacaaatgcccctaccagggctgtacagcagtctacagaggggcagatgggatgaaaaaacatattaaagagcatcacgaggaggttcgggagcgaccctgccctcacccaggctgtaacaaggtctttatgatcgacaggtacctgcagaggcacgtaaaactcatccatacggaggtgagaaattatatctgtgatgaatgtggacaaacatttaagcaacgtaagcatctgctcgttcaccaaatgagacattcaggagcgaagccgttgcagtgcgaggtttgtggtttccagtgtaggcagcgggccagtttgaagtatcacatgactaagcacaaggccgagacagaactggatttcgcctgcgaccagtgcggaagacggttcgaaaaggctcataaccttaacgtgcacatgagcatggttcacccactgacccagacccaggataaagccttgccactagaggccgagccccctcctggcccgccctctccatcagtgacgaccgaggggcaggctgtgaagccagagcccacttag

SEQ ID NO: 42782 - DNA, 1620 bp, Artificial Sequence
  derived and/or modified sequence
atgggacactgtcggctttgccacggaaaattctccagccggtctttgcgtagtatcagcgagagagctcctggcgcaagcatggagaggccatcagccgaagagagggttttggtaagggacttccagcgcctattgggagttgccgtgcgccaggatccaacactgtcccccttcgtctgtaagtcttgtcatgcccagttttatcagtgtcacagtcttctgaaatcttttcttcagagggtgaatgccagccccgctggaaggcgaaagccgtgcgctaaggttggagcccagccccctactggcgctgaagaaggcgcatgtctggtggatttgattacgagttcaccccagtgtctgcacggtcttgttggttgggtgcatggacatgcggcttcgtgcggcgctctccctcatcttcagagaactctgtctagcgagtattgcggtgtcatccaggtggtttggggctgcgaccaggggcacgattatacaatggatacttcaagcagttgcaaggccttcctgttagattctgccctggctgttaaatggccctgggacaaagagacggcccctcgcctaccccagcaccggggatggaatcccggtgacgctccccagacctcacaaggcagaggtacagggaccccagtcggagccgaaaccaagactttgccctcaactgacgtggctcagccacccagcgatagcgacgctgttggcccacgctccgggtttccgcctcaaccctctttgcccctgtgcagggcacctggccagctgggggagaagcagctaccatcttccacttctgacgatagagtcaaggacgaatttagcgacctctctgaaggcgatgtcctgtctgaagatgaaaatgacaagaaacagaacgcccaatcttcagacgagtcattcgagccataccccgaacggaaggtctccggcaagaaatctgaatcgaaagaagccaaaaagtctgaggagccaaggatcaggaagaagcccggaccaaagcccggttggaagaagaagctacggtgtgaacgagaggaactgccaactatctataaatgcccctatcagggttgtacagccgtgtataggggagctgatggcatgaaaaagcatatcaaggagcaccacgaagaggttcgagagcggccatgccctcacccgggatgtaacaaagtgtttatgattgatcggtatctgcagcgacacgtgaagctgatccacaccgaggttaggaattacatctgtgacgagtgcgggcagaccttcaagcagcgtaagcatctactggtgcaccagatgaggcacagtggagctaagccgttgcagtgcgaggtttgtggattccaatgtcgacagcgcgcttccctaaagtatcatatgacaaagcataaggctgagacagaactagatttcgcatgcgatcagtgcggcaggcgatttgaaaaagctcacaacctgaacgtgcatatgtctatggtgcatccactgacccagacccaggacaaagctcttccattagaggctgaacctccccctgggcctcccagtccttccgtgaccacagagggacaagcagttaaacccgaacccacttag

SEQ ID NO: 42783 - DNA, 1845 bp, Artificial Sequence
  derived and/or modified sequence
atgaagagagaccgcctgggccgattcttgtccccagggtcatcaagacaatgcggtgctagcgatggtggcggtggcgtgtctcggacaagagggcgacccagtctgagcggtggacccagggtggacggagctactgctcggagggcatggggacctgtcggttcgtgtggagacgctggcgaggacggggctgacgaggctggagcaggccgagctctggcgatgggccactgccggctgtgccacggtaaattcagcagtcggtcactcagaagtattagtgagcgcgctcccggtgctagcatggaaaggccctcggcagaagaacgcgttctggtccgcgattttcaacgtctactgggagtggctgtcagacaggaccctactctctcaccttttgtttgtaagagttgtcatgctcagttttaccagtgccacagcctcctcaaaagttttctccagagggtgaatgcttcccccgctggccgtaggaaaccctgcgcaaaagtgggggcacaacccccaacaggtgctgaagagggcgcttgcctggtggacctgattacgtcgagtccccagtgcctccacggtctggttggctgggtgcacggccatgccgcaagttgcggcgcactgccccacctccagaggaccctcagctcggaatattgcggggtgatccaggttgtgtggggatgtgatcaggggcatgactatacaatggatacctcaagcagttgcaaggctttcctgttggattctgctcttgccgttaagtggccgtgggacaaggaaaccgcgccacgcctgccacaacacaggggatggaatccaggagacgctcctcaaacatcgcagggaaggggaaccgggacccctgtgggggctgaaactaaaacgcttcccagcacagatgtcgctcaaccacctagcgatagcgacgccgtgggacctcgctctggctttccaccacaaccaagcctccctctgtgtagggctcctgggcaactaggcgaaaagcagctcccatccagtacgtccgacgaccgggtcaaggacgagttttcagacctgtctgaaggggatgtgctctcggaagacgaaaatgacaaaaagcaaaacgcgcagagctccgacgaaagcttcgagccctaccccgagagaaaagtgtctggaaaaaagtctgaaagtaaggaagcgaagaagagcgaagagcctaggattagaaagaaacctggtcccaaacctggttggaagaaaaagctgcgctgtgaaagggaggaactgcccacaatatacaaatgtccgtaccagggctgcacagccgtataccggggtgcggacggcatgaagaaacacattaaggaacaccacgaagaggtcagagagagaccttgccctcaccctgggtgcaataaggttttcatgattgatcgttacttgcaaaggcacgtgaagcttatccatactgaagtcaggaattatatctgtgatgaatgtgggcagacattcaaacagcggaagcatttgcttgtgcatcagatgcggcactccggagccaaaccccttcaatgcgaagtgtgtggcttccaatgccgccaaagggcttccctaaaatatcatatgactaagcataaagcggaaactgagctagatttcgcatgtgaccagtgtggcagacgtttcgagaaagcccacaatttaaatgtgcacatgtctatggtccatcctcttacacaaactcaggacaaggcccttccattagaagcggagcctccccctgggccacccagcccttcagtgaccacggaggggcaggcagtcaaacccgagccaacgtag

SEQ ID NO: 42784 - DNA, 4589 bp, Artificial Sequence
  derived and/or modified sequence
gcacttccggcgacgggccccctccgcgcgtactgcgggccccacgggtgttagtggcgggggcggcagagtccgggtgggttgtcgcgacggagccgggcctcttcgccgtcttgagacggggctggcgagaagggcccctcacggagttgccatgggcgtctaaccgcggcagccaggcccctctctacgtgagaccccggcccccctcccctttctgcagcccgcccgccacctgcgcgccgcgtggcctccgccggcgcctgcccgccccgcgcctccgtctcccacggagcaggccgggctctcgccatgggtcactgtcgcctctgccacgggaagttttcctcgagaagcctgcgcagcatctccgagagggcgcctggagcgagcatggagaggccatccgcagaggagcgcgtgctcgtacgggacttccagcgcctgcttggtgtggctgtccgccaggaccccaccttgtctccgtttgtctgcaagagctgccacgcccagttctaccagtgccacagccttctcaagtccttcctgcagagggtcaacgcctccccggctggtcgccggaagccttgtgcaaaggtcggtgcccagcccccaacaggggcagaggagggagcgtgtctggtggatctgatcacatccagcccccagtgcctgcacggcttggtggggtgggtgcatggacatgcggccagctgcggggccctgccccaccttcagaggacactgtcctccgagtactgcggcgtcatccaggtcgtgtggggctgcgaccagggccacgactacaccatggataccagctccagctgcaaggccttcttgctggacagtgcgctggcagtcaagtggccatgggacaaagagacggcgccacggctgccccagcaccgagggtggaaccctggggatgcccctcagacctcccagggtagagggacagggaccccagttggggctgagaccaagaccctgcccagcacggatgtggcccagcctccttcggacagcgacgcggtggggcccaggtcgggcttcccacctcagccaagcctgcccctttgcagggccccagggcagttgggtgagaagcagcttccatcttcaacctcggatgatcgggtaaaagacgagttcagtgacctttctgagggagacgtcttgagtgaagatgaaaatgacaagaagcaaaatgcccagtcttcggacgagtcctttgagccttacccagaaaggaaagtctctggtaagaagagtgaaagcaaagaagccaagaagtctgaagaaccaagaattcggaagaagccgggacccaagcccggatggaagaagaagcttcgttgtgagagggaggagcttcccaccatctacaagtgtccttaccagggctgcacggccgtgtaccgaggcgctgacggcatgaagaagcacatcaaggagcaccacgaggaggtccgggagcggccctgcccccaccctggctgcaacaaggttttcatgatcgaccgctacctgcagcgccacgtgaagctcatccacacagaggtgcggaactatatctgtgacgaatgtggacaaaccttcaagcagcggaagcaccttctcgtccaccaaatgcgacattcgggagccaagcctttgcagtgtgaggtctgtgggttccagtgcaggcagcgggcatccctcaagtaccacatgaccaaacacaaggctgagactgagctggactttgcctgtgaccagtgtggccggcggtttgagaaggcccacaacctcaatgtacacatgtccatggtgcacccgctgacacagacccaggacaaggccctgcccctggaggcggaaccaccacctgggccaccgagcccctctgtgaccacagagggccaggcggtgaagcccgaacccacctgaggacggcagtgaggatgagcacctctagcagcctggactccgcagtggctgtgtcagcctcacccttcgtgtgcacccgcatgggagggtcggagggtgctgcccgcccttggtgctggaggcgggcttggtgtccggctcaagtagccttcctctgctctgggaccagtggtttattttcccgcaaacgctgagtgactcggggccggacagttcataaataattgattcctttccccactaaagcagtcgaggagatttgtaatccactttttagtgcaacaagagctccatgttatgcttgtaataaattatttacacgggagctgggctggtgtgcagtggcaggtcccgtcagaagagatgaggctcctgggacaggtcagcgtcaggggcagcctgctgtctgctctggagggcggcgctcacctctgggtcgcagtccccacgatcagccagcagctgtgagagaggagcaggtcctcagcccatgccgcccactaggcctcagaccacaggggaggggctctggcagaaatagtcgagttgtattgccagccaggcaggcacatggcccaggcagctgtcaattctcatgtcccccacatggcccaaggtgggcatcttgacgttacctctgccacgtgtgagaagctctttttcgggcaccgaggtattaactgcagcagaaaaagacgagcttttgttatcagttccacggggttgccctagagagaaaacaggcaaactcacaggttagaagacatacagaaacagggctggtgtgtcccccatagtctgcatgctgtgccggaacattctttggcagaaggagcctccggctggggggagctcccctggaggtgggactggcccttgcacctgcctgacccttgagctccaggctcctgccagctggaggtgaaactgtgcttgtatccccagccacgaagagctggaccagcttcaagtacatgtccacagcaacatgcaggaaggcctcttccctgatggccgcgtcttcatggaagtaggagagaagactagaggtaaagacatagtgacaaatggctacagactgctggaaaggtagcaggtgatgccaagggatactgctcatctgtggagcagaggcacagacaacccttcccatctggcgggacccagaggtgctgagatgggggtctgggaaacactgcccagccctgaccagccctgtgggtggaggtacctgtaaaaagcgaaaggcagcagcctggtgtgctgatccggggccacacggaggaggagccgccccagcctgaggtctgcaacaccaagaagtggctcaggcaactctggacatctctgcctattatcagtgctggggacacccctgggggtcgggacgtgtaccctgggaggcctggctgtggggatagtgtggggcgaacagcctgagctgaggatacccaggtacctgtcagcagctgggagaggatgggggggtcgacctcttgcaggagggtgggtgtggtgcagagagaggcagtccccatgataggcccattggtcctggggttgaccagtgagccagtaaattatcttattgctttaaacaagtttgtgcttaatctgtcccaactaaaatggagcttataaacttacttagcaaggaacctcaaggagggctcgttcttaaccatttgcaagatgcctctgaaaagagcggccctccgcatttgtgcctcagcagcgtgtttcttaccactctctgtcaactgaaagagtgccagccaggatatcttcctcttctctaaacactcgaggattgctgcacaaacgtggaaagcctttggcaggtctgtggtgctctgtaaaccgcaggagaccaaccctgagaatggccgacctggtgctcccatgggtaggagggtacagccctcagcacagaagagggcatttcctctttgcttattgtaagtcttaaaactggtgacagttttacctatagaaggtaatactgggcctctggacagaagaggctcaggtaggaggccagggacttcgagcacccacaccaaggctgctgcaccacgtcctcaaataagacattaaaagaaaggcccacaggccggatgcagtggctcatgcctgtaatcccaacactttgggaggccgaggtcggcggatcactgaggccagttcaagaccagcctggcaatatggtgaaaccccgtctctactaaaaatacaaaaattagccgggtgtgacagactcacgcctgtaatcccagctactcgggaggctgatgcaggagaattgcttgaacccaggaggctgaggttgcagtgagctgagatcacaccactgcactccagcctgggtgacagagtgagacccccatctcaaaaaaaaaaaaaaaaaacccacggcctgggagttctcactcacacttccgcaaacacaaggagctcctgagctagtctggaaaccctgacttggaagctggctgcctggtgcccctgcctggcccacagtgggagaggacaccttggctggtaaggtctgacttacatttgaggtcagatgtgacgacagcaggcccatcaaggagaagaagaaaaggaaaaccaatagctgtaaataaaaacgtgcacttattattacattaaaa

SEQ ID NO: 42785 - DNA, 4621 bp, Artificial Sequence
  derived and/or modified sequence
ctcgcttccagcgcgccgagcggagcctaacgccgggtcctctaggaacctcgggccgggcagcacccgcgggattctgctggcgtcctccgctgccatgaagcgggaccggctgggccgcttcctgtctcctgggtcgtcccgacagtgcggggcctcggacggcggcggcggcgtcagccggactcggggccgcccttcccttagcggtgggccgagggtggacggggcgacggcgcggcgcgcctggggcccggtggggtcctgcggggacgcgggcgaggacggcgcggacgaggcaggagcaggccgggctctcgccatgggtcactgtcgcctctgccacgggaagttttcctcgagaagcctgcgcagcatctccgagagggcgcctggagcgagcatggagaggccatccgcagaggagcgcgtgctcgtacgggacttccagcgcctgcttggtgtggctgtccgccaggaccccaccttgtctccgtttgtctgcaagagctgccacgcccagttctaccagtgccacagccttctcaagtccttcctgcagagggtcaacgcctccccggctggtcgccggaagccttgtgcaaaggtcggtgcccagcccccaacaggggcagaggagggagcgtgtctggtggatctgatcacatccagcccccagtgcctgcacggcttggtggggtgggtgcatggacatgcggccagctgcggggccctgccccaccttcagaggacactgtcctccgagtactgcggcgtcatccaggtcgtgtggggctgcgaccagggccacgactacaccatggataccagctccagctgcaaggccttcttgctggacagtgcgctggcagtcaagtggccatgggacaaagagacggcgccacggctgccccagcaccgagggtggaaccctggggatgcccctcagacctcccagggtagagggacagggaccccagttggggctgagaccaagaccctgcccagcacggatgtggcccagcctccttcggacagcgacgcggtggggcccaggtcgggcttcccacctcagccaagcctgcccctttgcagggccccagggcagttgggtgagaagcagcttccatcttcaacctcggatgatcgggtaaaagacgagttcagtgacctttctgagggagacgtcttgagtgaagatgaaaatgacaagaagcaaaatgcccagtcttcggacgagtcctttgagccttacccagaaaggaaagtctctggtaagaagagtgaaagcaaagaagccaagaagtctgaagaaccaagaattcggaagaagccgggacccaagcccggatggaagaagaagcttcgttgtgagagggaggagcttcccaccatctacaagtgtccttaccagggctgcacggccgtgtaccgaggcgctgacggcatgaagaagcacatcaaggagcaccacgaggaggtccgggagcggccctgcccccaccctggctgcaacaaggttttcatgatcgaccgctacctgcagcgccacgtgaagctcatccacacagaggtgcggaactatatctgtgacgaatgtggacaaaccttcaagcagcggaagcaccttctcgtccaccaaatgcgacattcgggagccaagcctttgcagtgtgaggtctgtgggttccagtgcaggcagcgggcatccctcaagtaccacatgaccaaacacaaggctgagactgagctggactttgcctgtgaccagtgtggccggcggtttgagaaggcccacaacctcaatgtacacatgtccatggtgcacccgctgacacagacccaggacaaggccctgcccctggaggcggaaccaccacctgggccaccgagcccctctgtgaccacagagggccaggcggtgaagcccgaacccacctgaggacggcagtgaggatgagcacctctagcagcctggactccgcagtggctgtgtcagcctcacccttcgtgtgcacccgcatgggagggtcggagggtgctgcccgcccttggtgctggaggcgggcttggtgtccggctcaagtagccttcctctgctctgggaccagtggtttattttcccgcaaacgctgagtgactcggggccggacagttcataaataattgattcctttccccactaaagcagtcgaggagatttgtaatccactttttagtgcaacaagagctccatgttatgcttgtaataaattatttacacgggagctgggctggtgtgcagtggcaggtcccgtcagaagagatgaggctcctgggacaggtcagcgtcaggggcagcctgctgtctgctctggagggcggcgctcacctctgggtcgcagtccccacgatcagccagcagctgtgagagaggagcaggtcctcagcccatgccgcccactaggcctcagaccacaggggaggggctctggcagaaatagtcgagttgtattgccagccaggcaggcacatggcccaggcagctgtcaattctcatgtcccccacatggcccaaggtgggcatcttgacgttacctctgccacgtgtgagaagctctttttcgggcaccgaggtattaactgcagcagaaaaagacgagcttttgttatcagttccacggggttgccctagagagaaaacaggcaaactcacaggttagaagacatacagaaacagggctggtgtgtcccccatagtctgcatgctgtgccggaacattctttggcagaaggagcctccggctggggggagctcccctggaggtgggactggcccttgcacctgcctgacccttgagctccaggctcctgccagctggaggtgaaactgtgcttgtatccccagccacgaagagctggaccagcttcaagtacatgtccacagcaacatgcaggaaggcctcttccctgatggccgcgtcttcatggaagtaggagagaagactagaggtaaagacatagtgacaaatggctacagactgctggaaaggtagcaggtgatgccaagggatactgctcatctgtggagcagaggcacagacaacccttcccatctggcgggacccagaggtgctgagatgggggtctgggaaacactgcccagccctgaccagccctgtgggtggaggtacctgtaaaaagcgaaaggcagcagcctggtgtgctgatccggggccacacggaggaggagccgccccagcctgaggtctgcaacaccaagaagtggctcaggcaactctggacatctctgcctattatcagtgctggggacacccctgggggtcgggacgtgtaccctgggaggcctggctgtggggatagtgtggggcgaacagcctgagctgaggatacccaggtacctgtcagcagctgggagaggatgggggggtcgacctcttgcaggagggtgggtgtggtgcagagagaggcagtccccatgataggcccattggtcctggggttgaccagtgagccagtaaattatcttattgctttaaacaagtttgtgcttaatctgtcccaactaaaatggagcttataaacttacttagcaaggaacctcaaggagggctcgttcttaaccatttgcaagatgcctctgaaaagagcggccctccgcatttgtgcctcagcagcgtgtttcttaccactctctgtcaactgaaagagtgccagccaggatatcttcctcttctctaaacactcgaggattgctgcacaaacgtggaaagcctttggcaggtctgtggtgctctgtaaaccgcaggagaccaaccctgagaatggccgacctggtgctcccatgggtaggagggtacagccctcagcacagaagagggcatttcctctttgcttattgtaagtcttaaaactggtgacagttttacctatagaaggtaatactgggcctctggacagaagaggctcaggtaggaggccagggacttcgagcacccacaccaaggctgctgcaccacgtcctcaaataagacattaaaagaaaggcccacaggccggatgcagtggctcatgcctgtaatcccaacactttgggaggccgaggtcggcggatcactgaggccagttcaagaccagcctggcaatatggtgaaaccccgtctctactaaaaatacaaaaattagccgggtgtgacagactcacgcctgtaatcccagctactcgggaggctgatgcaggagaattgcttgaacccaggaggctgaggttgcagtgagctgagatcacaccactgcactccagcctgggtgacagagtgagacccccatctcaaaaaaaaaaaaaaaaaacccacggcctgggagttctcactcacacttccgcaaacacaaggagctcctgagctagtctggaaaccctgacttggaagctggctgcctggtgcccctgcctggcccacagtgggagaggacaccttggctggtaaggtctgacttacatttgaggtcagatgtgacgacagcaggcccatcaaggagaagaagaaaaggaaaaccaatagctgtaaataaaaacgtgcacttattattacattaaaattacctgtgctgtcattctaaa

SEQ ID NO: 42786 - DNA, 1826 bp, Artificial Sequence
  derived and/or modified sequence
aaatctaccatctctgcccagaaaaatgcacgaacgcacggacctgcccgtcactcggattttggaaggtggcctggcggaccctcctgctacatctcctctacaggtggagcccaggctgtgatgcaccggctcagcgagcggagtggaaagccaaggtccgcaggatctgagctgtccaaggagcaggccgggctctcgccatgggtcactgtcgcctctgccacgggaagttttcctcgagaagcctgcgcagcatctccgagagggcgcctggagcgagcatggagaggccatccgcagaggagcgcgtgctcgtacgggacttccagcgcctgcttggtgtggctgtccgccaggaccccaccttgtctccgtttgtctgcaagagctgccacgcccagttctaccagtgccacagccttctcaagtccttcctgcagagggtcaacgcctccccggctggtcgccggaagccttgtgcaaaggtcggtgcccagcccccaacaggggcagaggagggagcgtgtctggtggatctgatcacatccagcccccagtgcctgcacggcttggtggggtgggtgcatggacatgcggccagctgcggggccctgccccaccttcagaggacactgtcctccgagtactgcggcgtcatccaggtcgtgtggggctgcgaccagggccacgactacaccatggataccagctccagctgcaaggccttcttgctggacagtgcgctggcagtcaagtggccatgggacaaagagacggcgccacggctgccccagcaccgagggtggaaccctggggatgcccctcagacctcccagggtagagggacagggaccccagttggggctgagaccaagaccctgcccagcacggatgtggcccagcctccttcggacagcgacgcggtggggcccaggtcgggcttcccacctcagccaagcctgcccctttgcagggccccagggcagttgggtgagaagcagcttccatcttcaacctcggatgatcggagacgtcttgagtgaagatgaaaatgacaagaagcaaaatgcccagtcttcggacgagtcctttgagccttacccagaaaggaaagtctctggtaagaagagtgaaagcaaagaagccaagaagtctgaagaaccaagaattcggaagaagccgggacccaagcccggatggaagaagaagcttcgttgtgagagggaggagcttcccaccatctacaagtgtccttaccagggctgcacggccgtgtaccgaggcgctgacggcatgaagaagcacatcaaggagcaccacgaggaggtccgggagcggccctgcccccaccctggctgcaacaaggttttcatgatcgaccgctacctgcagcgccacgtgaagctcatccacacagaggtgcggaactatatctgtgacgaatgtggacaaaccttcaagcagcggaagcaccttctcgtccaccaaatgcgacattcgggagccaagcctttgcagtgtgaggtctgtgggttccagtgcaggcagcgggcatccctcaagtaccacatgaccaaacacaaggctgagactgagctggactttgcctgtgaccagtgtggccggcggtttgagaaggcccacaacctcaatgtacacatgtccatggtgcacccgctgacacagacccaggacaaggccctgcccctggaggcggaaccaccacctgggccaccgagcccctctgtgaccacagagggccaggcggtgaagcccgaacccacctgaggacggcagtgaggatgagcacctctagcagcctg

SEQ ID NO: 42787 - protein, 1251 aa, Artificial Sequence
  derived and/or modified sequence
MELSDVRCLTGSEELYTIHPTPPAGDGRSASRPQRLLWQTAVRHITEQRFIHGHRGGSGSGSGGSGKASDPAGGGPNHHAPQLSGDSALPLYSLGPGERAHSTCGTKVFPERSGSGSASGSGGGGDLGFLHLDCAPSNSDFFLNGGYSYRGVIFPTLRNSFKSRDLERLYQRYFLGQRRKSEVVMNVLDVLTKLTLLVLHLSLASAPMDPLKGILLGFFTGIEVVICALVVVRKDTTSHTYLQYSGVVTWVAMTTQILAAGLGYGLLGDGIGYVLFTLFATYSMLPLPLTWAILAGLGTSLLQVILQVVIPRLAVISINQVVAQAVLFMCMNTAGIFISYLSDRAQRQAFLETRRCVEARLRLETENQRQERLVLSVLPRFVVLEMINDMTNVEDEHLQHQFHRIYIHRYENVSILFADVKGFTNLSTTLSAQELVRMLNELFARFDRLAHEHHCLRIKILGDCYYCVSGLPEPRQDHAHCCVEMGLSMIKTIRYVRSRTKHDVDMRIGIHSGSVLCGVLGLRKWQFDVWSWDVDIANKLESGGIPGRIHISKATLDCLNGDYNVEEGHGKERNEFLRKHNIETYLIKQPEDSLLSLPEDIVKESVSSSDRRNSGATFTEGSWSPELPFDNIVGKQNTLAALTRNSINLLPNHLAQALHVQSGPEEINKRIEHTIDLRSGDKLRREHIKPFSLMFKDSSLEHKYSQMRDEVFKSNLVCAFIVLLFITAIQSLLPSSRVMPMTIQFSILIMLHSALVLITTAEDYKCLPLILRKTCCWINETYLARNVIIFASILINFLGAILNILWCDFDKSIPLKNLTFNSSAVFTDICSYPEYFVFTGVLAMVTCAVFLRLNSVLKLAVLLIMIAIYALLTETVYAGLFLRYDNLNHSGEDFLGTKEVSLLLMAMFLLAVFYHGQQLEYTARLDFLWRVQAKEEINEMKELREHNENMLRNILPSHVARHFLEKDRDNEELYSQSYDAVGVMFASIPGFADFYSQTEMNNQGVECLRLLNEIIADFDELLGEDRFQDIEKIKTIGSTYMAVSGLSPEKQQCEDKWGHLCALADFSLALTESIQEINKHSFNNFELRIGISHGSVVAGVIGAKKPQYDIWGKTVNLASRMDSTGVSGRIQVPEETYLILKDQGFAFDYRGEIYVKGISEQEGKIKTYFLLGRVQPNPFILPPRRLPGQYSLAAVVLGLVQSLNRQRQKQLLNENNNTGIIKGHYNRRTLLSPSGTEPGAQAEGTDKSDLP

SEQ ID NO: 42788 - DNA, 258 bp, Artificial Sequence
  derived and/or modified sequence
gccacattgcggaataagctgatgtggaatattattagcatcatcatcattcttgctggcgctattgccctgattatcggattcggcatttccgaagtgtcagtctggctgtctgctatgaaggggtgccgatcaagcaaggcaagcctgtcaatcgacttgtgcttcctgaactgccgtgagactctacatcactcccattactgtagactcagctgggaacactggggaggttggaatcctgagctccatttctag

SEQ ID NO: 42789 - DNA, 768 bp, Artificial Sequence
  derived and/or modified sequence
atggtgtggaaatggatgccattactgttactattggtgtgcgtggcaacaatgtgctccgcccaggatcgcactgatctgcttaatgtctgtatggatgccaaacaccataagacaaaacctgggccagaagacaagttgcacgaccaatgcagtccctggaaaaagaacgcctgctgcaccgcttctacatctcaggagcttcataaagatacaagtcgactctacaatttcaattgggaccactgcggcaaaatggaacctgcctgcaagagacatttcatacaggacacgtgcctgtacgagtgttctccaaatctagggccttggattcagcaggtgaaccaaagctggaggaaagaaaggttcctggatgtcccattatgtaaagaagattgccaaaggtggtgggaagattgtcacacttcccacacgtgcaagagtaattggcaccgagggtgggattggacttctggagtgaacaaatgtccggccggagcactctgtcgaacattcgaatcatattttcccaccccggccgccctctgtgaggggctttggagccactcatataaagtctctaactacagtcggggaagtggacggtgcatccagatgtggtttgatagtgctcagggaaaccctaacgaggaagttgccaggttttacgcagctgctatgcatgtgaacgcaggcgaaatgctgcacgggacagggggcctgctactgtccctggcacttatgctccaactctggctgctggggtag

SEQ ID NO: 42790 - DNA, 516 bp, Artificial Sequence
  derived and/or modified sequence
atggtgtggaaatggatgcctctcctactgcttctggtctgtgtggccaccatgtgctcggcacaggacagaactgatttactgaacgtgtgcatggatgcaaaacaccataagacgaaacctggccctgaagacaaacttcatgaccagtgtagcccttggaaaaagaacgcctgctgcaccgccagcaccagtcaagaactgcacaaggacacttctcgcctgtacaacttcaattgggaccattgcggcaaaatggagccagcttgcaagaggcatttcatccaagatacctgtctgtacgaatgtagtcctaaccttggtccctggatccagcaggtgaatcagtcctggcggaaggaacgattccttgatgtgccattatgcaaagaagactgccagagatggtgggaggactgtcataccagccacacctgtaaatccaattggcaccgtggatgggactggacatctggggtgaataaatgtcctgcaggagccctgtgcagaacatag

SEQ ID NO: 42791 - DNA, 768 bp, Artificial Sequence
  derived and/or modified sequence
atggtgtggaagtggatgcccctgctgctgctgctggtgtgtgtggccaccatgtgcagcgcccaggacagaacagacctgctgaatgtgtgcatggatgccaagcaccacaagaccaagccaggccctgaggacaagctgcatgaccagtgcagcccctggaagaagaatgcctgctgcacagccagcaccagccaggagctgcacaaggacaccagccggctgtacaacttcaactgggaccactgcggcaagatggagcccgcctgcaagaggcacttcatccaggacacctgcctgtatgagtgcagccccaacctgggcccctggatccagcaggtgaaccagagctggaggaaggagcgcttcctggatgtgcccctgtgcaaggaggactgccagcgctggtgggaggactgccacaccagccacacctgcaagagcaactggcaccggggctgggactggaccagcggcgtgaacaagtgcccagctggggccctgtgcaggacctttgagagctacttccccaccccagctgccctgtgtgagggcctgtggagccacagctacaaggtgagcaactacagccggggcagcggccgctgcatccagatgtggtttgacagcgcccagggcaaccccaatgaggaggtggcccgcttctacgccgccgccatgcacgtgaatgctggggagatgctgcacggcaccggcggcctgctgctgagcctggccctgatgctgcagctgtggctgctgggctag

SEQ ID NO: 42792 - DNA, 516 bp, Artificial Sequence
  derived and/or modified sequence
atggtgtggaagtggatgcccctgctgctgctgctggtgtgtgtggccaccatgtgcagcgcccaggacagaacagacctgctgaatgtgtgcatggatgccaagcaccacaagaccaagccaggccctgaggacaagctgcatgaccagtgcagcccctggaagaagaatgcctgctgcacagccagcaccagccaggagctgcacaaggacaccagccggctgtacaacttcaactgggaccactgcggcaagatggagcccgcctgcaagaggcacttcatccaggacacctgcctgtatgagtgcagccccaacctgggcccctggatccagcaggtgaaccagagctggaggaaggagcgcttcctggatgtgcccctgtgcaaggaggactgccagcgctggtgggaggactgccacaccagccacacctgcaagagcaactggcaccggggctgggactggaccagcggcgtgaacaagtgcccagctggggccctgtgcaggacatag

SEQ ID NO: 42793 - DNA, 768 bp, Artificial Sequence
  derived and/or modified sequence
atggtgtggaagtggatgcccctgctgctgctgctggtgtgcgtggctaccatgtgctccgcacaagacagaactgacttactcaatgtttgtatggacgccaagcaccacaagaccaagcccgggccagaagataagctccacgatcagtgcagcccatggaaaaagaatgcttgctgcaccgccagcacatcgcaggagctgcacaaagacacctccagactgtacaattttaattgggaccattgtggcaaaatggagcctgcttgcaagagacacttcatccaggatacgtgcttatatgaatgttcccctaatctgggcccatggatacagcaagtcaaccagtcctggcgcaaggaacgcttcttggacgttcccctgtgtaaggaagattgccaacgctggtgggaggactgccataccagccatacatgtaagtcaaattggcaccgcggctgggactggacttccggagtaaataagtgccctgctggcgctttgtgtagaacatttgagtcttatttccctactcccgccgccctgtgcgaggggctctggagtcattcatataaggtgtccaattattctagaggctcaggcagatgtatccaaatgtggtttgacagtgcgcagggcaatccaaatgaggaagtcgcaaggttttatgccgccgctatgcacgttaatgccggggagatgctgcatggcaccggtgggctgttactgagtttggccctcatgcttcagttgtggctgcttggatag

SEQ ID NO: 42794 - DNA, 516 bp, Artificial Sequence
  derived and/or modified sequence
atggtgtggaagtggatgcccctgctgctgctgctggtgtgcgtggcaactatgtgcagcgctcaggacagaacagacctgttaaacgtctgtatggacgctaagcatcataaaactaagcccgggcctgaagacaaattacatgaccagtgctcaccatggaaaaagaacgcatgctgtacggccagcacttcccaggaactccataaggacacgagccggctctataacttcaactgggatcattgtggcaaaatggagccagcctgcaaacgccatttcatccaagacacatgtctgtatgagtgctcacccaacctgggaccctggatccaacaggtgaatcagtcatggagaaaggagcgcttcctcgatgttcctctgtgcaaagaagactgccagcgctggtgggaagactgccacacttctcacacatgcaaaagcaattggcatagaggctgggactggacatccggcgtgaacaaatgccccgcaggcgctctctgtcgcacctag

SEQ ID NO: 42795 - DNA, 768 bp, Artificial Sequence
  derived and/or modified sequence
atggtgtggaagtggatgcccctcctgctccttctggtgtgcgtggccaccatgtgttccgcacaggacaggacagacctacttaacgtttgcatggatgctaagcaccataagactaagcctggacctgaggacaagctgcatgatcaatgttctccgtggaaaaagaatgcatgttgcacagcctccacttctcaggagctccacaaagacacaagtcggctatataacttcaactgggaccattgcgggaagatggagcccgcatgcaagcgccactttatccaggacacttgtctgtacgagtgttcaccgaacttgggcccatggatccagcaagtgaatcagtcttggcgcaaggagcgcttcctggatgtccctctgtgtaaggaagactgtcagcgctggtgggaggattgccacacatcgcacacatgtaagagcaattggcatcggggttgggactggacgtccggtgttaataagtgtcctgcaggcgcactgtgtaggaccttcgaatcttatttcccaactccagccgcactgtgcgaaggtctctggtctcatagctacaaagtttccaactactcacggggttcaggaagatgtatccagatgtggttcgactcagctcagggcaatcctaacgaggaggtcgccaggttctatgccgcagctatgcatgtcaatgccggagaaatgctccacggcacaggagggttgctactctctctggcactcatgctccagttatggctgttgggatag

SEQ ID NO: 42796 - DNA, 516 bp, Artificial Sequence
  derived and/or modified sequence
atggtctggaagtggatgccgctgctgcttcttctcgtatgtgttgccactatgtgctcagcacaggatcgcacagatttgcttaacgtttgtatggatgctaaacatcataagaccaaacctggtcccgaagataagctacacgaccaatgttccccttggaaaaagaacgcctgttgtaccgccagcaccagccaggagttacacaaggatactagccggctgtacaatttcaactgggaccattgcggaaaaatggagcctgcctgcaaacggcactttattcaggacacatgtctgtatgagtgttcccccaatttagggccatggatacaacaagtaaaccagtcttggagaaaagagagattcctggacgtcccgctgtgcaaggaagattgccagaggtggtgggaagactgtcacactagtcacacgtgtaaatccaattggcatcgtgggtgggattggacatccggcgtgaacaaatgccctgcgggagctctgtgccgtacatag

SEQ ID NO: 42797 - DNA, 768 bp, Artificial Sequence
  derived and/or modified sequence
atggtgtggaagtggatgcccctgctgctgctgctggtgtgcgtggccaccatgtgcagcgcccaggacagaaccgacctgctgaacgtgtgcatggacgccaagcaccacaagaccaagcccggccccgaggacaagctgcacgaccagtgcagcccctggaagaagaacgcctgctgcaccgccagcaccagccaggagctgcacaaggacaccagcagactgtacaacttcaactgggaccactgcggcaagatggagcccgcctgcaagagacacttcatccaggacacctgcctgtacgagtgcagccccaacctgggcccctggatccagcaggtgaaccagagctggagaaaggagagattcctggacgtgcccctgtgcaaggaggactgccagagatggtgggaggactgccacaccagccacacctgcaagagcaactggcacagaggctgggactggaccagcggcgtgaacaagtgccccgccggcgccctgtgcagaaccttcgagagctacttccccacccccgccgccctgtgcgagggcctgtggagccacagctacaaggtgagcaactacagcagaggcagcggcagatgcatccagatgtggttcgacagcgcccagggcaaccccaacgaggaggtggccagattctacgccgccgccatgcacgtgaacgccggcgagatgctgcacggcaccggcggcctgctgctgagcctggccctgatgctgcagctgtggctgctgggctag

SEQ ID NO: 42798 - DNA, 516 bp, Artificial Sequence
  derived and/or modified sequence
atggtgtggaagtggatgcccctgctgctgctgctggtgtgcgtggccaccatgtgcagcgcccaggacagaaccgacctgctgaacgtgtgcatggacgccaagcaccacaagaccaagcccggccccgaggacaagctgcacgaccagtgcagcccctggaagaagaacgcctgctgcaccgccagcaccagccaggagctgcacaaggacaccagcagactgtacaacttcaactgggaccactgcggcaagatggagcccgcctgcaagagacacttcatccaggacacctgcctgtacgagtgcagccccaacctgggcccctggatccagcaggtgaaccagagctggagaaaggagagattcctggacgtgcccctgtgcaaggaggactgccagagatggtgggaggactgccacaccagccacacctgcaagagcaactggcacagaggctgggactggaccagcggcgtgaacaagtgccccgccggcgccctgtgcagaacctag

SEQ ID NO: 42799 - protein, 96 aa, Artificial Sequence
  derived and/or modified sequence
MKRSKELITKNHSQEETSILRCWKCRKCIASSGCFMEYLENQVIKDKDDSVDAQNICHVWHMNVEALPEWISCLIQKGKYSGVGLLDHMVSIYLLI

SEQ ID NO: 42800 - protein, 592 aa, Artificial Sequence
  derived and/or modified sequence
MKRSKELITKNHSQEETSILRCWKCRKCIASSGCFMEYLENQVIKDKDDSVDAQNICHVWHMNVEALPEWISCLIQKAQWTVGKLNCPFCGARLGGFNFVSTPKCSCGQLAAVHLSKSRTDYQPTQAGRLMRPSVKYLSHPRVQSGCDKEALLTGGGSENRNHRLLNMARNNNDPGRLTEALCLEVRPTYFEMKNEKLLSKASEPKYQLFVPQLVTGRCATRAFHRKSHSLDLNISEKLTLLPTLYEIHSKTTAYSRLNETQPIDLSGLPLQSSKNSYSFQNPSSFDPSMLLQRFSVAPHETQTQRGGEFQCGLEAASVYSDHTNTNNLTFLMDLPSAGRSMPEASDQEEHLSPLDFLHSANFSLGSINQRLNKRERSKLKNLRRKQRRRERWLQKQGKYSGVGLLDHMTLNNEMSTDEDNEYAEEKDSYICAVCLDVYFNPYMCYPCHHIFCEPCLRTLAKDNPSSTPCPLCRTIISRVFFQTELNNATKTFFTKEYLKIKQSFQKSNSAKWPLPSCRKAFHLFGGFRRHAAPVTRRQFPHGAHRMDYLHFEDDSRGWWFDMDMVIIYIYSVNWVIGFIVFCFLCYFFFPF

SEQ ID NO: 42801 - DNA, 1779 bp, Artificial Sequence
  derived and/or modified sequence
atgaagagaagcaaggagctgatcaccaagaaccacagccaggaggagaccagcatcctgagatgctggaagtgcagaaagtgcatcgccagcagcggctgcttcatggagtacctggagaaccaggtgatcaaggacaaggacgacagcgtggacgcccagaacatctgccacgtgtggcacatgaacgtggaggccctgcccgagtggatcagctgcctgatccagaaggcccagtggaccgtgggcaagctgaactgccccttctgcggcgccagactgggcggcttcaacttcgtgagcacccccaagtgcagctgcggccagctggccgccgtgcacctgagcaagagcagaaccgactaccagcccacccaggccggcagactgatgagacccagcgtgaagtacctgagccaccccagagtgcagagcggctgcgacaaggaggccctgctgaccggcggcggcagcgagaacagaaaccacagactgctgaacatggccagaaacaacaacgaccccggcagactgaccgaggccctgtgcctggaggtgagacccacctacttcgagatgaagaacgagaagctgctgagcaaggccagcgagcccaagtaccagctgttcgtgccccagctggtgaccggcagatgcgccaccagagccttccacagaaagagccacagcctggacctgaacatcagcgagaagctgaccctgctgcccaccctgtacgagatccacagcaagaccaccgcctacagcagactgaacgagacccagcccatcgacctgagcggcctgcccctgcagagcagcaagaacagctacagcttccagaaccccagcagcttcgaccccagcatgctgctgcagagattcagcgtggccccccacgagacccagacccagagaggcggcgagttccagtgcggcctggaggccgccagcgtgtacagcgaccacaccaacaccaacaacctgaccttcctgatggacctgcccagcgccggcagaagcatgcccgaggccagcgaccaggaggagcacctgagccccctggacttcctgcacagcgccaacttcagcctgggcagcatcaaccagagactgaacaagagagagagaagcaagctgaagaacctgagaagaaagcagagaagaagagagagatggctgcagaagcagggcaagtacagcggcgtgggcctgctggaccacatgaccctgaacaacgagatgagcaccgacgaggacaacgagtacgccgaggagaaggacagctacatctgcgccgtgtgcctggacgtgtacttcaacccctacatgtgctacccctgccaccacatcttctgcgagccctgcctgagaaccctggccaaggacaaccccagcagcaccccctgccccctgtgcagaaccatcatcagcagagtgttcttccagaccgagctgaacaacgccaccaagaccttcttcaccaaggagtacctgaagatcaagcagagcttccagaagagcaacagcgccaagtggcccctgcccagctgcagaaaggccttccacctgttcggcggcttcagaagacacgccgcccccgtgaccagaagacagttcccccacggcgcccacagaatggactacctgcacttcgaggacgacagcagaggctggtggttcgacatggacatggtgatcatctacatctacagcgtgaactgggtgatcggcttcatcgtgttctgcttcctgtgctacttcttcttccccttctag

SEQ ID NO: 42802 - DNA, 1779 bp, Artificial Sequence
  derived and/or modified sequence
atgaagagaagcaaagagctgattacaaagaatcatagccaagaggagacctcaattttgagatgttggaagtgtaggaagtgtatcgcttcaagtgggtgttttatggaatatctcgagaatcaggtcattaaagacaaagacgattctgtcgacgcccagaatatctgccacgtgtggcacatgaacgtcgaggcccttcccgagtggataagctgcttaatccagaaggctcagtggacggtgggtaaactcaattgccccttctgcggtgctagactggggggattcaacttcgtgagcactcccaaatgttcctgtggccaacttgctgcggtgcatctcagtaagagcagaacggattaccagcccacacaggctggccgactaatgaggccatcagtcaaatacctgtctcacccccgagtgcagagtggctgtgataaagaagccctgctaactggcggcggctccgaaaacagaaatcacaggctgttgaacatggccaggaataataacgacccagggagactgaccgaggccttgtgcttggaagtccgacccacctattttgaaatgaagaatgagaagttactttccaaggcgagcgaaccaaagtaccagctgttcgtcccacagctagtcactgggcggtgtgccacgcgggctttccacagaaagtcccatagcttagatctgaacatcagcgagaagctgacactactgcccacattatacgaaatccattccaaaaccaccgcctattctaggctgaatgaaacacagcccatcgatctaagcgggttaccgctgcagagctctaagaattcatattcatttcaaaatccttctagtttcgatcccagcatgttgctccaacggttcagtgtggctccgcacgagacacagacccagcgcggtggcgaatttcagtgtggactggaggcagctagtgtatacagcgaccacactaatactaataacttaaccttccttatggatctgcctagcgctgggcgctctatgccagaggcttctgatcaggaagaacacctttctcccctggattttctgcactcagctaatttttccctgggtagcatcaatcaacgcctgaataaaagagagcggtcaaaactcaaaaacctgcgccgtaagcaacgcagacgggaacgctggctgcagaaacaaggaaagtatagcggggttggcttgctggaccacatgactctcaataacgagatgtcaacagatgaggacaacgagtatgcagaggaaaaggattcctatatttgtgcagtttgtctggacgtgtacttcaacccctacatgtgttatccctgccaccacattttctgtgaaccttgcctccgtaccctagctaaggataatccctccagcaccccctgccctctctgtcgtaccattatctcgagagtgttttttcagactgagctgaataacgccaccaagaccttcttcaccaaagagtacctgaaaattaagcagtcctttcagaaatcaaacagtgctaagtggccactccccagctgccggaaggcatttcatctcttcgggggtttcagaaggcacgcggctccagtcacaagaagacagtttccacatggcgcacatcgcatggattatctgcattttgaagatgacagtagaggttggtggtttgatatggatatggtaataatctatatttacagtgtgaattgggtcatcggatttattgtcttttgtttcctttgctattttttttttccattctag

SEQ ID NO: 42803 - DNA, 1779 bp, Artificial Sequence
  derived and/or modified sequence
atgaagaggagcaaggagctgatcaccaagaaccacagccaggaggagaccagcatcctgcgctgctggaagtgcaggaaatgtattgccagcagcggctgcttcatggagtacctggagaaccaggtgatcaaggacaaggatgacagcgtggatgcccagaacatctgccacgtgtggcacatgaatgtggaggccctgcctgagtggatcagctgcctgatccagaaggcccagtggacagtgggcaagctgaactgccccttctgtggggcccggctgggcggcttcaactttgtgtccacccccaagtgcagctgtggccagctggccgctgtgcacctgagcaagagcaggacagactaccagcccacccaggccggccgcctgatgaggcccagcgtgaagtacctgagccacccccgggtgcagagcggctgtgacaaggaggccctgctgaccggcggcggctctgaaaatagaaaccaccggctgctgaacatggccaggaacaacaatgaccccggccgcctgacagaggccctgtgcctggaggtgcggcccacctactttgagatgaagaatgagaagctgctgagcaaggccagcgagcccaagtaccagctgtttgtgccccagctggtgacaggccgctgtgccacccgggccttccacaggaagagccacagcctggacctgaacatcagcgagaagctgaccctgctgcccaccctgtatgagatccacagcaagaccacagcctacagccggctgaatgagacccagcccatcgacctgagcggcctgcccctgcagagcagcaagaacagctacagcttccagaaccccagcagctttgaccccagcatgctgctgcagcgcttctctgtggcccctcatgagacccagacccagagaggaggagagttccagtgtggcctggaggccgcctctgtgtacagcgaccacaccaacaccaacaacctgaccttcctgatggacctgcccagcgctggccgctccatgcctgaggccagtgaccaggaggagcacctgagccccctggacttcctgcacagcgccaacttcagcctgggcagcatcaaccagaggctgaacaagcgggagaggagcaagctgaagaacctgcggaggaagcagaggagaagagagcgctggctgcagaagcagggcaagtacagcggcgtgggcctgctggaccacatgaccctgaacaatgagatgagcacagatgaagataatgaatatgcagaggagaaggacagctacatctgtgctgtgtgcctggatgtgtacttcaacccctacatgtgctacccctgccaccacatcttctgtgagccctgcctgcggaccctggccaaggacaaccccagcagcaccccctgccccctgtgcaggaccatcatcagcagggtcttcttccagacagagctgaacaatgccaccaagaccttcttcaccaaggagtacctgaagatcaagcagagcttccagaagagcaacagcgccaagtggcccctgcccagctgcaggaaggccttccacctgtttggaggcttcagaagacatgctgcccctgtgacccggcggcagttcccccacggggcccacaggatggactacctgcactttgaagatgacagccggggctggtggtttgacatggacatggtgatcatctacatctacagcgtgaactgggtgattggcttcatcgtgttctgcttcctgtgctacttcttcttccccttctag

SEQ ID NO: 42804 - DNA, 1779 bp, Artificial Sequence
  derived and/or modified sequence
atgaagcggagcaaggagctgatcaccaagaaccacagccaggaggagacatctattttacggtgctggaagtgtcggaaatgtatagcaagcagcgggtgctttatggagtatctcgaaaaccaggtcatcaaggataaggatgattccgttgatgcacagaatatctgtcacgtgtggcatatgaacgtcgaagcactgccagagtggatttcctgcctgatccagaaagcccagtggaccgttggaaaattaaactgtcctttttgcggcgcccggctgggaggtttcaactttgtgagtacccctaaatgctcctgcggacagcttgctgcagtccacctgtctaaatcacgaacagactatcagccaacccaagctggacgtttaatgcgaccatccgtaaaatacctgtctcaccccagagtgcagagcggctgcgataaggaagccctgttgacaggggggggatcagagaataggaatcacaggctcttaaatatggctcggaacaacaacgaccctggacgcctgaccgaagccctgtgcctggaagtgcggccaacctatttcgagatgaagaacgagaaattactctcaaaagcctcagagcctaaataccagctgtttgtcccccagctagtgaccggcaggtgcgcaacacgcgcattccaccgaaaatcccacagcttggatttaaatattagcgagaagctcaccctgcttcctaccctttatgaaatccattctaaaactacggcctactctaggcttaacgaaacgcagcctatagatctgtccggattgccgctgcagtcctctaaaaactcctactcttttcagaacccgtcttcattcgatccatctatgttgcttcaacggttctctgtggcccctcacgagacacagacacagaggggaggcgaattccagtgcggcctggaagccgccagcgtgtactctgatcacaccaatactaataatcttacttttctcatggacctccctagtgctggcagatccatgccagaagctagcgatcaggaggagcatctcagtcccctggacttcttgcactctgccaattttagcctggggtcaatcaaccagcgtctgaataaaagggagcgctcgaagctgaagaacctgcgcaggaagcagagacgtagggagaggtggctccagaagcagggtaagtatagcggagtcggcttattggaccacatgacgcttaacaacgaaatgtcaaccgatgaggacaacgaatacgcggaggaaaaagattcttacatctgcgcagtgtgcttggacgtgtacttcaatccctacatgtgttatccttgtcaccacatattctgcgaaccatgtctccggacactggccaaagataacccaagttctacgccttgtccgctgtgccgaactataatcagccgcgtgttctttcagacagagctgaacaacgctaccaaaacttttttcacgaaggagtacctgaagattaagcagagcttccaaaagtctaactccgccaagtggcccctgccctcctgtcgcaaggccttccacctttttggaggtttcagacgccatgcagcgccggtaacaagaaggcagttcccccacggcgcgcacagaatggattatttacactttgaagacgacagccggggctggtggtttgatatggacatggtgattatctacatatactcagttaactgggtgatcggcttcatcgtgttttgttttctgtgctactttttctttccattctag

SEQ ID NO: 42805 - DNA, 1779 bp, Artificial Sequence
  derived and/or modified sequence
atgaaacgtagcaaggagttaatcacgaagaaccactctcaagaggaaacgtccatattgcgatgctggaagtgccgaaaatgtattgcatctagtgggtgctttatggaatacctggagaaccaggtcattaaggataaggacgattcagtggacgcccaaaacatctgccatgtgtggcacatgaatgtggaagctctcccggagtggataagctgtctgatccagaaggcgcagtggaccgtgggaaaactgaattgtccgttctgcggcgcacgcctaggtggattcaactttgtatccactcctaaatgtagttgcggccagcttgctgccgtccatctcagcaagtcaagaaccgactatcagccgacacaggcaggccgattaatgcggcctagcgtgaagtacttgtctcaccctcgggttcagagcgggtgcgacaaagaggcgctgctcactggtggtggctccgaaaatcgaaaccatcggctcctgaacatggcccgtaataataacgaccctggtcgactcacggaggctctctgcctcgaagtgcgccctacctactttgaaatgaagaatgagaagcttctgagcaaggccagcgaacctaaataccagcttttcgtcccacagctcgtgaccggcagatgtgccacccgcgcattccaccgaaagtctcattcccttgacctgaatatcagcgagaaacttacccttttgcccactctgtatgagattcacagcaagaccactgcttactcaagactgaatgagacccaaccaattgatctcagcggtctacctcttcagagtagtaagaactcttactcttttcaaaatccatcatccttcgatccttcaatgttgctgcagagattctccgtcgctccacacgaaacacaaacccaacggggtggtgaattccagtgcggactggaggccgcttctgtctactccgaccatacaaacacaaacaacttaacctttttaatggacctgccatcagcgggtaggtcaatgcctgaggcaagcgaccaagaagaacacctgagtccgctagacttcctgcatagtgcaaatttttctctggggagtattaatcagcgcctaaacaagcgggaacgaagtaaattgaagaatctcaggaggaagcagagacgacgagaacgttggctgcagaagcagggcaagtacagcggcgtggggctactagaccacatgactctgaataacgaaatgagtacagacgaggacaacgagtatgctgaagagaaagattcctatatatgcgcagtttgcctagacgtttactttaacccgtacatgtgttatccttgccatcacatcttctgcgaaccctgtctccggaccctggccaaggataatccctcatcaactccctgtcctctctgtagaacaataatcagccgcgtcttttttcagacagagctcaacaatgcaacaaagacttttttcacgaaggagtacctgaagatcaagcagagctttcagaagtctaattctgcaaagtggccccttcctagctgtaggaaagccttccacctgttcgggggattccgtcgccacgcagctccagtcactagaagacagttcccccatggggctcacaggatggactacctccacttcgaagacgattctcgaggctggtggttcgacatggatatggtcattatctacatctattcggttaactgggtgatcggatttatcgtgttttgctttctgtgctattttttttttcctttttag

SEQ ID NO: 42806 - DNA, 4906 bp, Artificial Sequence
  derived and/or modified sequence
agagcctggctgctggcggccgggagcgccgggacggggcgcgaagccggaggctccgggacgtggatacagatgaaaagaagcaaagaattgataactaaaaatcatagtcaagaggaaacaagtattcttcgttgttggaaatgtagaaaatgtatagcaagctctggttgttttatggagtatcttgagaatcaagtgattaaggataaagatgattcagttgatgctcaaaatatttgtcatgtgtggcacatgaatgtagaagcccttccagaatggataagctgcctaatccaaaaagcccagtggacagttggaaaactgaattgtcctttctgtggggcccgtttagggggctttaattttgtcagcactccaaaatgttcctgtggccagcttgcagctgtacatctctccaagagccggactgattatcagccaacacaggcaggcagactaatgagaccatcagtgaaatacttgtcacatcctagagttcagtcaggttgtgacaaggaagctctgctgacaggtggtggctctgaaaacagaaatcacaggcttttaaacatggcccgaaataataatgaccctggaagattaacagaagcactctgcctggaggtgcgaccaacatattttgagatgaagaacgaaaaactgctgtccaaagcatcagaaccaaaataccagctttttgttccccagcttgtgactggcagatgcgctacaagagcttttcatagaaaatcacatagtttggatctgaacatcagtgagaaactgactttattacccactttatatgaaatacatagtaagactactgcctattccagactaaatgaaacacagcctattgacctttcaggcttgcctttacaatctagtaaaaatagctattcctttcagaatccatccagttttgatcctagtatgctgctgcaaagattttcagtggccccccatgagacccagacacaaagaggaggagaatttcagtgtggtctagaagctgcttcagtgtattctgaccatactaatactaacaatctgactttcctgatggacctgccctcagctggcaggagcatgccggaggcctcagaccaggaagagcacctctcccctctggacttcctgcactcagccaatttttcattgggcagcattaatcagaggcttaataagagagaaaggagcaagttgaagaatctaagaaggaaacaacgaaggcgtgaaagatggctacagaagcagggtaaatactcaggagtgggattgctggatcatatgactttgaataatgagatgagtacagatgaagacaatgaatatgcagaagaaaaggatagctacatctgtgcagtgtgtctggacgtttatttcaacccttatatgtgttacccttgccatcacatcttctgtgagccctgcttacggactctggccaaagacaatccttcaagcactccatgcccattgtgtcggacaattatttctagagtctttttccaaacagaattgaacaatgccacaaaaactttctttactaaagaatatttgaaaataaaacaaagctttcagaaatccaactctgcaaaatggcccctaccaagctgcagaaaagcatttcatctttttggaggtttccgcagacatgcagctccagttacaagaaggcagttcccacacggtgcacacaggatggattacctgcactttgaggatgatagccgtggatggtggtttgacatggatatggtgatcatatatatttattcagtgaactgggtcattggattcattgttttctgctttctttgctattttttctttccgttttaggaatttcataccttactacaattgaccaatcataaatgatgtaaataacaattgcttaaacatttttaaatgtgctttgaagtttttttaatgttgcattatacaaattgttgatgtttatagaaagcctgagaataatgaatttatttattaatgtttttcatgtaacaaactaaactttattcaagagctaacctacccagcacttagcaacaatgcactattaatttcatagttgttcttgggttaggatttggggctctgattttataatatcactttaatacttattttgattgtaaaaaactgaagttttctctccacttaaaaatagtaaaaatacaaaaagaaatgataatctaggtagatattatctttactgataaaatatttagtcaatcaccacttattctcaggcaaattatatgtattaaagataaaccatattctctgggaactaatctagcagggtatattcagttttggtttctaattgtcactacttatatccctttctagtaccaagaaaactgactattctttttgtacagatctaattagtacaacattttaaattattataaacagaatactaaatacaaatcatgagactaatccctaccaataaacactttagctagctataaacactttccagattgaaggattaatcaccagaagacatgaaaaatttaccgacttttagtagtctaaaagagcaatgcatggtccaaaatgtaatttagtgattcatttaagtaggagatggtcaaatatattgtaaatgtgcaataaagagtggcttttaatttttttaatgtctgaataaagtattgttataaataggcttatcgattttagaaagaaaacctgacatttttaattacagtaatcattaatttttttcattattaaaatttaaaaataagagaactgaatcattagaacatggaattggggcaggtaacccaattcaaaaaaggaaaaactggagcagagacttaagcttatttattcagttattctggtggtctttgtgaaacctgggacaaagtttttattatgaattactaatccagtattactacactatgatgtcatatatctggtaattcaataagcaaacttttacataaaataggtgactctctcgtggcactaaaaatactaccactatccaaaaacattgggatcaactgggctttaacagtttcaatctatgaaaagccaaaatttaagctaattgctactaactgtatttcaataaaagcacttgactgttggtatgtgatgttctaagaaaactagaagaatggtactgatttctattctaatgctgttcttattattgtgttttaaattatatctattacagaaaatagtatacactagacatcaaatccagaaatcagaacactaagtacaatttagaaacacagataaatttatacttataaatggatatttataattactaattgctcaaagtaaacataagggaaaatatcagctctcttaaaatatatagcaagattgaaaacacacatatgaggagttgcattattttaagaactttaaattgcagccatttcctaggcaacttctggtttatacactctagaaaatatatcttgattcattcctaaatcacaataaaggttttaattatgtataaactaaataagtattattatagatacagatctctcataggaacaaagttgattcccaatatatatttgttaggtcagtgatacatatcagtttatagatctcagtctactaaatatttatgatacccttaaataaacatgaacctttaaatgaagaaagcataatctggaaaagcattcaaaatggattgagtatatttatcttgactaataacttgatctgaaaattatagaatattaaaagaagtaaattcataaaattataaattactaatctttaaaatattcttaaattttgtaaaagtggagataaaaactgctaaatattaagaagtatagcatttcctagatctaccagcttataagaagccagataaaatctcagatggaaagaaaccagtttcttctggtatgtagcacacagtagccattcaaaataaaatacatggatgagctttagagtaaaacaaaaaattataatgctcttcctaagcatctctcacagtaaaaactcactgtccaataaagagccaaagaaaggaaaagaagaaaaatgttaaagttaatgaagcatagtacttgtcccaagtaatattatttaataagcttaattttatgagttatcattatcaataatttctatttctaccaagcttaattatggtaaaggttaattttaaacatgttcacacattcttttttaaaaaaatgccctaattgaggtatatttctgaatagtttcagcaggttattttttaattttaaaaaagcaaattcacaaacctagacccatttattttatactcagcagaagacagggaaatttaaattagacaaagttgaaaaagaatcagaatttatattttacaaagcttctaccactctgaatcaacaaaatcaggaatggaaaaaaaaatttctgtatctgctgaattattaatgccactatagtattatatgctaaatatgaaagcagtgctgccatcagtttcacttctgccttggaatcttgctcctaagttagctctgtggcataacaaaattccagttaataaaattttcatttaaatgtcttttgtatggctaaatgaatatacagattcttaaacatctaatttttatatggatttctcaaagaatgccttacagaagagcattctctgattaaatgcaattacagttggagtctttgattcttcacagaattctgtagttgaagccagaaaacactgtcatttaggaaagtgttcctaaaggtttgaatgctttaacatgctcaactcttacttcttgaagtgtttgattgtcagtaaattttcgaagaacattaaagttctaccaatgtagaagcatgaggaataaaagatggtctggatcaagaa

SEQ ID NO: 42807 - protein, 592 aa, Artificial Sequence
  derived and/or modified sequence
MEMYETLGKVGEGSYGTVMKCKHKNTGQIVAIKIFYERPEQSVNKIAMREIKFLKQFHHENLVNLIEVFRQKKKIHLVFEFIDHTVLDELQHYCHGLESKRLRKYLFQILRAIDYLHSNNIIHRDIKPENILVSQSGITKLCDFGFARTLAAPGDIYTDYVATRWYRAPELVLKDTSYGKPVDIWALGCMIIEMATGNPYLPSSSDLDLLHKIVLKVGNLSPHLQNIFSKSPIFAGVVLPQVQHPKNARKKYPKLNGLLADIVHACLQIDPADRISSSDLLHHEYFTRDGFIEKFMPELKAKLLQEAKVNSLIKPKESSKENELRKDERKTVYTNTLLSSSVLGKEIEKEKKPKEIKVRVIKVKGGRGDISEPKKKEYEGGLGQQDANENVHPMSPDTKLVTIEPPNPINPSTNCNGLKENPHCGGSVTMPPINLTNSNLMAANLSSNLFHPSVRLTERAKKRRTSSQSIGQVMPNSRQEDPGPIQSQMEKGIFNERTGHSDQMANENKRKLNFSRSDRKEFHFPELPVTIQSKDTKGMEVKQIKMLKRESKKTESSKIPTLLNVDQNQEKQEGGDGHCEGKNLKRNRFFFW

SEQ ID NO: 42808 - DNA, 1779 bp, Artificial Sequence
  derived and/or modified sequence
atggaaatgtatgagacactcggcaaagttggtgaagggtcctacggtacggtcatgaagtgtaaacacaagaacactggccaaatcgtagccattaaaatcttctatgaacggccggagcaatctgtgaacaagatcgccatgcgggaaattaaatttctgaaacagttccatcatgaaaacctcgtgaacctcatagaggtgtttcgtcagaagaagaaaatccatcttgtgttcgaattcatagaccatactgtcctggacgaactccaacactattgccatggcctggagagtaagcgtctgcggaagtacctcttccagatcctgagagcaatcgattacttacattctaacaacatcatccacagggatataaagccagaaaatatcctagtatcgcagagcggaattactaaactctgcgatttcgggttcgctcgaactctggcagctccaggcgatatttacactgactatgttgcaactagatggtatcgggcccctgagctggtgttgaaggacacaagttacgggaagcctgtggatatctgggccctgggatgtatgatcattgagatggctactggtaacccctacctgccctcttccagcgacctggacttgctccataaaatcgtactcaaagtaggaaatttatctcctcatctacagaatattttctccaagtctcccatcttcgccggagtggtgctcccgcaggtacagcaccctaagaacgcccgtaagaagtacccaaagctgaacggcttgttagctgacattgtgcacgcatgcttgcagatagatcctgctgaccggatttccagcagcgaccttttgcaccatgagtactttaccagagatggttttatcgagaagttcatgcccgagttaaaggccaagctcctgcaagaggccaaggtcaattccctcatcaaacctaaggagtcatctaaggaaaacgagctccggaaagacgaacgcaaaacagtgtacaccaatactttactcagtagttcagtgctcggcaaggagattgagaaggaaaagaagcctaaggagataaaggtccgggtcatcaaagtcaaaggtggacggggcgacatttctgagcccaagaaaaaggaatacgagggtggcctgggacagcaggatgctaacgaaaacgtacatccaatgtctcccgacacaaaactggtgacaatagagcctcccaaccccataaatccctcaaccaactgcaatggtctgaaggaaaaccctcattgtggaggcagcgtcactatgcccccgattaatctcacaaatagcaacttaatggccgcaaatctgagctctaacttattccatccttcagtgcgactaaccgaaagggcgaaaaagcggcgaacatcctcccaatctatcggacaggtaatgcctaactcgaggcaggaggacccaggcccaatccagtcacagatggaaaaagggatttttaacgagagaacggggcacagcgatcagatggctaacgagaataaaagaaaattgaatttcagccgatctgaccggaaggaatttcacttccccgagcttccagtcacgatccaaagtaaagacaccaaagggatggaggtgaaacagataaaaatgcttaaacgggagtctaagaaaacggaatcatcaaaaatccctacgctgttgaatgttgaccaaaatcaggagaagcaggaaggtggagacggacattgtgaagggaaaaatctcaagagaaataggttctttttttggtag

SEQ ID NO: 42809 - DNA, 1779 bp, Artificial Sequence
  derived and/or modified sequence
atggagatgtatgagaccctgggcaaggtgggggagggcagctatggaacagtgatgaagtgcaagcacaagaacacaggccagatcgtggccatcaagatcttctatgaaagacctgagcagagcgtgaacaagatcgccatgagggagatcaagttcctgaagcagttccaccacgagaacctggtgaacctgattgaggtgttccggcagaagaagaagatccacctggtgtttgagttcatcgaccacacagtgctggatgagctgcagcactactgccacggcctggagagcaagaggctgaggaagtacctgttccagatcctgcgggccatcgactacctgcacagcaacaacatcatccaccgggacatcaagccagagaacatcctggtgtcccagagcggcatcaccaagctgtgtgactttggatttgcccggaccctggccgcccctggggacatctacacagattatgtggccacccgctggtaccgggcccctgagctggtgctgaaggacaccagctatggcaagcctgtggacatctgggccctgggctgcatgatcatcgagatggccaccggcaacccctacctgcccagcagcagtgacctggacctgctgcacaagatcgtgctgaaggtgggcaacctgagcccccacctgcagaacatcttcagcaagagccccatctttgctggggtggtgctgccccaggtgcagcaccccaagaatgccaggaagaagtaccccaagctgaatggcctgctggccgacatcgtgcacgcctgcctgcagattgatcctgctgaccgcatcagcagcagtgacctgctgcaccacgagtacttcaccagagatggcttcatcgagaagttcatgcctgagctgaaggccaagctgctgcaggaggccaaggtgaacagcctcatcaagcccaaggagagcagcaaagaaaatgagctgaggaaggatgagaggaagacagtgtacaccaacaccctgctgagcagctctgtgctgggcaaggagattgagaaggagaagaagcccaaggagatcaaggtgcgggtcatcaaggtgaagggcggccgcggggacatcagcgagcccaagaagaaggagtatgagggcggcctgggccagcaggatgccaatgaaaatgtgcaccccatgagcccagacaccaagctggtgaccatcgagccccccaaccccatcaaccccagcaccaactgcaatggcctgaaggagaacccccactgcggcggctctgtgaccatgccacccatcaacctgaccaacagcaacctgatggccgccaacctgagcagcaacctcttccaccccagcgtgcggctgacagagcgggccaagaagaggaggaccagcagccagagcatcggccaggtgatgcccaacagccggcaggaggaccccggccccatccagagccagatggagaagggcatcttcaatgaaagaacaggccacagcgaccagatggccaatgaaaacaagaggaagctgaacttcagcagaagtgacaggaaggagttccacttccctgagctgcctgtgaccatccagagcaaggacaccaagggcatggaggtgaagcagatcaagatgctgaagcgggagagcaagaagacagagagcagcaagatccccaccctgctgaatgtggaccagaaccaggagaagcaggagggcggagatggccactgtgagggcaagaacctgaagaggaaccgcttcttcttctggtag

SEQ ID NO: 42810 - DNA, 1779 bp, Artificial Sequence
  derived and/or modified sequence
atggagatgtacgagaccctgggcaaggtgggcgagggcagctacggaaccgttatgaagtgtaagcacaaaaacacgggtcaaattgtggcaattaaaatcttctatgaacgcccggaacaaagcgtgaacaaaatcgcgatgagagagattaagttcttgaagcaattccatcacgagaatctcgtgaatctgatcgaagttttccggcagaaaaagaagattcacctcgtgttcgagtttatagaccatactgtgctggacgagctgcagcactactgccacggtcttgagagtaaacggcttagaaagtacctgttccagattctgcgcgctattgattatttacattccaacaatattattcatagagacatcaagcccgaaaacattttagtgagtcagagcggtataacaaagctatgcgactttggctttgctcggacccttgctgcaccaggagatatatacactgattatgttgcgacgaggtggtacagagcacccgaacttgtcctcaaggatacttcttatggtaaaccagttgacatctgggccctgggctgcatgattatcgaaatggcgacaggcaatccatatctgccctcctcctccgacctcgacctgctccataagatcgttctgaaggtgggaaacctgtccccgcatctgcagaatattttctcaaaaagccctatctttgccggcgtggtgctgccccaagtgcagcacccaaagaatgctcgaaaaaagtacccgaaacttaacggcctactggccgatattgtccacgcatgcttacagatcgatcccgctgatcggatcagtagttccgatttgctacatcacgagtacttcactcgagacgggtttatcgagaaattcatgcccgagctgaaagcaaagctgctacaggaagctaaagttaattcactcatcaagcctaaggaatccagcaaggagaacgaacttagaaaagacgaacgtaaaacggtgtatacaaacactctgctgtcctcttcggtgttaggaaaagagatcgaaaaagagaagaaacctaaggaaattaaagttcgggtcattaaggtaaagggaggacgtggcgatatttcggagccgaagaagaaagagtatgaggggggcctgggccagcaggatgctaatgagaatgttcatcccatgagccctgacactaagcttgtcacaatcgaaccgcccaaccctattaacccctctactaactgtaatggtctcaaagaaaacccccattgcggaggtagcgtaaccatgccacccatcaatctgaccaacagtaaccttatggcagccaatctcagcagcaacctttttcatccatccgttagattaactgagagggccaagaaacgacgaacgtcctcacagtcaatcggccaggtcatgccaaactctcggcaggaggaccctggaccgatccagagccagatggagaagggaatattcaatgagcggaccgggcattctgatcagatggccaatgagaataaaagaaagttgaacttctcaaggtccgatcgcaaagaattccacttccccgagctgccagtgaccatccagagcaaagacaccaagggcatggaagtgaagcaaataaaaatgttgaagagagagagcaaaaagacggaaagttccaagatcccaaccctgctgaatgtcgaccaaaaccaagaaaaacaagaaggaggcgacggccactgtgagggcaaaaatcttaagcggaatcgcttctttttttggtag

SEQ ID NO: 42811 - DNA, 1779 bp, Artificial Sequence
  derived and/or modified sequence
atggaaatgtacgagaccctcgggaaggtcggagagggctcctacggaactgtgatgaaatgcaaacataagaacaccggccagatagtggctatcaagatcttttacgagagaccggaacaatccgtcaacaagatcgcgatgcgagagataaaattcctgaaacagttccaccatgagaatcttgttaatctcatcgaagtgtttagacagaaaaagaaaatacacctggtgtttgaattcatcgaccataccgtactcgatgagctgcaacactactgtcacggcctcgagagcaagaggcttcgcaagtacctgtttcaaatcctgagagctattgactacctgcatagtaataacattattcacagagacatcaagccagagaacattctggtttcccaatcggggatcactaagctttgcgattttggatttgcgagaacattggctgcacctggagacatctacaccgattatgtggccacccggtggtaccgggctcccgagctcgtcctaaaggacacatcgtacggcaagcctgttgacatctgggctctaggatgcatgatcatcgaaatggcaacggggaatccttacttgcccagctccagcgacttggacctcttgcacaaaattgtactcaaagtgggaaatttatctccacatctgcagaacattttctccaaatcacctatatttgcaggtgtcgttcttccccaggtgcagcatcctaaaaacgcaagaaagaagtaccctaagctgaacggtctgctagctgatatcgtccatgcctgtttgcagatagaccccgctgatcggatctcttcttcagacctgcttcaccacgagtacttcaccagagatggcttcatcgaaaaatttatgcctgagctcaaagccaagctgctgcaagaggcaaaggttaattctctgatcaagccaaaagagagctcaaaagaaaacgaactccggaaggatgagagaaaaactgtgtataccaatacactcttatcctcaagtgtgctgggcaaagaaattgagaaggagaaaaagccaaaggagattaaggtgcgagtgattaaggtcaaaggcggacggggagacattagcgagccaaaaaaaaaggagtacgaaggtggactggggcagcaggatgctaacgagaacgttcatccaatgtcccccgacacaaagctggttacgatcgagcctcccaatcccatcaatccttccacgaactgcaatgggctgaaagaaaatccccactgcgggggatctgttaccatgccaccaataaacctaaccaacagcaatctgatggcagcgaacctctcctccaatctgtttcatccatccgtccggctgacagagcgcgcaaagaaacgcagaactagttcccaatctattgggcaggtgatgccaaattccagacaggaggatccagggcctattcaatctcagatggagaaaggtattttcaacgaacggacaggtcattctgaccagatggctaatgaaaacaagcgcaaattaaacttcagtaggtccgacaggaaagagttccattttccagaactgccagtgactattcaatccaaagatacgaagggcatggaggtcaaacagatcaagatgctcaagagggagtccaagaaaacagaatctagcaaaatccctacattgttaaacgtggaccagaatcaggaaaaacaggaaggtggagacggccactgtgaggggaaaaacctcaaacgtaacaggttcttcttttggtag

SEQ ID NO: 42812 - DNA, 2127 bp, Artificial Sequence
  derived and/or modified sequence
ggaactacgcagagccagaccagcgggaccacagaatgggctgaggcggcggcggctgtttggataaagtcaacagcgggacgtggggcgtgacgccgtagtaaaagcccagcttgaaaatggagatgtatgaaacccttggaaaagtgggagagggaagttacggaacagtcatgaaatgtaaacataagaatactgggcagatagtggccattaagatattttatgagagaccagaacaatctgtcaacaaaattgcgatgagagaaataaagtttctaaagcaatttcatcacgaaaacctggtcaatctgattgaagtttttagacagaaaaagaaaattcatttggtatttgaatttattgaccacacagtattagatgagttacaacattattgtcatggactagagagtaagcgacttagaaaatacctcttccagatccttcgagcaattgactatcttcacagtaataatatcattcatcgagatataaaacctgagaatattttagtatcccagtcaggaattactaagctctgtgattttggttttgcacgaacactagcagctcctggggacatttatacggactatgtggccacacgctggtatagagctcccgaattagtattaaaagatacttcttatggaaaacctgtggatatctgggctttgggctgtatgatcattgagatggccactggaaatccctatcttcctagtagttctgatttggatttactccataaaattgttttgaaagtgggcaatttgtcacctcacttgcagaatatcttttccaagagccccatttttgctggggtagttcttcctcaagttcaacaccccaaaaatgcaagaaaaaaatatccaaagcttaatggattgttggcagatatagttcatgcttgtttacaaattgatcctgctgacaggatatcatctagtgatcttttgcatcatgagtattttactagagatggatttattgaaaaattcatgccagaactgaaagctaaattactgcaggaagcaaaagtcaattcattaataaagccaaaagagagttctaaagaaaatgaactcaggaaagatgaaagaaaaacagtttataccaatacactgctaagtagttcagttttgggaaaggaaatagaaaaagagaaaaagcccaaggagatcaaagtcagagttattaaagtcaaaggaggaagaggagatatctcagaaccaaaaaagaaagagtatgaaggtggacttggtcaacaggatgcaaatgaaaatgttcatcctatgtctccagatacaaaacttgtaaccattgaaccaccaaaccctatcaatcccagcactaactgtaatggcttgaaagaaaatccacattgcggaggttctgtgacaatgccacccatcaatctaactaacagtaatttgatggctgcaaatctcagttcaaatctctttcaccccagtgtgaggttaactgaaagagcaaaaaagagacgcacttcttcacaatctattggacaagttatgcctaatagcaggcaagaggatccaggtcctattcaaagccaaatggagaagggtatatttaatgagcgaacaggtcacagtgaccaaatggcaaatgagaacaaaaggaagctgaatttttccagatctgacaggaaagaattccattttccagaattgcctgtcacaatacagtcaaaagatacaaaaggaatggaagttaaacagataaaaatgctgaagagggagtcaaagaaaacagagtcatctaagataccaactttacttaacgtggatcaaaatcaagaaaaacaagagggtggagatggccattgcgaggggaagaatttgaagagaaacaggttttttttctggtagtgtcttttcttttacatagtccaaaaaatacaagatgacaactcttcccgttttatttatctacaatagaagtgtgatgtgagttgttgttaagacagccatccatgtgcatgagcatcatccagctttttttgttagcaaaacatttactgttttcttttcccttttaagactctgttgatgtgataatttgatttggaattataaagtcatctcttctctgcctact

SEQ ID NO: 42813 - DNA, 1779 bp, Artificial Sequence
  derived and/or modified sequence
atggagatgtacgagaccctgggcaaggtgggcgagggcagctacggcaccgtgatgaagtgcaagcacaagaacaccggccagatcgtggccatcaagatcttctacgagagacccgagcagagcgtgaacaagatcgccatgagagagatcaagttcctgaagcagttccaccacgagaacctggtgaacctgatcgaggtgttcagacagaagaagaagatccacctggtgttcgagttcatcgaccacaccgtgctggacgagctgcagcactactgccacggcctggagagcaagagactgagaaagtacctgttccagatcctgagagccatcgactacctgcacagcaacaacatcatccacagagacatcaagcccgagaacatcctggtgagccagagcggcatcaccaagctgtgcgacttcggcttcgccagaaccctggccgcccccggcgacatctacaccgactacgtggccaccagatggtacagagcccccgagctggtgctgaaggacaccagctacggcaagcccgtggacatctgggccctgggctgcatgatcatcgagatggccaccggcaacccctacctgcccagcagcagcgacctggacctgctgcacaagatcgtgctgaaggtgggcaacctgagcccccacctgcagaacatcttcagcaagagccccatcttcgccggcgtggtgctgccccaggtgcagcaccccaagaacgccagaaagaagtaccccaagctgaacggcctgctggccgacatcgtgcacgcctgcctgcagatcgaccccgccgacagaatcagcagcagcgacctgctgcaccacgagtacttcaccagagacggcttcatcgagaagttcatgcccgagctgaaggccaagctgctgcaggaggccaaggtgaacagcctgatcaagcccaaggagagcagcaaggagaacgagctgagaaaggacgagagaaagaccgtgtacaccaacaccctgctgagcagcagcgtgctgggcaaggagatcgagaaggagaagaagcccaaggagatcaaggtgagagtgatcaaggtgaagggcggcagaggcgacatcagcgagcccaagaagaaggagtacgagggcggcctgggccagcaggacgccaacgagaacgtgcaccccatgagccccgacaccaagctggtgaccatcgagccccccaaccccatcaaccccagcaccaactgcaacggcctgaaggagaacccccactgcggcggcagcgtgaccatgccccccatcaacctgaccaacagcaacctgatggccgccaacctgagcagcaacctgttccaccccagcgtgagactgaccgagagagccaagaagagaagaaccagcagccagagcatcggccaggtgatgcccaacagcagacaggaggaccccggccccatccagagccagatggagaagggcatcttcaacgagagaaccggccacagcgaccagatggccaacgagaacaagagaaagctgaacttcagcagaagcgacagaaaggagttccacttccccgagctgcccgtgaccatccagagcaaggacaccaagggcatggaggtgaagcagatcaagatgctgaagagagagagcaagaagaccgagagcagcaagatccccaccctgctgaacgtggaccagaaccaggagaagcaggagggcggcgacggccactgcgagggcaagaacctgaagagaaacagattcttcttctggtag

SEQ ID NO: 42814 - protein, 482 aa, Artificial Sequence
  derived and/or modified sequence
MAALMTPGTGAPPAPGDFSGEGSQGLPDPSPEPKQLPELIRMKRDGGRLSEADIRGFVAAVVNGSAQGAQIGAMLMAIRLRGMDLEETSVLTQALAQSGQQLEWPEAWRQQLVDKHSTGGVGDKVSLVLAPALAACGCKVPMISGRGLGHTGGTLDKLESIPGFNVIQSPEQMQVLLDQAGCCIVGQSEQLVPADGILYAARDVTATVDSLPLITASILSKKLVEGLSALVVDVKFGGAAVFPNQEQARELAKTLVGVGASLGLRVAAALTAMDKPLGRCVGHALEVEEALLCMDGAGPPDLRDLVTTLGGALLWLSGHAGTQAQGAARVAAALDDGSALGRFERMLAAQGVDPGLARALCSGSPAERRQLLPRAREQEELLAPADGTVELVRALPLALVLHELGAGRSRAGEPLRLGVGAELLVDVGQRLRRGTPWLRVHRDGPALSGPQSRALQEALVLSDRAPFAAPSPFAELVLPPQQ

SEQ ID NO: 42815 - DNA, 1449 bp, Artificial Sequence
  derived and/or modified sequence
atggccgccctgatgacccccggcaccggcgccccccccgcccccggcgacttcagcggcgagggcagccagggcctgcccgaccccagccccgagcccaagcagctgcccgagctgatcagaatgaagagagacggcggcagactgagcgaggccgacatcagaggcttcgtggccgccgtggtgaacggcagcgcccagggcgcccagatcggcgccatgctgatggccatcagactgagaggcatggacctggaggagaccagcgtgctgacccaggccctggcccagagcggccagcagctggagtggcccgaggcctggagacagcagctggtggacaagcacagcaccggcggcgtgggcgacaaggtgagcctggtgctggcccccgccctggccgcctgcggctgcaaggtgcccatgatcagcggcagaggcctgggccacaccggcggcaccctggacaagctggagagcatccccggcttcaacgtgatccagagccccgagcagatgcaggtgctgctggaccaggccggctgctgcatcgtgggccagagcgagcagctggtgcccgccgacggcatcctgtacgccgccagagacgtgaccgccaccgtggacagcctgcccctgatcaccgccagcatcctgagcaagaagctggtggagggcctgagcgccctggtggtggacgtgaagttcggcggcgccgccgtgttccccaaccaggagcaggccagagagctggccaagaccctggtgggcgtgggcgccagcctgggcctgagagtggccgccgccctgaccgccatggacaagcccctgggcagatgcgtgggccacgccctggaggtggaggaggccctgctgtgcatggacggcgccggcccccccgacctgagagacctggtgaccaccctgggcggcgccctgctgtggctgagcggccacgccggcacccaggcccagggcgccgccagagtggccgccgccctggacgacggcagcgccctgggcagattcgagagaatgctggccgcccagggcgtggaccccggcctggccagagccctgtgcagcggcagccccgccgagagaagacagctgctgcccagagccagagagcaggaggagctgctggcccccgccgacggcaccgtggagctggtgagagccctgcccctggccctggtgctgcacgagctgggcgccggcagaagcagagccggcgagcccctgagactgggcgtgggcgccgagctgctggtggacgtgggccagagactgagaagaggcaccccctggctgagagtgcacagagacggccccgccctgagcggcccccagagcagagccctgcaggaggccctggtgctgagcgacagagcccccttcgccgcccccagccccttcgccgagctggtgctgcccccccagcagtag

SEQ ID NO: 42816 - DNA, 1449 bp, Artificial Sequence
  derived and/or modified sequence
atggcggcactgatgacaccagggaccggcgctcctccagctcccggggattttagtggcgaaggatcccagggtctgccggatccctcccctgagcccaagcagctgccagaactcattagaatgaagagagatggagggagactgtccgaggccgatattagaggttttgttgctgctgttgtcaacggctcggcacaaggcgcccaaattggggccatgcttatggcaatccggctccgcgggatggacctcgaggagacctccgtgctgacccaggctttagcccaaagcggacagcagcttgaatggccagaggcctggcgccaacagctcgtcgacaaacattctacagggggagtgggcgataaggtcagtctagtgttggctcctgccttggcagcatgcgggtgtaaggtcccaatgatcagcggcagaggattgggccacaccggaggtacgctggataaacttgagagcattcccggctttaatgtgattcagtctccggaacagatgcaagtgctgctcgaccaagcaggttgctgcatcgtcgggcagagcgagcagcttgttcctgctgatggcatcttgtatgcagctcgcgatgtgactgccacagtcgattctctccctttgataactgcttccatattgtctaagaaactcgtcgagggcctctctgcactggtagtcgacgtgaagttcggaggcgccgccgttttcccgaaccaggagcaggctagagaattggcgaagaccctggtcggggtgggagcctctttggggctgagagtcgccgctgctttgaccgccatggacaagccactcggccggtgcgtggggcacgcactagaggtcgaagaggccctgctctgtatggatggcgcgggcccgcccgatctccgcgacctggtgaccacactcggcggcgctctgctgtggctttcaggccacgccggcacacaggcccagggagctgcaagagtagccgccgccctggacgatggctccgcacttggcaggtttgagaggatgctggctgctcagggagtggatcccggattagcccgggctttgtgcagcggcagtccagcggaacgccggcagctgctcccgagggctagggagcaagaggaactgctcgcacctgccgatggtaccgtcgagcttgtcagagctctcccactggcgctcgtgctccatgagctgggagcaggtaggtcgcgagctggcgagccactgcgtctcggagtgggcgccgaactccttgttgacgtcggacaacgacttagaagggggaccccatggctgagagtacacagagacgggccagcactctccggccctcagtcacgggctcttcaagaagcactggtgttgagcgatagagccccctttgctgcaccctctcctttcgctgaacttgtcctgcctcctcagcagtag

SEQ ID NO: 42817 - DNA, 1449 bp, Artificial Sequence
  derived and/or modified sequence
atggctgctttaatgactcctgggactggagctccccctgccccgggagacttctctggcgaaggttcccaaggcttgcccgatccctcccccgaaccaaaacagctacccgagctaattcgtatgaagcgggatggaggtcgcctgtctgaagccgatatcaggggcttcgttgccgcagtggtgaatggcagtgctcagggagcacagatcggggccatgcttatggcgattcgactaagaggcatggatcttgaagagacaagtgttttgacacaagctctggctcaaagcggccaacagctcgaatggccggaggcatggcgccaacaactggtcgacaaacatagcaccggcggagtaggcgacaaagtgtctctcgttctagctccggcccttgcagcctgcggctgtaaggtgccaatgatatccggccgcggtctgggccacacgggcggcacattagataagctggaatctattcccggattcaatgtgattcagtcccctgaacagatgcaggtattgctggatcaagcaggttgttgcatcgtgggtcagagcgagcagctggtgcccgcggatgggatactgtacgctgctcgggacgtcacagcaacggttgacagcctaccactgatcactgctagtatattgtctaagaaacttgtggagggcctgagtgccctagtagtggacgtcaagtttggaggagctgcagttttcccaaatcaagagcaagctagagagctcgcaaagacactggtcggggttggcgcatccctgggtctgcgcgtggctgctgcacttactgccatggacaaacccctcgggaggtgcgtggggcacgctttagaggtggaggaagcgttgctgtgtatggatggcgctggcccacctgatcttcgtgatctcgtgaccactctgggcggagctctcctgtggcttagtggtcacgccggtacacaggcccaaggggcagctcgggttgcagcagccctcgatgacggttcagcacttggtcgcttcgaaaggatgctggccgctcagggcgttgaccctgggctcgctagagccctatgttcgggctcccctgccgaacggaggcagttactgccccgggctcgcgagcaggaggaactcctggcgcccgccgatggaacagtggagcttgtacgcgccctcccgttggctctggtgcttcacgagctgggggctggtcggagcagagcaggagaacctctccggctcggtgtgggtgctgagctgctggtcgacgttggtcaacggcttaggcgggggacgccttggctgcgggttcatcgagacgggcctgccctctcaggccctcaaagtcgggctctacaggaggccctggtcctcagtgatcgtgccccgttcgccgctccaagcccctttgccgagctggtgctgccacctcagcagtag

SEQ ID NO: 42818 - DNA, 1449 bp, Artificial Sequence
  derived and/or modified sequence
atggcggccttgatgacacctggcaccggagcaccgccggcaccaggagacttttcaggggaggggtctcagggcttaccagatccatcacccgagcccaagcagctaccagagttaatcagaatgaaaagagacgggggccgcctcagcgaggccgacataagggggttcgtcgccgccgtggtaaacggcagtgcccagggagctcaaataggtgcaatgctcatggcgattaggctgagaggcatggacctcgaggagaccagtgtgctcacacaggctttagcgcagagcgggcagcagctggagtggcccgaagcttggaggcagcaactggtggataaacacagtaccgggggcgtgggggacaaggtaagcctcgttttggcacctgccctggctgcatgcgggtgtaaggtacctatgatttccggtaggggattaggacatacaggaggtactctcgataaactcgaatccatccctggatttaatgtaattcagtctccagaacagatgcaggtgctgttggatcaggccgggtgctgtatcgtgggtcaatcggaacagttggtgccagccgatgggattctatatgcagcgcgggacgtcacagccacggttgattccctacctctgattaccgcctctattctttcaaagaagctggtcgagggattatccgctctcgtcgtagacgtaaagtttgggggggcagcagtgttccccaaccaggaacaagcccgggagctggcaaagactttagtcggcgtaggcgcaagtttagggctgcgggtggctgccgctctgaccgccatggacaagccattaggacgttgcgtgggccacgcgctggaggtcgaggaggcactgctgtgtatggatggggctgggcctccggatctgcgggacctggtaaccaccctaggcggagccctactgtggctatccggccacgccggcacccaggcacagggagccgcaagggtggctgcagccctggacgatggctccgccctcggccgcttcgagagaatgctggcagctcaaggagtggatccaggtctggcacgggctctctgctcgggatcacccgctgaaagaagacagcttctacctagggcccgggaacaggaggagttacttgccccggctgatggcacagttgagctcgtgcgagccctcccactcgcccttgtcctgcacgagttaggcgctgggcgatcacgggccggggaaccactccggcttggcgtgggagccgaactgctggtggatgtgggtcagcggctgagaagaggcactccatggctgcgcgtccaccgagatggccctgccttgtccggaccacagagtcgggccctccaggaagccctggttctgagcgatcgcgcgccatttgcagcaccttccccctttgccgagctggttctgcctcctcagcagtag

SEQ ID NO: 42819 - DNA, 1449 bp, Artificial Sequence
  derived and/or modified sequence
atggccgccctgatgaccccaggcactggagcccccccagcccctggggacttctctggagagggcagccagggcctgcctgaccccagccctgagcccaagcagctgcctgagctgatccgcatgaagagagatggcggccgcctgtctgaggccgacatccggggctttgtggccgctgtggtgaatggaagtgcccagggcgcccagattggagccatgctgatggccatccggctgcggggcatggacctggaggagacctctgtgctgacccaggccctggcccagagcggccagcagctggagtggccagaggcctggaggcagcagctggtggacaagcacagcactggaggagtgggggacaaggtgtccctggtgctggccccagccctggccgcctgtggctgcaaggtgcccatgatcagcggccggggcctgggccacactggaggcaccctggacaagctggagagcatccctggcttcaacgtcatccagagccctgagcagatgcaggtgctgctggaccaggccggctgctgcatcgtgggccagagcgagcagctggtgcctgcagatggcatcctgtatgctgccagagatgtgacagccaccgtggacagcctgcccctcatcacagccagcatcctgagcaagaagctggtggagggcctgagcgccctggtggtggatgtgaagtttggaggagctgctgtgttccccaaccaggagcaggcccgggagctggccaagaccctggtgggcgtgggcgccagcctgggcctgcgggtggccgccgccctgacagccatggacaagcccctgggccgctgtgtgggccacgccctggaggtggaggaggccctgctgtgcatggatggagctggccccccagacctgcgggacctggtgaccaccctgggcggggccctgctgtggctgagcggccacgccggcacccaggcccagggcgccgcccgggtggccgccgccctggatgatggcagcgccctgggccgctttgagaggatgctggccgcccagggcgtggaccccggcctggcccgggccctgtgcagcggcagccctgctgagcggcggcagctgctgccccgggcccgggagcaggaggagctgctggccccagcagatggcaccgtggagctggtgcgggccctgcccctggccctggtgctgcacgagctgggcgccggccgcagcagagctggggagcccctgcggctgggcgtgggcgctgagctgctggtggatgtgggccagaggctgcggcggggcaccccctggctgcgggtgcacagagatggccctgccctgagcggcccccagagccgggccctgcaggaggccctggtgctgagtgaccgggccccctttgctgcccccagcccctttgctgagctggtgctgcccccccagcagtag

SEQ ID NO: 42820 - DNA, 1449 bp, Artificial Sequence
  derived and/or modified sequence
atggccgccctgatgacccccggcaccggcgccccccccgcccccggcgactttagcggggagggttctcaggggcttccagacccgagtccagaacccaaacagctcccagagctcattcggatgaagagagacggcgggcggctgagtgaagctgatatccgcggattcgtggctgcagtggtgaacggaagtgcacagggggctcagatcggagctatgctgatggcgatcagacttcggggcatggaccttgaagaaactagcgtgctcacccaggcgcttgcccagagcggacagcagctggagtggcccgaagcttggcggcagcagctggtcgacaagcacagtacaggtggagtcggagacaaggtgtccctggtgctggctccggccctcgccgcttgcggctgcaaggttccaatgatcagcggccggggtttgggccacaccggaggaaccttggataaactagaatcgattccaggatttaatgtaatccagtctcccgagcagatgcaggtgttgctagaccaggccggttgttgtatagtcggccagagtgaacagctggtcccagccgacggaattctctatgccgctagagatgttactgccacagtggactccctgcccctcatcaccgcaagcatcctctccaaaaagctcgttgaggggttatccgctctcgtggtggatgtcaagttcggaggggcagctgtgttcccaaatcaggagcaggcccgagaacttgccaaaaccctggtgggtgtaggggcgagcttgggcttgagagttgcagcagcccttactgccatggataagcccctcggtcggtgtgtgggccatgccttggaggttgaggaggcccttttgtgtatggacggggccgggccccctgatcttagggacctggttacaacgctcggaggtgccttgctctggctctctggccatgccggaacgcaagctcagggtgccgccagagtcgcagccgcattggatgacgggagcgctctgggtcgctttgagagaatgctggctgcccagggcgtggatcctggactggctcgggcactgtgttccggttccccagccgaaagacggcagttgctccctcgcgcccgcgagcaggaggaacttctggctccagcggacggcacagtggaactggtacgcgctctacccctggccctggtactgcatgagctgggggcaggacggtctagagcaggggagcctttgcgtctgggagtcggtgctgaattgctcgtggacgtgggacaaaggctaagacgcggcacgccttggctacgggtccatagggacggtccagcgctgagcggcccccagagcagggccttacaggaagcgttggtgctgtcagatcgagctcccttcgccgccccctcaccatttgctgagctcgtcctgccaccgcagcagtag

SEQ ID NO: 42821 - DNA, 1449 bp, Artificial Sequence
  derived and/or modified sequence
atggccgccctgatgacccccggcaccggcgccccccccgcccccggcgatttttccggcgaggggtcccagggactcccggaccccagtcccgagccaaagcaacttccggagctcattcggatgaaacgggacggcgggaggttgtctgaggccgacatccgcgggttcgttgcggccgtggtgaatggttcggcacaaggcgcccagattggagccatgctcatggccatacgtctgcgcggcatggatttagaagagacttcggtgcttacgcaagctctggctcagagtgggcagcagcttgagtggccagaggcctggcgacagcagctggtcgacaagcacagcacaggaggcgttggggataaggtgagtctggttctagcacctgctctagcagcatgcgggtgcaaggtgccgatgatctccggccgcggactcggacatacgggtggaacccttgacaagctcgaatccattcctggatttaatgtcatacagtctccagaacaaatgcaagtactcctggaccaggcaggatgctgtatcgtcggacagtctgagcaacttgtcccggccgacggcatattgtacgcagcgcgcgacgtcactgccactgtagactctctaccactgatcactgcatctatcctgagcaaaaagctagtcgaagggttaagtgccctggtcgtagacgttaaattcgggggcgccgcggtatttcctaaccaggagcaggcccgcgaactcgcaaagaccctcgtaggagttggcgcctctctaggtctaagggtggcggctgctctgactgccatggataagccgctggggaggtgcgttggccatgccctcgaggtggaggaggcgctgctttgtatggacggtgcagggccccccgatctgcgggatttggtcactacactaggaggcgccctcttgtggttgtccggtcatgcgggcactcaggcccagggtgcagctagggtagctgcagcactggatgacgggagcgcactggggcgcttcgagcggatgctggctgcccagggagtcgaccccggacttgcccgagcactctgttcagggagtcccgccgaaagaagacaactgctgcctcgggcacgtgagcaagaggaactgctggcacccgcagacgggacagtcgagcttgtaagagctttgccattggctctggtgctgcacgaactcggagctggcagatctagagccggagagcctctccgcttgggcgtgggggcagagctgctggtggacgtcgggcagcgcctcagacgcgggactccttggctgagggtgcaccgcgatgggcctgcattgtcagggccccagagtagagccctccaggaggctttggtactctccgacagagccccgtttgctgcgccgtccccattcgccgagctcgtgttgcctccccagcagtag

SEQ ID NO: 42822 - DNA, 1449 bp, Artificial Sequence
  derived and/or modified sequence
atggccgccctgatgacccccggcaccggcgccccccccgcccccggtgattttagtggcgaaggcagccaaggcttgcccgaccctagccccgagccgaaacaactcccggagctgattcgcatgaaaagagatggaggcaggctatcagaagccgatatccggggtttcgtggccgccgtggtgaacggctctgcccagggcgcccaaatcggtgccatgttaatggcaattcgtctacgcgggatggaccttgaagagacttctgtgttaacccaagcactagcacaaagcggccagcagttggagtggcccgaggcctggagacagcaactggttgataaacattcaactggaggtgttggcgacaaggtgagccttgtcctggccccagcactggcggcttgcggttgtaaagtgcctatgatctctggacggggcttgggccacaccggcggtacgttggataaactggaatcaatacccgggttcaacgtcattcagtcaccagaacagatgcaagtattactcgaccaagcagggtgctgcattgtcggccagagcgagcagctagttccagccgatggaattctgtacgccgcaagggatgtgaccgctaccgtcgactccctgccactgattacagcatctatcctttcaaaaaagctcgtggagggactgtccgcactggttgtggatgttaaatttggcggagcagccgtgtttccaaatcaggaacaggcccgggaactcgcaaagaccttggtaggcgtcggggccagtcttggcctgcgcgtcgctgctgccctcaccgccatggacaaaccgctcggccggtgtgtgggtcacgccctcgaggtcgaggaggcattgctctgcatggatggcgctggaccgccggatctccgcgatctggtgaccaccttaggcggcgcattgctatggcttagcggacacgctggcacacaggcccaaggggcagccagagttgcggcggccctggacgatggttccgcattgggcagatttgagcgcatgctggcagcacagggcgtggacccagggttagcccgggcattgtgtagcgggagccccgccgaaagaagacagttgcttcccagggcgcgagagcaggaagagctcctggccccagccgacgggactgtcgaattggtgcgtgctcttcccctggctctcgtcttacacgaactcggggcaggccggagccgagccggagaaccactgagactcggcgtcggagctgaactactggtagatgtgggacaaaggttgaggagaggcacaccctggttgagggtacatcgggatggacccgccctttccggcccccagtcacgcgctttacaagaggccctggttctcagcgacagagcccctttcgccgccccctctcccttcgcggagctcgtcctgcccccccagcagtag

SEQ ID NO: 42823 - DNA, 1449 bp, Artificial Sequence
  derived and/or modified sequence
atggccgcactgatgacacccggaaccggcgctcctcccgcaccaggtgactttagcggtgaaggcagtcagggcctccccgatccatctccggagccaaaacaactccctgaattaatcagaatgaaacgtgacgggggtcggctgagcgaggcagatatccgtggatttgtggcggcagtcgtgaacggttctgctcaaggcgctcagataggggcaatgctcatggctatcaggctgaggggtatggacctggaagaaacttctgtgctgactcaggctctcgcacagagtggacaacagttggaatggcctgaggcctggagacagcaactcgtagacaaacatagcacaggtggcgtgggggacaaagtgtcgctcgtactcgcaccagctctcgctgcatgcggctgtaaagtgccaatgatatctggccgaggcctcgggcacacaggcggaaccctggacaagctagagtccatccccggtttcaatgtaatccagagccccgagcaaatgcaggtcctccttgaccaagctggctgttgcatcgtcggccagtcagaacagctcgttccagccgacgggattctatacgcagctagggacgttaccgcaaccgtggattctcttcccctcattaccgcaagcatcctgtctaagaaactggtcgaggggctctcagccctggtggtcgacgtgaaattcggaggagcggcagtgttccccaatcaagaacaagctcgtgaattggcgaagacgctggtgggcgttggcgctagcctgggcctgcgcgtggctgcggcactgacagccatggataagcccctgggtaggtgtgtgggccatgcactcgaggttgaagaggcattactgtgtatggatggcgcaggtccgccagacctgagagacctagtgaccactctaggcggagcactcctttggctgtccggccacgcaggcacgcaagctcaaggcgctgcgagggtggcagctgcactggacgacggcagtgctctgggccgttttgagagaatgttagccgcacagggagtggaccctggcctggctcgggctctttgtagtggtagtcccgctgagagacggcaactcctcccaagagctcgcgaacaagaggaactgttggcccctgcagatggcaccgtggagctggttcgggctctgcccctggctctggtccttcacgagctgggagctgggagatcaagggccggagaacctttgcgactgggagtcggagccgagctcctggtggacgttggacaaagactgcggaggggcaccccgtggctgcgcgttcaccgtgatggccctgcattgtctgggccacagtcgagggccctccaggaggctctggtactgtccgaccgggcacccttcgccgcacccagccccttcgcagagttagttctgccaccccagcaatag

SEQ ID NO: 42824 - DNA, 1449 bp, Artificial Sequence
  derived and/or modified sequence
atggccgcactgatgactccgggtacaggagctccgccagctcccggagacttctccggagaaggcagccagggactgcctgatccctccccggagcccaagcaactgcccgagctgataaggatgaagcgggatggtggcaggctgagcgaggctgatatcagagggtttgtagccgcagtggttaatgggtcggcgcaaggagcacaaatcggggctatgctaatggctattcgactccgcggtatggacctggaggagacctccgtgctgacacaggctttggcccaaagcggacagcagctagagtggcctgaagcttggcgccagcagctggtggacaagcactccacaggcggtgtgggggataaagtgagtctagttctagcaccagctttggccgcttgtggttgtaaagtacccatgatctccggcagaggtttggggcataccggaggtacccttgacaagcttgagtcaatccccggattcaatgtgatacagagcccagagcaaatgcaagtcttattggaccaagctgggtgctgcattgtgggccagtcagagcagttggtcccagccgacggcattttgtacgcagcacgggatgtgactgccaccgtagacagcctaccccttatcacggctagtatcctctctaaaaagctggttgagggtctgtccgccctggtggtggatgtaaaattcggcggagccgctgtctttcccaaccaggagcaggcaagagaacttgcaaagacccttgtgggcgtgggggcatcactaggactgcgagtcgccgcagcgttgacagctatggacaaaccccttggtagatgcgtggggcatgcattggaagttgaggaggccctgttgtgcatggatggagctggaccgccagatctgagagaccttgtgaccaccctggggggagccctcctgtggttgagcggccacgccggtacccaggcccagggagcagccagggtagccgctgcgttagatgacggaagtgcgctgggtcgattcgagcgcatgttggctgcccagggcgtagacccgggattagcacgcgctctgtgcagcggtagtccagccgaacggcgtcagctgctgcctagggcgagggagcaagaggaactgctggccccagcagatggaacagtagagctcgttcgagctcttccactagctctcgttcttcacgagctgggtgccggacgctctcgcgcaggcgagccgcttcggctcggggtgggagcagagttactggtggatgtcggtcagagactcagacgaggcaccccctggttgagagtgcacagggatggacccgctctatctgggcctcagtctcgcgctctacaagaagccctcgtgctgagtgaccgcgctccattcgccgctccttcacccttcgccgaacttgtcctgcccccacaacagtag

SEQ ID NO: 42825 - DNA, 1449 bp, Artificial Sequence
  derived and/or modified sequence
atggccgcattgatgacacccggtactggcgcaccccctgcccctggagacttctctggggagggcagtcagggattgcctgatcctagccctgagcctaaacagctgcccgagcttattagaatgaagcgggatggcggacggctgtctgaagccgacataaggggctttgtagccgctgtcgtgaacggaagtgcccaaggagcgcaaatcggggctatgctgatggcaataagacttcggggtatggatctggaggagacaagtgtccttacacaagccctggctcagtcagggcagcagctggagtggcctgaagcctggcggcagcagctggtggacaagcactctaccggaggcgtcggcgacaaggtttcactcgtcctagcacctgcactggctgcctgtggttgcaaggtgccaatgattagtggaaggggcttaggtcatactggagggaccctcgacaaactagagtccatccctggcttcaacgtcatccagtctcccgaacaaatgcaagtcttgctggaccaggccggttgctgtatcgtcggtcagtcagaacagttggtaccagccgatggtatcctgtatgcagcaagggatgtcacagcgaccgtcgacagcctgcccttaattaccgccagcatactgagcaagaagctcgtggaggggttatctgccctggtggtagacgtgaaattcgggggagctgctgtgtttcctaatcaggaacaagcaagagagctcgcaaagacgctcgtgggggtaggagccagcctgggcctgcgtgtcgctgccgctcttactgcaatggacaagcccctcggtcgatgcgtgggccatgctctcgaggtcgaggaggcattgttgtgcatggatggtgccggaccccctgaccttagggacttggtcactacattgggaggagcccttctgtggctaagcggccacgctggtacccaggcccagggcgctgctcgcgttgccgcagcacttgacgatggcagcgctctcggacggtttgaacgcatgctggctgcccaaggcgtggaccccggtctcgccagagccctatgctctgggtctcctgcagaacgcaggcaactgctgcctagggcacgcgagcaggaggagctgctggccccagctgatggaactgtggagctcgtgcgtgccctcccgttggccctcgtcttacacgaattgggcgctggtagaagccgcgcaggggagccattgagactgggagtgggtgctgaactgctggtggacgtgggccagcggctgcgcagaggcacaccctggctgcgcgtccacagggatggtcccgctctctctggtccccagtctcgtgcattgcaggaggccctcgtcctgagcgatcgggcaccatttgcagcaccatccccttttgctgaactggtcctgcctccacagcagtag

SEQ ID NO: 42826 - DNA, 1630 bp, Artificial Sequence
  derived and/or modified sequence
cccacccgcctgccgtcctggggcgccgccgccccgccgccggcagtggaccgctgtgcgcgaaccctgaaccctacggtcccgacccgcgggcgaggccgggtacctgggctgggatccggagcaagcgggcgagggcagcgccctaagcaggcccggagcgatggcagccttgatgaccccgggaaccggggccccacccgcgcctggtgacttctccggggaagggagccagggacttcccgacccttcgccagagcccaagcagctcccggagctgatccgcatgaagcgagacggaggccgcctgagcgaagcggacatcaggggcttcgtggccgctgtggtgaatgggagcgcgcagggcgcacagatcggggccatgctgatggccatccgacttcggggcatggatctggaggagacctcggtgctgacccaggccctggctcagtcgggacagcagctggagtggccagaggcctggcgccagcagcttgtggacaagcattccacagggggtgtgggtgacaaggtcagcctggtcctcgcacctgccctggcggcatgtggctgcaaggtgccaatgatcagcggacgtggtctggggcacacaggaggcaccttggataagctggagtctattcctggattcaatgtcatccagagcccagagcagatgcaagtgctgctggaccaggcgggctgctgtatcgtgggtcagagtgagcagctggttcctgcggacggaatcctatatgcagccagagatgtgacagccaccgtggacagcctgccactcatcacagcctccattctcagtaagaaactcgtggaggggctgtccgctctggtggtggacgttaagttcggaggggccgccgtcttccccaaccaggagcaggcccgggagctggcaaagacgctggttggcgtgggagccagcctagggcttcgggtcgcggcagcgctgaccgccatggacaagcccctgggtcgctgcgtgggccacgccctggaggtggaggaggcgctgctctgcatggacggcgcaggcccgccagacttaagggacctggtcaccacgctcgggggcgccctgctctggctcagcggacacgcggggactcaggcccagggcgctgcccgggtggccgcggcgctggacgacggctcggcccttggccgcttcgagcggatgctggcggcgcagggcgtggatcccggtctggcccgagccctgtgctcgggaagtcccgcagaacgccggcagctgctgcctcgcgcccgggagcaggaggagctgctggcgcccgcagatggcaccgtggagctggtccgggcgctgccgctggcgctggtgctgcacgagctcggggccgggcgcagccgcgctggggagccgctccgcctgggggtgggcgcagagctgctggtcgacgtgggtcagaggctgcgccgtgggaccccctggctccgcgtgcaccgggacggccccgcgctcagcggcccgcagagccgcgccctgcaggaggcgctcgtactctccgaccgcgcgccattcgccgccccctcgcccttcgcagagctcgttctgccgccgcagcaataaagctcctttgccgcgaaa

SEQ ID NO: 42827 - DNA, 1614 bp, Artificial Sequence
  derived and/or modified sequence
gccgccgccccgccgccggcagtggaccgctgtgcgcgaaccctgaaccctacggtcccgacccgcgggcgaggccgggtacctgggctgggatccggagcaagcgggcgagggcagcgccctaagcaggcatccccgcaggcccggagcgatggcagccttgatgaccccgggaaccggggccccacccgcgcctggtgacttctccggggaagggagccagggacttcccgacccttcgccagagcccaagcagctcccggagctgatccgcatgaagcgagacggaggccgcctgagcgaagcggacatcaggggcttcgtggccgctgtggtgaatgggagcgcgcagggcgcacagatcggggccatgctgatggccatccgacttcggggcatggatctggaggagacctcggtgctgacccaggccctggctcagtcgggacagcagctggagtggccagaggcctggcgccagcagcttgtggacaagcattccacagggggtgtgggtgacaaggtcagcctggtcctcgcacctgccctggcggcatgtggctgcaaggtgccaatgatcagcggacgtggtctggggcacacaggaggcaccttggataagctggagtctattcctggattcaatgtcatccagagcccagagcagatgcaagtgctgctggaccaggcgggctgctgtatcgtgggtcagagtgagcagctggttcctgcggacggaatcctatatgcagccagagatgtgacagccaccgtggacagcctgccactcatcacagcctccattctcagtaagaaactcgtggaggggctgtccgctctggtggtggacgttaagttcggaggggccgccgtcttccccaaccaggagcaggcccgggagctggcaaagacgctggttggcgtgggagccagcctagggcttcgggtcgcggcagcgctgaccgccatggacaagcccctgggtcgctgcgtgggccacgccctggaggtggaggaggcgctgctctgcatggacggcgcaggcccgccagacttaagggacctggtcaccacgctcgggggcgccctgctctggctcagcggacacgcggggactcaggcccagggcgctgcccgggtggccgcggcgctggacgacggctcggcccttggccgcttcgagcggatgctggcggcgcagggcgtggatcccggtctggcccgagccctgtgctcgggaagtcccgcagaacgccggcagctgctgcctcgcgcccgggagcaggaggagctgctggcgcccgcagatggcaccgtggagctggtccgggcgctgccgctggcgctggtgctgcacgagctcggggccgggcgcagccgcgctggggagccgctccgcctgggggtgggcgcagagctgctggtcgacgtgggtcagaggctgcgccgtgggaccccctggctccgcgtgcaccgggacggccccgcgctcagcggcccgcagagccgcgccctgcaggaggcgctcgtactctccgaccgcgcgccattcgccgccccctcgcccttcgcagagctcgttctgccgccgcagcaataaagctcctttgccgc

SEQ ID NO: 42828 - DNA, 1608 bp, Artificial Sequence
  derived and/or modified sequence
gcgcgaaccctgaaccctacggtcccgacccgcgggcgaggccgggtacctgggctgggatccggagcaagcgggcgagggcagcgccctaagcaggccgcagaccccggacgtgtcaggcatccccgcaggcccggagcgatggcagccttgatgaccccgggaaccggggccccacccgcgcctggtgacttctccggggaagggagccagggacttcccgacccttcgccagagcccaagcagctcccggagctgatccgcatgaagcgagacggaggccgcctgagcgaagcggacatcaggggcttcgtggccgctgtggtgaatgggagcgcgcagggcgcacagatcggggccatgctgatggccatccgacttcggggcatggatctggaggagacctcggtgctgacccaggccctggctcagtcgggacagcagctggagtggccagaggcctggcgccagcagcttgtggacaagcattccacagggggtgtgggtgacaaggtcagcctggtcctcgcacctgccctggcggcatgtggctgcaaggtgccaatgatcagcggacgtggtctggggcacacaggaggcaccttggataagctggagtctattcctggattcaatgtcatccagagcccagagcagatgcaagtgctgctggaccaggcgggctgctgtatcgtgggtcagagtgagcagctggttcctgcggacggaatcctatatgcagccagagatgtgacagccaccgtggacagcctgccactcatcacagcctccattctcagtaagaaactcgtggaggggctgtccgctctggtggtggacgttaagttcggaggggccgccgtcttccccaaccaggagcaggcccgggagctggcaaagacgctggttggcgtgggagccagcctagggcttcgggtcgcggcagcgctgaccgccatggacaagcccctgggtcgctgcgtgggccacgccctggaggtggaggaggcgctgctctgcatggacggcgcaggcccgccagacttaagggacctggtcaccacgctcgggggcgccctgctctggctcagcggacacgcggggactcaggcccagggcgctgcccgggtggccgcggcgctggacgacggctcggcccttggccgcttcgagcggatgctggcggcgcagggcgtggatcccggtctggcccgagccctgtgctcgggaagtcccgcagaacgccggcagctgctgcctcgcgcccgggagcaggaggagctgctggcgcccgcagatggcaccgtggagctggtccgggcgctgccgctggcgctggtgctgcacgagctcggggccgggcgcagccgcgctggggagccgctccgcctgggggtgggcgcagagctgctggtcgacgtgggtcagaggctgcgccgtgggaccccctggctccgcgtgcaccgggacggccccgcgctcagcggcccgcagagccgcgccctgcaggaggcgctcgtactctccgaccgcgcgccattcgccgccccctcgcccttcgcagagctcgttctgccgccgcagcaataaagctcctttgccgcgaaa

SEQ ID NO: 42829 - protein, 410 aa, Artificial Sequence
  derived and/or modified sequence
MNDEDYSTIYDTIQNERTYEVPDQPEENESPHYDDVHEYLRPENDLYATQLNTHEYDFVSVYTIKGEETSLASVQSEDRGYLLPDEIYSELQEAHPGEPQEDRGISMEGLYSSTQDQQLCAAELQENGSVMKEDLPSPSSFTIQHSKAFSTTKYSCYSDAEGLEEKEGAHMNPEIYLFVKAGIDGESIGNCPFSQRLFMILWLKGVVFNVTTVDLKRKPADLHNLAPGTHPPFLTFNGDVKTDVNKIEEFLEETLTPEKYPKLAAKHRESNTAGIDIFSKFSAYIKNTKQQNNAALERGLTKALKKLDDYLNTPLPEEIDANTCGEDKGSRRKFLDGDELTLADCNLLPKLHVVKIVAKKYRNYDIPAEMTGLWRYLKNAYARDEFTNTCAADSEIELAYADVAKRLSRS

SEQ ID NO: 42830 - DNA, 1233 bp, Artificial Sequence
  derived and/or modified sequence
atgaacgacgaggactacagcaccatctacgacaccatccagaacgagagaacctacgaggtgcccgaccagcccgaggagaacgagagcccccactacgacgacgtgcacgagtacctgagacccgagaacgacctgtacgccacccagctgaacacccacgagtacgacttcgtgagcgtgtacaccatcaagggcgaggagaccagcctggccagcgtgcagagcgaggacagaggctacctgctgcccgacgagatctacagcgagctgcaggaggcccaccccggcgagccccaggaggacagaggcatcagcatggagggcctgtacagcagcacccaggaccagcagctgtgcgccgccgagctgcaggagaacggcagcgtgatgaaggaggacctgcccagccccagcagcttcaccatccagcacagcaaggccttcagcaccaccaagtacagctgctacagcgacgccgagggcctggaggagaaggagggcgcccacatgaaccccgagatctacctgttcgtgaaggccggcatcgacggcgagagcatcggcaactgccccttcagccagagactgttcatgatcctgtggctgaagggcgtggtgttcaacgtgaccaccgtggacctgaagagaaagcccgccgacctgcacaacctggcccccggcacccacccccccttcctgaccttcaacggcgacgtgaagaccgacgtgaacaagatcgaggagttcctggaggagaccctgacccccgagaagtaccccaagctggccgccaagcacagagagagcaacaccgccggcatcgacatcttcagcaagttcagcgcctacatcaagaacaccaagcagcagaacaacgccgccctggagagaggcctgaccaaggccctgaagaagctggacgactacctgaacacccccctgcccgaggagatcgacgccaacacctgcggcgaggacaagggcagcagaagaaagttcctggacggcgacgagctgaccctggccgactgcaacctgctgcccaagctgcacgtggtgaagatcgtggccaagaagtacagaaactacgacatccccgccgagatgaccggcctgtggagatacctgaagaacgcctacgccagagacgagttcaccaacacctgcgccgccgacagcgagatcgagctggcctacgccgacgtggccaagagactgagcagaagctag

SEQ ID NO: 42831 - DNA, 2713 bp, Artificial Sequence
  derived and/or modified sequence
attgttagagacctgtcattgatagcagttgctagttgctgccttttaagagctcgttgattcctctgcaaggtggtgcagcatcctctgtcccttcattcatttcagatctactcaggtctccctgtaaacagatctctcggatcaataagcatgaatgacgaagactacagcaccatctatgacacaatccaaaatgagaggacgtatgaggttccagaccagccagaagaaaatgaaagtccccattatgatgatgtccatgagtacttaaggccagaaaatgatttatatgccactcagctgaatacccatgagtatgattttgtgtcagtctataccattaagggtgaagagaccagcttggcctctgtccagtcagaagacagaggctacctcctgcctgatgagatatactctgaactccaggaggctcatccaggtgagccccaggaggacaggggcatctcaatggaagggttatattcatcaacccaggaccagcaactctgcgcagcagaactccaggagaatgggagtgtgatgaaggaagatctgccttctccttcaagcttcaccattcagcacagtaaggccttctctaccaccaagtattcctgctattctgatgctgaaggtttggaagaaaaggagggagctcacatgaaccctgagatttacctctttgtgaaggctggaatcgatggagaaagcatcggcaactgtcctttctctcagcgcctcttcatgatcctctggctgaaaggagtcgtgttcaatgtcaccactgtggatctgaaaagaaagccagctgacctgcacaacctagcccccggcacgcacccgcccttcctgaccttcaacggggacgtgaagacagacgtcaataagatcgaggagttcctggaggagaccttgacccctgaaaagtaccccaaactggctgcaaaacaccgggaatccaacacagcgggcatcgacatcttttccaagttttctgcctacatcaaaaataccaagcagcagaacaatgctgctcttgaaagaggcctaaccaaggctctaaagaaattggatgactacctgaacacccctctaccagaggagattgacgccaacacttgtggggaagacaaggggtcccggcgcaagttcctggatggggatgagctgaccctggctgactgcaatctgttgcccaagctccatgtggtcaagattgtggccaagaaataccgcaactatgatatcccggctgagatgacaggcctgtggcggtacctcaagaacgcctatgcccgtgatgagttcaccaacacctgtgcagctgacagtgagatcgagttggcctacgctgatgtcgccaaacgcctcagccgatcctgagcacagccattttgccccatccccgctgcagaaggactcaaccactcccctaagactccagcttcatagactcctctgtatcactgccttgaggcgcactttttataatcaagcctcatcttgctggtatcatgggaactccagcctgctatctttcatgaaggtcagcaccatccctggcctcctcacataggaatctagcagaaatgatagacacagtccacctttcggccggccagcctgatctgggctcagcatgtttggggtcagtcagtgttggagagcccacatatgggattgccactagcttcttctgccaatatcaaaataccttctcagatgctttagaaacatgcaacaccaactccttttctaccctcctctccgtccatacctacaaggccaaggacaaacgccatcttcatccttcttagaaagagatctattaccccattaggggagacagagagagtgaatggaggagtaccgagctggctatggacttgggtgtctggcaaacacagcttcagtctcactacttctgacactctggttattgggcactaagggccagactggaaagtcacttgagacacattctcagtttgttgcagtgccaggaatgctgcgctgctgctgctgcgcacctggcccatgctgtccctggcttccatgccgtccaggccctgccagaaaaggaaattggcatgcaattctaaactgcagtgactgggatgggaggggaggggagcagtgttgatgccaaaatacccacggggtctaccagccatggggtttgcttgcttaggagtagttgtttcagaggtgattacaggcctgggtttgactgtgcttaccaatgagtggtttttgagctatgagaaagtggatgggagtgggaggaggagagatgggtgaagacaaaagagttctttatgagcctcgatgttccctggtaaacttttaaaaaggccttctctcatgatctaagtcttggactggtggcatcatgtaactgctaaccttacagtaaaaacccaagaatgggtcaaaaatgtcttcccagtttctccaagctgcttctggaatgcaggtctgtcggctgggtgctctccagcagctgctcctgcctgattcaactgtagcctgtaatgggtaaaagccacatttaggaggtggtctgatcatagaacaccttaggaagaaagtccatgagactttctgactaggaaaccatgtggtttgaacttgaagaaaaatgtagacccatctgggttaattttcctacaatctgactcaactgccaggtgaaaaaaaaaaggaaaaa

SEQ ID NO: 42832 - DNA, 1233 bp, Artificial Sequence
  derived and/or modified sequence
atgaatgacgaggattattcaaccatctacgacacgatccagaacgaaaggacctacgaggtcccagaccaaccggaggaaaacgaatctccacactacgatgacgtgcacgagtatttgaggcctgaaaatgatttatatgcgacccagctcaatactcatgagtacgacttcgtgagcgtctatacaatcaagggcgaagagactagcctggcctcagtccagagcgaagatagggggtacttactccctgacgagatctattccgaactgcaagaagcccaccccggagagccgcaggaggacaggggaatttcaatggaggggctgtattcatccacgcaggaccaacagctttgtgccgctgagcttcaagaaaatggctcggttatgaaggaggacctcccatccccctcctcctttacgatccagcacagtaaggccttttccactactaagtacagctgctacagcgacgcagaaggtctggaagagaaggagggcgcccatatgaaccccgagatctacctatttgttaaggctggaatcgatggcgagtctatcggaaactgtccatttagccagcggctttttatgatactctggttgaagggagtggttttcaatgtgaccacggtcgacctcaaaagaaagccagcagacttacataacctcgctccagggacccatccccccttcctgacatttaatggggacgttaagacagatgtgaacaagatcgaagagttcctggaggaaaccttgactccagaaaaataccccaaactagcggctaaacaccgcgaaagcaataccgccggaatcgacattttctcaaaatttagtgcctacatcaaaaatacaaaacagcaaaacaatgcagccttagaacggggtctgacgaaggctctgaaaaagttagacgactatctcaataccccattacccgaggagatcgacgctaacacctgcggagaagacaaaggatcacgccgcaaattcctggatggcgatgagctgaccctggcagactgtaacctcctgcctaaactgcacgttgtaaaaattgtagcaaagaaatacagaaattatgacatcccagctgaaatgactgggttgtggcgctacctaaaaaatgcgtacgctcgggatgaattcactaacacttgcgctgcggatagtgaaattgaacttgcttacgctgatgtggcaaagagactatcacgatcatag

SEQ ID NO: 42833 - DNA, 1233 bp, Artificial Sequence
  derived and/or modified sequence
atgaatgatgaggactacagcaccatctatgacaccatccagaatgaaagaacctatgaggtgcctgaccagccagaagaaaatgaaagcccccactatgatgatgtgcatgagtacctgcggccagaaaatgacctgtatgccacccagctgaacacccatgaatatgactttgtgtctgtgtacaccatcaagggggaggagaccagcctggcctctgtgcagagtgaagatcggggctacctgctgcctgatgagatctacagcgagctgcaggaggcccaccctggagagccccaggaggaccggggcatctccatggagggcctgtacagcagcacccaggaccagcagctgtgtgccgctgagctgcaggagaatggatctgtgatgaaggaggacctgcccagccccagcagcttcaccatccagcacagcaaggccttcagcaccaccaagtacagctgctacagtgatgctgagggcctggaggagaaggagggcgcccacatgaaccctgagatctacctgtttgtgaaggccggcattgatggagagagcatcggcaactgccccttcagccagaggctcttcatgatcctgtggctgaagggcgtggtgttcaacgtgaccaccgtggacctgaagaggaagccagctgacctgcacaacctggcccctggcacccacccccccttcctgaccttcaatggagatgtgaagacagatgtgaacaagattgaggagttcctggaggagaccctgaccccagagaagtaccccaagctggccgccaagcaccgggagagcaacacagctggcatcgacatcttcagcaagttcagcgcctacatcaagaacaccaagcagcagaacaatgctgccctggagcggggcctgaccaaggccctgaagaagctggatgactacctgaacacccccctgcctgaggagattgatgccaacacctgtggggaggacaagggcagcaggaggaagttcctggatggagatgagctgaccctggccgactgcaacctgctgcccaagctgcacgtggtgaagatcgtggccaagaagtacagaaattatgacatcccagctgagatgacaggcctgtggagatacctgaagaatgcctatgccagagatgagttcaccaacacctgtgccgctgacagcgagattgagctggcctatgcagatgtggccaagaggctgagccgctcctag

SEQ ID NO: 42834 - DNA, 1233 bp, Artificial Sequence
  derived and/or modified sequence
atgaacgacgaggactacagcaccatctacgacaccatccagaacgaacgaacatacgaggttccagaccagccagaggaaaacgagtcccctcactacgatgacgtgcacgagtacctgcgacctgagaatgatttgtacgcgactcagttaaatactcacgagtatgacttcgtgtctgtctacactataaagggtgaggagacatcccttgcctcggtgcagtccgaggacaggggatatctgctgcccgacgagatctactcagagcttcaggaagctcatccaggcgagccacaagaggatcgggggatttccatggagggcctctactcttccacacaggatcagcagctatgcgctgcggagctgcaggagaatggctctgtgatgaaggaggatctcccctcccccagctcttttaccatccagcactccaaggctttctcaacgaccaagtatagctgctattctgacgccgaagggctggaagagaaggagggtgcccacatgaatccagaaatttacctgttcgttaaagcggggattgatggtgaaagcatagggaactgcccattttcccaaagactatttatgatcctgtggctcaaaggtgttgtgttcaatgtcactactgtcgatctcaaacgaaaacctgccgatcttcacaacctggcacctggtacccaccctcccttcctgacctttaacggcgacgtcaagaccgacgtcaacaaaatcgaggagtttctggaggagaccttaacaccagagaagtatccaaagctggcggccaaacatagggaatctaataccgcagggatcgatatattttccaagtttagcgcctatataaagaacacaaaacagcaaaataacgctgcactggaacggggtctaactaaggctctcaagaagctggacgactacctgaacacaccactgccagaggaaatcgacgccaacacctgcggggaagacaagggaagcagaaggaaattcctagatggggacgaattgaccctcgccgactgcaatctgcttccgaaactccacgttgtgaagattgtcgcgaagaagtacaggaactacgacattcccgccgaaatgacgggattgtggcgttacctgaaaaatgcctatgcccgggacgagttcacaaatacatgcgccgctgacagcgagattgaacttgcgtacgcggatgtggctaagcgcctttcccggtcctag

SEQ ID NO: 42835 - DNA, 1233 bp, Artificial Sequence
  derived and/or modified sequence
atgaacgacgaagattactcaaccatctacgatactatacaaaacgaacgcacctacgaggttccagatcagcccgaggagaatgaatccccacactatgacgatgtccacgagtatctgagacccgagaatgatctatacgccacacaactgaacactcatgagtacgacttcgtgagcgtctacacaatcaaaggcgaagagacttctctcgcctcagtacaaagtgaggaccggggatatttgctgcctgatgaaatctactccgagctccaagaggcccaccctggagagccacaggaagatcgcggtatctccatggaaggcttatatagtagcacacaggatcaacagctgtgcgcagcggagcttcaggagaacggatcagtgatgaaagaggatttaccatcacctagttcttttaccattcagcacagcaaggcttttagcacaaccaagtactcctgttacagcgatgctgagggcctggaagagaaggaaggggctcacatgaatccagaaatctacctgttcgttaaggccggaatcgatggtgaatccatcggtaactgcccattcagccagagattgttcatgatcttgtggttaaagggggtggtgtttaatgtgacgactgtggacctgaaacgcaagccagcagaccttcacaacctggccccaggtacacatcctccctttcttaccttcaatggcgacgtcaaaaccgatgtgaacaagattgaagaattcctggaagagactctcactcctgaaaaatacccaaagctggccgctaagcacagagaatctaatacagcgggtattgacatattttctaagttttctgcttatatcaagaacaccaaacaacaaaacaatgccgcattagaacggggacttacaaaggctctgaagaaattagacgattatctaaacacaccgctgcctgaagagatcgacgccaacacatgcggggaagacaaggggtctcggcgtaagtttctcgatggagatgagctgaccttagcagactgtaatctgcttccgaagcttcacgtggttaagattgtagctaagaagtaccgcaactacgatattcctgccgagatgaccggtctgtggcgatatctgaagaatgcctacgcccgtgatgagttcaccaacacatgcgccgcagactccgaaatcgaactggcttatgctgatgtggcaaagcggctgagcaggagctag

SEQ ID NO: 42836 - protein, 467 aa, Artificial Sequence
  derived and/or modified sequence
MQPQHGPWQTRMRKISNHGSLRVAKVAYPLGLCVGVFIYVAYIKWHRATATQAFFSITRAAPGARWGQQAHSPLGTAADGHEVFYGIMFDAGSTGTRVHVFQFTRPPRETPTLTHETFKALKPGLSAYADDVEKSAQGIRELLDVAKQDIPFDFWKATPLVLKATAGLRLLPGEKAQKLLQKVKKVFKASPFLVGDDCVSIMNGTDEGVSAWITINFLTGSLKTPGGSSVGMLDLGGGSTQIAFLPRVEGTLQASPPGYLTALRMFNRTYKLYSYSYLGLGLMSARLAILGGVEGQPAKDGKELVSPCLSPSFKGEWEHAEVTYRVSGQKAAASLHELCAARVSEVLQNRVHRTEEVKHVDFYAFSYYYDLAAGVGLIDAEKGGSLVVGDFEIAAKYVCRTLETQPQSSPFSCMDLTYVSLLLQEFGFPRSKVLKLTRKIDNVETSWALGAIFHYIDSLNRQKSPAS

SEQ ID NO: 42837 - DNA, 1404 bp, Artificial Sequence
  derived and/or modified sequence
atgcaacctcagcacgggccctggcaaacgcgcatgagaaagatctctaaccatgggtccctccgagtcgcaaaggtcgcatatccactgggcctctgcgtgggcgtgtttatatacgtggcttatatcaagtggcaccgcgccacagccacccaggcatttttttctataacacgagcggcgccgggtgctcgttggggacagcaggcccactcccccctcggcacggctgcagacggacatgaagtgttttatggcataatgtttgatgctggctcgacaggcacacgggtgcatgtcttccagttcactaggccccccagagagacccctacgctgacccacgagaccttcaaggcactgaagccgggcctgagcgcatatgccgatgatgttgagaaatcagcgcagggaatacgtgagctgctggacgtggctaagcaggacatcccatttgatttttggaaagccactccgttagttctgaaagcgacagccgggttaaggttacttccaggggagaaggcccaaaaacttctgcaaaaggtgaaaaaggtttttaaggcttccccttttctggtgggtgacgactgtgttagcatcatgaatggtacggacgaaggggtttccgcttggattactataaactttctgacaggatccctgaagacgcctggtgggtccagtgttggcatgctcgatctgggtggcggatcaactcagatcgcgttcctgccgagagtggaaggaaccttacaggctagtcctccaggttacttgaccgccttgaggatgttcaatcgcacttataagctctattcttatagttacctcggactgggactgatgtctgctcgactggccatcttgggaggggtagaaggccagcccgccaaggacggaaaggagctagttagcccatgcctatcccctagtttcaaaggcgaatgggagcacgccgaagtcacctatcgtgtgtcaggacaaaaggctgcagcatccttacacgagctctgtgcagccagagtttccgaagtcctccaaaaccgagtccatagaactgaagaggtcaagcacgtggacttttatgctttttcatattattacgacctggctgcaggggtggggctcatagacgccgagaaaggtggctcattggtggttggagactttgaaattgccgcaaagtacgtgtgccggactcttgagacccaacctcagtctagcccgttctcttgtatggatctgacctacgttagcctcttgctccaggaattcgggttcccgcgttccaaggtgctcaaactaactaggaagatagacaatgtagaaacctcctgggccctgggagctatctttcactacatcgatagccttaacagacagaagagccctgcgtcgtag

SEQ ID NO: 42838 - DNA, 1404 bp, Artificial Sequence
  derived and/or modified sequence
atgcagccccagcacggcccctggcagaccaggatgaggaagatcagcaaccacggcagcctgcgggtggccaaggtggcctaccccctgggcctgtgtgtgggcgtcttcatctacgtggcctacatcaagtggcaccgggccacagccacccaggccttcttcagcatcacccgggccgcccctggggcccgctggggccagcaggcccacagccccctgggcacagctgctgatggccacgaggtgttctacggcatcatgtttgatgctggcagcacaggcaccagggtgcacgtgttccagttcacccggcccccccgggagacccccaccctgacccatgagaccttcaaggccctgaagccaggcctgagcgcctatgcagatgatgtggagaagagcgcccagggcatccgggagctgctggatgtggccaagcaggacatcccctttgacttctggaaggccacccccctggtgctgaaggccacagctggcctgcggctgctgcccggggagaaggcccagaagctgctgcagaaggtgaagaaggtgttcaaggccagccccttcctggtgggagatgactgtgtgtccatcatgaatggaacagatgagggcgtgtctgcctggatcaccatcaacttcctgaccggcagcctgaagaccccaggcggcagctctgtgggcatgctggacctgggcggcggcagcacccagatcgccttcctgccccgggtggagggcaccctgcaggccagccccccaggctacctgacagccctgaggatgttcaacagaacctacaagctgtacagctacagctacctgggcctgggcctgatgtctgcccggctggccatcctgggcggcgtggagggccagcctgccaaggatggcaaggagctggtgagcccctgcctgagccccagcttcaagggggagtgggagcacgccgaggtgacctacagagtgtctggccagaaggccgccgccagcctgcacgagctgtgtgccgcccgggtgtctgaggtgctgcagaacagagtgcacaggacagaggaggtgaagcacgtggacttctacgccttctcctactactatgacctggccgccggcgtgggcctgattgatgctgagaagggcggcagcctggtggtgggggactttgaaattgctgccaagtatgtgtgcaggaccctggagacccagccccagagcagccccttcagctgcatggacctgacctacgtgtccctgctgctgcaggagtttggcttccccaggagcaaggtgctgaagctgaccaggaagattgacaacgtggagacctcctgggccctgggcgccatcttccactacatcgacagcctgaaccggcagaagagccctgccagctag

SEQ ID NO: 42839 - DNA, 1404 bp, Artificial Sequence
  derived and/or modified sequence
atgcagccccagcacggcccctggcagacccggatgcggaagatctccaatcatggctcacttagagtggccaaggtggcctaccccttaggactgtgcgtgggggtctttatttatgttgcctacattaagtggcatcgagccaccgcaacccaggccttcttctcaattaccagagccgccccgggtgcccgctggggccagcaggcccattctccacttggcacggcagctgacggacacgaagtcttctatggcataatgtttgatgcgggatcgactggcacgcgggtccacgtgtttcagttcacaaggcctcctcgcgagacgcctacgctcactcacgagaccttcaaagctcttaaacccgggttatccgcatatgccgatgatgtcgagaaatctgcacaggggatccgtgaattactcgatgtggctaaacaagatatcccttttgacttttggaaagccacaccgctcgtgctgaaggcgacggctggtcttagactcctgccgggcgaaaaggctcagaagctcttgcagaaggtcaagaaggtcttcaaggcatctccctttcttgttggcgacgattgtgtgagcattatgaacggcacagatgaaggggtcagtgcttggattactattaatttcctgactggaagcttgaaaaccccggggggatccagcgtcggtatgctcgacctggggggtggctctacacagattgcttttttacctcgggtcgaagggactctgcaggcttctccccccggatacctcaccgcgttgcggatgtttaatcgtacatacaagctgtacagctattcctacctcgggttgggacttatgtccgccaggttggccatactgggcggcgttgaaggccaacctgctaaagatggcaaggaactcgtatctccgtgcctgagcccaagctttaaaggcgagtgggagcacgccgaagtgacataccgcgttagtgggcagaaggccgcagcctctctccatgagctatgtgccgctcgagttagcgaggtcctccagaaccgcgtgcatagaacagaggaggtcaagcatgtcgacttctacgcgttcagttattattatgacttagcagcgggtgttgggctgatagatgctgagaaaggaggcagcctggttgtgggggactttgagatcgctgcaaaatacgtatgccgcaccttggagacacagccacagagtagccctttctcctgtatggacctgacgtatgtgtccctgcttctacaggagtttggtttcccccgctctaaagtgctcaaacttacacgaaagatcgataatgtagaaaccagttgggcattaggtgccattttccactatatagatagcctcaaccggcaaaagagtcctgcgagctag

SEQ ID NO: 42840 - DNA, 1404 bp, Artificial Sequence
  derived and/or modified sequence
atgcagccacagcatgggccatggcagacccgtatgagaaaaatcagcaaccacggaagccttcgggtcgccaaagtcgcatatccgctgggcctctgtgtaggggtttttatatatgttgcttatatcaagtggcaccgcgctacggctactcaggcatttttctctattacccgtgccgcaccgggtgcaaggtggggccagcaggctcatagtccattgggcaccgctgccgacgggcacgaagtcttctacgggattatgtttgatgccggtagcactgggacgagggttcatgtcttccaattcacacggcctccgagggaaacacctaccctgactcatgaaacctttaaggctctaaaaccaggactgagtgcttacgctgacgatgtcgagaagtctgcccagggaatacgggagctactcgacgtggcgaagcaggacattcccttcgatttttggaaagcgacccctcttgtgttaaaggccactgccggattgaggctgttacctggcgagaaagcacaaaagctgctgcagaaggtgaagaaagtgttcaaggcctcccccttcctcgttggggacgactgtgttagcataatgaacgggactgatgaaggagtgtccgcctggattaccattaattttttgacagggagcctcaaaacacccggagggtcatctgtgggaatgctggacctgggtggcggatctacccagatagcctttctccctcgagtcgaaggcactctccaagcctcccctccaggctacctaaccgcccttagaatgtttaataggacatataaactgtactcctatagttacctgggactgggactgatgtccgctagattagccatccttgggggagtggaaggccagccggcaaaagatggaaaagagcttgtctcgccctgcctgtctccctcatttaaaggggagtgggagcacgcagaagtgacataccgcgtgtctggacaaaaggctgccgcttcactccacgaactttgcgctgctagggtgtccgaggttctccagaatcgcgtacaccggactgaggaagttaaacacgtagacttttatgctttttcttactattacgatctggccgcaggtgtcggactaattgatgccgagaagggcggttccctggtggtgggggattttgaaatcgcagcaaaatatgtgtgtcgcaccttggagacccagccccagtcttccccctttagttgtatggaccttacttacgtgtctttactactgcaagaatttggctttcccaggtcaaaggtgctcaagctgaccagaaaaattgacaacgtggaaacatcgtgggccttaggcgctatcttccactacatcgatagcctcaatcgtcaaaagtcgccggcttcctag

SEQ ID NO: 42841 - DNA, 1404 bp, Artificial Sequence
  derived and/or modified sequence
atgcagccccagcacggcccctggcagaccagaatgagaaagatcagcaaccacggcagcctgagagtggccaaggtggcctaccccctgggcctgtgcgtgggcgtgttcatctacgtggcctacatcaagtggcacagagccaccgccacccaggccttcttcagcatcaccagagccgcccccggcgccagatggggccagcaggcccacagccccctgggcaccgccgccgacggccacgaggtgttctacggcatcatgttcgacgccggcagcaccggcaccagagtgcacgtgttccagttcaccagaccccccagagagacccccaccctgacccacgagaccttcaaggccctgaagcccggcctgagcgcctacgccgacgacgtggagaagagcgcccagggcatcagagagctgctggacgtggccaagcaggacatccccttcgacttctggaaggccacccccctggtgctgaaggccaccgccggcctgagactgctgcccggcgagaaggcccagaagctgctgcagaaggtgaagaaggtgttcaaggccagccccttcctggtgggcgacgactgcgtgagcatcatgaacggcaccgacgagggcgtgagcgcctggatcaccatcaacttcctgaccggcagcctgaagacccccggcggcagcagcgtgggcatgctggacctgggcggcggcagcacccagatcgccttcctgcccagagtggagggcaccctgcaggccagcccccccggctacctgaccgccctgagaatgttcaacagaacctacaagctgtacagctacagctacctgggcctgggcctgatgagcgccagactggccatcctgggcggcgtggagggccagcccgccaaggacggcaaggagctggtgagcccctgcctgagccccagcttcaagggcgagtgggagcacgccgaggtgacctacagagtgagcggccagaaggccgccgccagcctgcacgagctgtgcgccgccagagtgagcgaggtgctgcagaacagagtgcacagaaccgaggaggtgaagcacgtggacttctacgccttcagctactactacgacctggccgccggcgtgggcctgatcgacgccgagaagggcggcagcctggtggtgggcgacttcgagatcgccgccaagtacgtgtgcagaaccctggagacccagccccagagcagccccttcagctgcatggacctgacctacgtgagcctgctgctgcaggagttcggcttccccagaagcaaggtgctgaagctgaccagaaagatcgacaacgtggagaccagctgggccctgggcgccatcttccactacatcgacagcctgaacagacagaagagccccgccagctag

SEQ ID NO: 42842 - DNA, 2708 bp, Artificial Sequence
  derived and/or modified sequence
gtgacgccacgtgcatggggcggagcccaggccctagggaatcgtggggtcgtatcccgcgggtggaggccggggtggcgccggccggggcgggggagcccaaaagaccggctgccgcctgctccccggaaaagggcactcgtctccgtgggtgtggcggagcgcgcggtgcatgcagccgcagcacggtccttggcaaacaaggatgagaaaaatatccaaccacgggagcctgcgggtggcgaaggtggcataccccctggggctgtgtgtgggcgtgttcatctatgttgcctacatcaagtggcaccgggccaccgccacccaggccttcttcagcatcaccagggcagccccgggggcccggtggggtcagcaggcccacagccccctggggacagctgcagacgggcacgaggtcttctacgggatcatgtttgatgcaggaagcactggcacccgagtacacgtcttccagttcacccggccccccagagaaactcccacgttaacccacgaaaccttcaaagcactgaagccaggtctttctgcctatgctgatgatgttgaaaagagcgctcagggaatccgggaactactggatgttgctaaacaggacattccgttcgacttctggaaggccacccctctggtcctcaaggccacagctggcttacgcctgttacctggagaaaaggcccagaagttactgcagaaggtgaaaaaagtatttaaagcatcgcctttccttgtaggggatgactgtgtttccatcatgaacggaacagatgaaggcgtttcggcgtggatcaccatcaacttcctgacaggcagcttgaaaactccaggagggagcagcgtgggcatgctggacttgggcggaggatccactcagatcgccttcctgccacgcgtggagggcaccctgcaggcctccccacccggctacctgacggcactgcggatgtttaacaggacctacaagctctattcctacagctacctcgggctcgggctgatgtcggcacgcctggcgatcctgggcggcgtggaggggcagcctgctaaggatggaaaggagttggtcagcccttgcttgtctcccagtttcaaaggagagtgggaacacgcagaagtcacgtacagggtttcagggcagaaagcagcggcaagcctgcacgagctgtgtgctgccagagtgtcagaggtccttcaaaacagagtgcacaggacggaggaagtgaagcatgtggacttctatgctttctcctactattacgaccttgcagctggtgtgggcctcatagatgcggagaagggaggcagcctggtggtgggggacttcgagatcgcagccaagtacgtgtgtcggaccctggagacacagccgcagagcagccccttctcatgcatggacctcacctacgtcagcctgctactccaggagttcggctttcccaggagcaaagtgctgaagctcactcggaaaattgacaatgttgagaccagctgggctctgggggccatttttcattacatcgactccctgaacagacagaagagtccagcctcatagtggccgagccatccctgtccccgtcagcagtgtctgtgtgtctgcataaaccctcctgtcctggacgtgacttcatcctgaggagccacagcacaggccgtgctggcactttctgcacactggctctgggacttgcagaaggcctggtgctgccctggcatcagcctcttccagtcacatctggccagagggctgtctggacctgggccctgctcaatgccacctgtctgcctgggctccaagtgggcaggaccaggacagaaccacaggcacacactgagggggcagtgtggctccctgcctgtcccatccccatgccccgtccgcggggctgtggctgctgctgtgcatgtccctgcgatgggagtcttgtctcccagcctgtcagtttcctccccagggcagagctccccttcctgcaagagtctgggaggcggtgcaggctgtcctggctgctctggggaagccgagggacagccataacacccccgggacagtaggtctgggcggcaccactgggaactctggacttgagtgtgtttgcctcttccttgggtatgaatgtgtgagttcacccagaggcctgctctcctcacacattgtgtggtttggggttaatgatggagggagacacctcctcatagacggcaggtgcccacctttcagggagtctcccagcatgggcggatgccgggcatgagctgctgtaaactatttgtggctgtgctgcttgagtgacgtctctgtcgtgtgggtgccaagtgcttgtgtagaaactgtgttctgagcccccttttctggacaccaactgtgtcctgtgaatgtatcgctactgtgagctgttcccgcctagccagggccatgtcttaggtgcagctgtgccacgggtcagctgagccacagtcccagaaccaagctctcggtgtctcgggccaccatccgcccacctcgggctgaccccacctcctccatggacagtgtgagccccgggccgtgcatcctgctcagtgtggcgtcagtgtcggggctgagccccttgagctgcttcagtgaatgtacagtgcccggcacgagctgaacctcatgtgttccactcccaataaaaggttgacaggggcttctccttctctgg

SEQ ID NO: 42843 - protein, 618 aa, Artificial Sequence
  derived and/or modified sequence
MELLAAAFSAACAVDHDSSTSESDARDSAAGHLPGSESSSTPGNGATPEEWPALADSPTTLTEALRMIHPIPADSWRNLIEQIGLLYQEYRDKSTLQEIETRRQQDAEIEDNTNGSPASEDTPEEEEEEEEEEEPASPPERKTLPQICLLSNPHSRFNLWQDLPEIRSSGVLEILQPEEIKLQEAMFELVTSEASYYKSLNLLVSHFMENERIRKILHPSEAHILFSNVLDVLAVSERFLLELEHRMEENIVISDVCDIVYRYAADHFSVYITYVSNQTYQERTYKQLLQEKAAFRELIAQLELDPKCRGLPFSSFLILPFQRITRLKLLVQNILKRVEERSERECTALDAHKELEMVVKACNEGVRKMSRTEQMISIQKKMEFKIKSVPIISHSRWLLKQGELQQMSGPKTSRTLRTKKLFHEIYLFLFNDLLVICRQIPGDKYQVFDSAPRGLLRVEELEDQGQTLANVFILRLLENADDREATYMLKASSQSEMKRWMTSLAPNRRTKFVSFTSRLLDCPQVQCVHPYVAQQPDELTLELADILNILDKTDDGWIFGERLHDQERGWFPSSMTEEILNPKIRSQNLKECFRVHKMDDPQRSQNKDRRKLGSRNRQ

SEQ ID NO: 42844 - protein, 238 aa, Artificial Sequence
  derived and/or modified sequence
MELLAAAFSAACAVDHDSSTSESDARDSAAGHLPGSESSSTPGNGATPEEWPALADSPTTLTEALRMIHPIPADSWRNLIEQIGLLYQEYRDKSTLQEIETRRQQDAEIEDNTNGSPASEDTPEEEEEEEEEEEPASPPERKTLPQICLLSNPHSRFNLWQDLPEIRSSGVLEILQPEEIKLQEAMFELVTSEASYYKSLNLLVSHFMENERIRKILHPSEAHILFSNVLDVLAVSER

SEQ ID NO: 42845 - protein, 433 aa, Artificial Sequence
  derived and/or modified sequence
MFELVTSEASYYKSLNLLVSHFMENERIRKILHPSEAHILFSNVLDVLAVSERFLLELEHRMEENIVISDVCDIVYRYAADHFSVYITYVSNQTYQERTYKQLLQEKAAFRELIAQLELDPKCRGLPFSSFLILPFQRITRLKLLVQNILKRVEERSERECTALDAHKELEMVVKACNEGVRKMSRTEQMISIQKKMEFKIKSVPIISHSRWLLKQGELQQMSGPKTSRTLRTKKLFHEIYLFLFNDLLVICRQIPGDKYQVFDSAPRGLLRVEELEDQGQTLANVFILRLLENADDREATYMLKASSQSEMKRWMTSLAPNRRTKFVSFTSRLLDCPQVQCVHPYVAQQPDELTLELADILNILDKTDDGWIFGERLHDQERGWFPSSMTEEILNPKIRSQNLKECFRVHKMDDPQRSQNKDRRKLGSRNRQ

SEQ ID NO: 42846 - DNA, 1857 bp, Artificial Sequence
  derived and/or modified sequence
atggagttactggctgctgcgttttcagctgcttgtgcagtggatcatgattcctcaacatccgagagcgatgccagagactctgctgctggccacctgccaggatcggagtctagttcaacgcctggaaatggcgctacccctgaggagtggcccgcccttgccgacagccccacaaccctgacagaagcacttcggatgattcatcccatacccgctgacagctggaggaacctcattgagcagataggcctgttgtaccaggaatacagggacaaaagtactctgcaggaaattgagacccgaagacagcaagacgccgagatcgaggataataccaacgggagtcctgcaagcgaagacaccccagaggaggaagaggaagaggaggaagaagaggagcctgcttctcctcccgagcgcaaaacactaccacagatttgcctgctgagcaaccctcattccaggtttaacctctggcaggatttgccagagatcaggtcctcaggggtgttagagatcctccagccggaagagatcaaactgcaggaagccatgttcgagttggtgacatccgaagctagctattacaaaagcttgaacctgctggtgtctcatttcatggagaacgagcgcatccggaaaattttacatccctctgaggcccacattctgtttagtaacgtgctcgatgtgctggccgtgtccgaacgattcttgctggagttagagcatcggatggaggagaatattgttatcagtgatgtatgtgatattgtgtaccggtacgccgccgatcatttctccgtgtatatcacttatgtgagcaatcagacataccaggaaagaacttacaaacagctcctgcaggaaaaagctgccttccgagagctgatcgcccagctcgaactggaccccaagtgcaggggcttacccttttcaagcttcttaatactccccttccagaggatcacaagactgaaactcctcgtacaaaatattcttaaaagagtggaagaacgaagtgaacgtgaatgcacggcacttgacgctcacaaagaattggaaatggtggtcaaggcctgcaacgaaggagtgagaaagatgtcccggacagagcagatgatctctatccagaaaaagatggagttcaagatcaagtccgtccccataatttctcatagtcgctggctgcttaagcagggggagttgcagcagatgtctggtccgaaaaccagccggactctgaggaccaagaagttgtttcacgagatttacctgttcctattcaacgaccttctggtgatctgccgccaaatcccaggagataagtaccaagtgtttgactcggctccccgaggcctccttagagtggaagagttggaggaccaaggtcagacactggccaacgtctttatccttcgcttgctggagaacgccgatgatcgcgaggccacatatatgttgaaggcctcttcccagtccgaaatgaagaggtggatgacatctctcgccccaaacaggcgcactaagtttgtctcttttacatcccggcttcttgattgcccacaggtgcagtgtgttcacccctatgtggcccagcagcccgatgagctgaccctcgagctggccgacatactgaatattctagataaaaccgacgatgggtggatctttggcgagagactccatgatcaggagcgtgggtggtttccttcaagcatgactgaggagatcctaaaccctaaaatacgctcccaaaacctgaaagaatgttttcgagtacataaaatggacgacccccagcgcagccagaacaaagacaggaggaagctcggatcccggaatcgccagtag

SEQ ID NO: 42847 - DNA, 717 bp, Artificial Sequence
  derived and/or modified sequence
atggagctgctcgcggccgcattttccgcggcttgcgcagtggatcatgattctagcacctcagaatctgatgcgcgagactcagcagccggccatctccctggatcagagtctagctccactccaggcaatggagctacccccgaggaatggcctgcgcttgcagactcaccaaccactctgacagaggcccttaggatgattcaccctatccccgccgactcctggaggaacttgattgagcagattgggttactgtatcaagagtatagggacaagagcacgcttcaggagatcgaaacccggcgacagcaggacgcagagattgaagacaataccaacggttcaccagcttcggaggatactcctgaagaagaggaggaggaggaggaagaagaggagcccgcttcccctcctgagagaaagacactcccccagatttgtctactttccaatcctcatagccgtttcaacctgtggcaggacttaccagagatccggtctagcggcgtcctggaaattctacagccagaggaaattaaactgcaagaagccatgtttgaacttgtgacaagtgaagcaagctactacaaatccttgaatctgttagtaagtcattttatggaaaacgagcggattcgcaaaatcttgcatccaagcgaagcccatattctgttctccaatgttttggacgtgctggccgtcagcgagaggtag

SEQ ID NO: 42848 - DNA, 1857 bp, Artificial Sequence
  derived and/or modified sequence
atggagctgctggccgccgccttctctgctgcctgtgctgtggaccatgacagcagcaccagcgagagtgatgcccgggacagcgctgctggccacctgcccggcagcgagagcagcagcaccccaggaaatggagccaccccagaggagtggccagccctggccgacagccccaccaccctgacagaggccctgaggatgatccaccccatcccagctgacagctggaggaacctgattgagcagatcggcctgctgtaccaggagtacagagacaagagcaccctgcaggagattgagacccggcggcagcaggatgctgagattgaggacaacaccaacggcagccctgccagcgaggacaccccagaggaggaggaggaggaggaggaggaggaggagcccgccagccccccagagaggaagaccctgccccagatctgcctgctgagcaacccccacagccgcttcaacctgtggcaggacctgcctgagatccgcagcagtggagtgctggagatcctgcagcctgaggagatcaagctgcaggaggccatgtttgagctggtgaccagcgaggccagctactacaagagcctgaacctgctggtgagccacttcatggagaatgaaagaatcaggaagatcctgcaccccagcgaggcccacatcctcttcagcaatgtgctggatgtgctggccgtgtctgagcgcttcctgctggagctggagcacaggatggaggagaacatcgtcatcagtgatgtgtgtgacatcgtgtaccgctatgctgctgaccacttctctgtgtacatcacctacgtgagcaaccagacctaccaggagaggacctacaagcagctgctgcaggagaaggccgccttccgggagctgattgcccagctggagctggaccccaagtgccggggcctgcccttcagcagcttcctgatcctgcccttccagaggatcacccggctgaagctgctggtgcagaacatcctgaagagggtggaggagaggagtgaaagagaatgtacagccctggatgcccacaaggagctggagatggtggtgaaggcctgcaatgaaggagtgaggaagatgagcaggacagagcagatgatcagcatccagaagaagatggagttcaagatcaagtctgtgcccatcatcagccacagccgctggctgctgaagcagggcgagctgcagcagatgagcggccccaagaccagcaggaccctgcggaccaagaagctgttccacgagatctacctgttcctgttcaatgacctgctggtgatctgccggcagatccctggggacaagtaccaggtgtttgacagcgccccccggggcctgctgcgggtggaggagctggaggaccagggccagaccctggccaacgtgttcatcctgcggctgctggagaatgctgatgaccgggaggccacctacatgctgaaggccagcagccagagcgagatgaagcgctggatgaccagcctggcccccaacagaaggaccaagtttgtgtccttcaccagccggctgctggactgcccccaggtgcagtgtgtgcacccctacgtggcccagcagccagatgagctgaccctggagctggccgacatcctgaacatcctggacaagacagatgatggctggatctttggagagcggctgcatgaccaggagcggggctggttccccagctccatgacagaggagatcctgaaccccaagatccgcagccagaacctgaaggagtgcttccgggtgcacaagatggatgacccccagaggagccagaacaaggacaggaggaagctgggcagcaggaaccggcagtag

SEQ ID NO: 42849 - DNA, 717 bp, Artificial Sequence
  derived and/or modified sequence
atggagctgctggccgccgccttctctgctgcctgtgctgtggaccatgacagcagcaccagcgagagtgatgcccgggacagcgctgctggccacctgcccggcagcgagagcagcagcaccccaggaaatggagccaccccagaggagtggccagccctggccgacagccccaccaccctgacagaggccctgaggatgatccaccccatcccagctgacagctggaggaacctgattgagcagatcggcctgctgtaccaggagtacagagacaagagcaccctgcaggagattgagacccggcggcagcaggatgctgagattgaggacaacaccaacggcagccctgccagcgaggacaccccagaggaggaggaggaggaggaggaggaggaggagcccgccagccccccagagaggaagaccctgccccagatctgcctgctgagcaacccccacagccgcttcaacctgtggcaggacctgcctgagatccgcagcagtggagtgctggagatcctgcagcctgaggagatcaagctgcaggaggccatgtttgagctggtgaccagcgaggccagctactacaagagcctgaacctgctggtgagccacttcatggagaatgaaagaatcaggaagatcctgcaccccagcgaggcccacatcctcttcagcaatgtgctggatgtgctggccgtgtctgagaggtag

SEQ ID NO: 42850 - DNA, 1857 bp, Artificial Sequence
  derived and/or modified sequence
atggagctgctggccgccgccttcagcgccgcctgcgccgtggaccatgacagctccaccagcgaatcggacgctcgggactccgcagccggccatctcccgggaagcgaatcttcttctacccctgggaatggcgctacaccggaagagtggcccgctctggcggactctcccaccaccttgactgaggcacttcggatgatccatcccattcccgccgatagctggcgcaaccttatcgaacaaattggcttgctgtatcaggagtatcgagataagagtactttacaggagattgaaacaaggaggcagcaggatgccgaaattgaagataacactaacggttcccctgcaagcgaggatacgcccgaggaagaggaggaagaggaagaagaggaggagcctgcctctccccccgaacggaagacactgccgcaaatctgtttgttgagcaaccctcatagccgtttcaatctttggcaggacctgcctgagattaggtcatctggggtactcgaaatattgcagccagaagagataaagctgcaagaggctatgtttgagcttgtgacctccgaggcctcatattataaatccctgaacctgctcgtgtctcacttcatggagaacgagcgcatcaggaaaatcctgcacccaagtgaagcccatattctgttcagtaacgtgctggacgttctcgcagttagcgaacgcttcctgctggaacttgaacatcggatggaagaaaacattgtcatttctgatgtgtgcgacattgtataccggtatgccgccgaccacttcagcgtttacattacttatgtgagcaaccagacataccaggaacgcacatataaacagcttttgcaagagaaagctgcctttagggagctgatcgcccagctggagctggacccaaaatgtcggggacttccttttagtagtttcttaatcctgcctttccaaaggatcactagactaaagctcctagtacagaacattctaaaacgagtggaggagcggagtgaacgggagtgtactgcattggatgcccacaaggagctcgaaatggttgttaaggcctgtaacgaaggggtaaggaagatgtctagaacagaacagatgatcagtatccaaaaaaagatggagttcaagattaaatctgtcccaataatcagtcatagccggtggctgcttaagcaaggcgaactgcagcaaatgagcggacccaagacaagtcggacgctgagaaccaagaagcttttccatgagatatacctctttttgtttaacgatttgcttgtaatctgcagacagatcccgggggataagtaccaggtgtttgattcagctccccgggggctcctccgggttgaagagttggaagaccaagggcaaaccttggccaatgtgtttatcctccggcttctggaaaacgcagatgatagggaggccacatatatgctgaaggcgtcctcccaatcagagatgaaacgttggatgacatctctggcccctaaccggcggacaaaattcgtgagttttacttcccggctcttggactgtccacaggtccagtgtgtacacccttacgtagcccagcagcccgatgaactaacattggaactggccgacatccttaatatcttggataaaacagacgacgggtggattttcggcgaacggctgcatgaccaggagcgaggatggtttccaagctcaatgacagaggagatactgaaccccaagattaggagtcagaatctgaaggagtgtttccgcgtgcacaaaatggatgatcctcaacgctcccagaacaaagatcgaaggaagctcggcagccgtaacaggcaatag

SEQ ID NO: 42851 - DNA, 717 bp, Artificial Sequence
  derived and/or modified sequence
atggagctgctggccgccgccttcagcgccgcctgcgccgtggaccatgattcatctaccagtgaaagcgacgcaagagacagtgcagcaggacacctgcctggctccgagagctcgtccacccctgggaatggtgccacccccgaagaatggcctgccctcgcagacagtcccaccaccctgactgaagccttacggatgatacacccgatccctgcggatagttggagaaacttgatcgaacagatagggctgctgtaccaggaatacagggacaagtcaacactgcaagaaatcgagactcgtaggcagcaggacgcggagattgaggacaacaccaatggctctcctgcatccgaggatacgcccgaggaggaagaggaagaggaggaagaagaagaacctgcctctcctcctgagcgaaagacgctgcctcaaatatgcctgctgtcaaatcctcactcccgctttaatctttggcaggatctgcccgagatccgtagctcaggtgtgttggagattctccaacctgaggaaatcaagctgcaggaggccatgttcgagcttgtgaccagtgaggcatcttattacaaaagtctgaacctcctggtttctcacttcatggagaatgagagaattcggaagattctgcatccgtcagaggcccatattctgttctctaatgttctggatgtgctcgcggtatctgagcggtag

SEQ ID NO: 42852 - DNA, 2286 bp, Artificial Sequence
  derived and/or modified sequence
ggagtgctcggcagcggtggcggcggcggctgcagctccggtcgagccgcgcgcgctgcgaccccgctccgcagcccgctagtcgcccccgacccagcccagggccccggcgtggcccccgacccggcccccgcacccgccccgccgccgaccctatggagctgctggccgctgccttcagcgccgcctgcgccgtggaccacgacagttccacctcggaaagcgacgcgcgcgactcggcggcgggacacctgcccggcagtgagtcgtcctccaccccgggaaatggggccacgcccgaggagtggccggccctggccgacagccccaccacgctcaccgaggccctgcggatgatccaccccattcccgccgactcctggagaaacctcattgaacaaatagggctcctgtatcaggaataccgagataaatcgactctccaagaaatcgaaaccaggaggcaacaggatgcagaaatagaagacaataccaatgggtccccggccagtgaggacaccccggaggaggaagaagaagaggaggaggaggaggagccggccagcccaccagagaggaagactctgccccagatctgcctgctcagtaacccccactcaaggttcaacctctggcaggatcttcccgagatccggagcagcggggtgcttgagatcctacagcccgaggagattaagctgcaggaggccatgttcgagctggtcacttccgaggcgtcctactacaagagtctgaacctgctcgtgtcccacttcatggagaacgagcggataaggaagatcctgcacccgtccgaggcgcacatcctcttctccaacgtcctggacgtgctggctgtcagtgagcggttcctcctggagctggagcaccggatggaggagaacatcgtcatctctgacgtgtgtgacattgtgtaccgttatgcggccgaccacttctctgtctacatcacctacgtcagcaatcagacctaccaggagcggacctataagcagctgctccaggagaaggcagctttccgggagctgatcgcgcagctagagctcgaccccaagtgcagggggctgcccttctcctccttcctcatcctgcctttccagaggatcacacgcctcaagctgttggtccagaacatcctgaagagggtagaagagaggtctgagcgggagtgcactgctttggatgctcacaaggagctggaaatggtggtgaaggcatgcaacgagggcgtcaggaaaatgagccgcacggaacagatgatcagcattcagaagaagatggagttcaagatcaagtcggtgcccatcatctcccactcccgctggctgctgaagcagggtgagctgcagcagatgtcaggccccaagacctcccggaccctgaggaccaagaagctcttccacgaaatttacctcttcctgttcaacgacctgctggtgatctgccggcagattccaggagacaagtaccaggtatttgactcagctccgcggggactgctgcgtgtggaggagctggaggaccagggccagacgctggccaacgtgttcatcctgcggctgctggagaacgcagatgaccgggaggccacctacatgctaaaggcgtcctctcagagtgagatgaagcgttggatgacctcactggcccccaacaggaggaccaagtttgtttcgttcacatcccggctgctggactgcccccaggtccagtgcgtgcacccatacgtggctcagcagccagacgagctgacgctggagctcgccgacatcctcaacatcctggacaagactgacgacgggtggatctttggcgagcgtctgcacgaccaggagagaggctggttccccagctccatgactgaggagatcttgaatcccaagatccggtcccagaacctcaaggaatgtttccgtgtccacaagatggatgaccctcagcgcagccagaacaaggaccgcaggaagctgggcagccggaatcggcaatgacccccacccagggggccagcgggagcagggcctgcatgagaccccgacagaaggtgggggggggggggctctgggaagcacaggccagcacctccccaggtggcaggatctggcttggggtgcccggccctcatccctgcccacgcagtgagtgctcatgtgtcttggccccttgctcgcaaactggataaagggtgcccaagcctctcctgatgcatttgtaaacaagaaggtttcagcagtattacaccacctccctcatgcctccgagggg

SEQ ID NO: 42853 - DNA, 1022 bp, Artificial Sequence
  derived and/or modified sequence
ggagtgctcggcagcggtggcggcggcggctgcagctccggtcgagccgcgcgcgctgcgaccccgctccgcagcccgctagtcgcccccgacccagcccagggccccggcgtggcccccgacccggcccccgcacccgccccgccgccgaccctatggagctgctggccgctgccttcagcgccgcctgcgccgtggaccacgacagttccacctcggaaagcgacgcgcgcgactcggcggcgggacacctgcccggcagtgagtcgtcctccaccccgggaaatggggccacgcccgaggagtggccggccctggccgacagccccaccacgctcaccgaggccctgcggatgatccaccccattcccgccgactcctggagaaacctcattgaacaaatagggctcctgtatcaggaataccgagataaatcgactctccaagaaatcgaaaccaggaggcaacaggatgcagaaatagaagacaataccaatgggtccccggccagtgaggacaccccggaggaggaagaagaagaggaggaggaggaggagccggccagcccaccagagaggaagactctgccccagatctgcctgctcagtaacccccactcaaggttcaacctctggcaggatcttcccgagatccggagcagcggggtgcttgagatcctacagcccgaggagattaagctgcaggaggccatgttcgagctggtcacttccgaggcgtcctactacaagagtctgaacctgctcgtgtcccacttcatggagaacgagcggataaggaagatcctgcacccgtccgaggcgcacatcctcttctccaacgtcctggacgtgctggctgtcagtgagcggtgaggacgggggggacagccacctccctcagggcccttcttcatccccagggcacatgcttgagacactgatgacaagtgctcgatactggcttctctacttccagatgtttggaatgttccataataaaatataaataaatgaagaactaaa

SEQ ID NO: 42854 - DNA, 1857 bp, Artificial Sequence
  derived and/or modified sequence
atggagctgctggctgcagccttttctgcggcttgcgcggtcgatcacgacagcagtacctctgaatcagacgccagagacagcgccgcaggtcacttgcccggatcggaatctagcagcacgccaggaaatggggcaacccctgaagagtggccggcactggccgattcacccactacattgaccgaggctctccggatgatccatcctatccccgcagattcgtggcgtaatcttatcgaacagatcggccttctgtaccaggagtatcgagacaagtcaacattacaagagatcgaaacccgcagacagcaggacgctgagatagaggacaacaccaatgggtctccggctagtgaagacaccccagaggaggaagaagaggaggaagaggaagaggaacccgcaagcccccctgagcggaagacactgccccaaatctgcctcctcagtaacccccactcgagattcaacctttggcaagacctgcccgaaattagaagtagcggagtgctggaaatactgcagcccgaagagatcaaactgcaggaagcgatgtttgagctggtgactagcgaagcaagttactacaaatcccttaacctcttggtgtctcatttcatggaaaacgagagaattagaaagattttacatccctcggaggcccacatcctattctccaacgtgctagacgtcctggccgtgagcgagcggtttcttctggagctggaacacaggatggaagaaaatatagtaatttcagatgtgtgtgacatagtttaccgctacgcagccgatcatttctctgtttatataacctacgtctcaaaccagacataccaggagcggacctacaagcagctgctccaagaaaaggccgcttttcgtgaactcatcgctcagctggaactcgaccccaaatgtaggggtttgccatttagcagtttcctgattctacctttccaacgcataactagactgaaactcctggtgcaaaacattttaaagcgggtcgaggagcggtccgagagagagtgtacggctttagacgcgcacaaggagctcgaaatggtcgttaaggcctgtaacgaaggagtccggaagatgtctaggaccgaacaaatgatctcaatccagaagaagatggagtttaaaatcaagagcgtgcctattattagtcactctcggtggctgctaaagcagggggagctccaacaaatgtctggccctaagacctctcggactctgcggaccaaaaagctgtttcacgagatttacttattcttgtttaacgatctgctcgttatctgtagacagatacctggggacaaatatcaggtgttcgactcagcccctcgcggtctgttgcgggtcgaggagctggaagatcaagggcagaccctggccaacgtgttcatcctgagactgctcgaaaatgccgatgaccgagaggccacgtatatgcttaaagcctcctcccagtccgagatgaaaagatggatgacgagcctcgcacccaatagacgtactaaattcgtcagtttcacaagcaggctattggattgcccacaggtgcagtgtgtacacccttacgtggcacagcaacctgacgagctgaccttggagttagccgatattctcaacattcttgacaaaaccgacgatggctggatatttggcgagagactgcacgaccaggaaaggggatggttcccaagctccatgacggaggagatactgaatcctaagatccgctctcagaacctgaaggagtgctttagggttcacaaaatggacgacccccagagatcacagaataaggacagaagaaagctaggatccaggaacaggcagtag

SEQ ID NO: 42855 - DNA, 717 bp, Artificial Sequence
  derived and/or modified sequence
atggagctgctggccgcagcattctcagcagcctgcgcggttgatcatgattcatctacttccgagtctgatgcaagggattcggctgctggacatctccctgggagtgaaagctctagcactcccggaaatggggcaactcctgaggaatggcccgctctggctgattctcctactaccctgaccgaggccttgcgcatgatccaccccatacccgcagatagttggcgcaatctgatagagcagatagggctgttgtatcaagaataccgagataaatccacgctgcaggagattgagacaaggaggcagcaggacgccgagatagaggataataccaacggatctcctgcatccgaggacactcctgaggaggaagaagaagaagaagaagaggaggaacctgcttcacctcccgaacgcaagacattaccccagatttgtcttctgagcaacccacacagtaggttcaacctgtggcaggatcttcccgagatccgatcatcaggggtgctcgagatcttgcagccagaagaaattaaactccaggaagcaatgttcgaactggtcacttcagaagcctcatattataagtccctgaacctattggttagtcattttatggagaacgaacgtataaggaaaattctacacccatcagaggctcatatactcttttccaatgtgttagacgttttggctgtgagcgagcgctag

SEQ ID NO: 42856 - DNA, 1857 bp, Artificial Sequence
  derived and/or modified sequence
atggagctgctggccgccgccttcagcgccgcctgcgccgtggaccacgacagcagcaccagcgagagcgacgccagagacagcgccgccggccacctgcccggcagcgagagcagcagcacccccggcaacggcgccacccccgaggagtggcccgccctggccgacagccccaccaccctgaccgaggccctgagaatgatccaccccatccccgccgacagctggagaaacctgatcgagcagatcggcctgctgtaccaggagtacagagacaagagcaccctgcaggagatcgagaccagaagacagcaggacgccgagatcgaggacaacaccaacggcagccccgccagcgaggacacccccgaggaggaggaggaggaggaggaggaggaggagcccgccagcccccccgagagaaagaccctgccccagatctgcctgctgagcaacccccacagcagattcaacctgtggcaggacctgcccgagatcagaagcagcggcgtgctggagatcctgcagcccgaggagatcaagctgcaggaggccatgttcgagctggtgaccagcgaggccagctactacaagagcctgaacctgctggtgagccacttcatggagaacgagagaatcagaaagatcctgcaccccagcgaggcccacatcctgttcagcaacgtgctggacgtgctggccgtgagcgagagattcctgctggagctggagcacagaatggaggagaacatcgtgatcagcgacgtgtgcgacatcgtgtacagatacgccgccgaccacttcagcgtgtacatcacctacgtgagcaaccagacctaccaggagagaacctacaagcagctgctgcaggagaaggccgccttcagagagctgatcgcccagctggagctggaccccaagtgcagaggcctgcccttcagcagcttcctgatcctgcccttccagagaatcaccagactgaagctgctggtgcagaacatcctgaagagagtggaggagagaagcgagagagagtgcaccgccctggacgcccacaaggagctggagatggtggtgaaggcctgcaacgagggcgtgagaaagatgagcagaaccgagcagatgatcagcatccagaagaagatggagttcaagatcaagagcgtgcccatcatcagccacagcagatggctgctgaagcagggcgagctgcagcagatgagcggccccaagaccagcagaaccctgagaaccaagaagctgttccacgagatctacctgttcctgttcaacgacctgctggtgatctgcagacagatccccggcgacaagtaccaggtgttcgacagcgcccccagaggcctgctgagagtggaggagctggaggaccagggccagaccctggccaacgtgttcatcctgagactgctggagaacgccgacgacagagaggccacctacatgctgaaggccagcagccagagcgagatgaagagatggatgaccagcctggcccccaacagaagaaccaagttcgtgagcttcaccagcagactgctggactgcccccaggtgcagtgcgtgcacccctacgtggcccagcagcccgacgagctgaccctggagctggccgacatcctgaacatcctggacaagaccgacgacggctggatcttcggcgagagactgcacgaccaggagagaggctggttccccagcagcatgaccgaggagatcctgaaccccaagatcagaagccagaacctgaaggagtgcttcagagtgcacaagatggacgacccccagagaagccagaacaaggacagaagaaagctgggcagcagaaacagacagtag

SEQ ID NO: 42857 - DNA, 717 bp, Artificial Sequence
  derived and/or modified sequence
atggagctgctggccgccgccttcagcgccgcctgcgccgtggaccacgacagcagcaccagcgagagcgacgccagagacagcgccgccggccacctgcccggcagcgagagcagcagcacccccggcaacggcgccacccccgaggagtggcccgccctggccgacagccccaccaccctgaccgaggccctgagaatgatccaccccatccccgccgacagctggagaaacctgatcgagcagatcggcctgctgtaccaggagtacagagacaagagcaccctgcaggagatcgagaccagaagacagcaggacgccgagatcgaggacaacaccaacggcagccccgccagcgaggacacccccgaggaggaggaggaggaggaggaggaggaggagcccgccagcccccccgagagaaagaccctgccccagatctgcctgctgagcaacccccacagcagattcaacctgtggcaggacctgcccgagatcagaagcagcggcgtgctggagatcctgcagcccgaggagatcaagctgcaggaggccatgttcgagctggtgaccagcgaggccagctactacaagagcctgaacctgctggtgagccacttcatggagaacgagagaatcagaaagatcctgcaccccagcgaggcccacatcctgttcagcaacgtgctggacgtgctggccgtgagcgagagatag

SEQ ID NO: 42858 - protein, 830 aa, Artificial Sequence
  derived and/or modified sequence
MTVLQEPVQAAIWQALNHYAYRDAVFLAERLYAEVHSEEALFLLATCYYRSGKAYKAYRLLKGHSCTTPQCKYLLAKCCVDLSKLAEGEQILSGGVFNKQKSHDDIVTEFGDSACFTLSLLGHVYCKTDRLAKGSECYQKSLSLNPFLWSPFESLCEIGEKPDPDQTFKFTSLQNFSNCLPNSCTTQVPNHSLSHRQPETVLTETPQDTIELNRLNLESSNSKYSLNTDSSVSYIDSAVISPDTVPLGTGTSILSKQVQNKPKTGRSLLGGPAALSPLTPSFGILPLETPSPGDGSYLQNYTNTPPVIDVPSTGAPSKKTFRVLQSVARIGQTGTKSVFSQSGNSREVTPILAQTQSSGPQTSTTPQVLSPTITSPPNALPRRSSRLFTSDSSTTKENSKKLKMKFPPKIPNRKTKSKTNKGGITQPNINDSLEITKLDSSIISEGKISTITPQIQAFNLQKAAAEGLMSLLREMGKGYLALCSYNCKEAINILSHLPSHHYNTGWVLCQIGRAYFELSEYMQAERIFSEVRRIENYRVEGMEIYSTTLWHLQKDVALSVLSKDLTDMDKNSPEAWCAAGNCFSLQREHDIAIKFFQRAIQVDPNYAYAYTLLGHEFVLTEELDKALACFRNAIRVNPRHYNAWYGLGMIYYKQEKFSLAEMHFQKALDINPQSSVLLCHIGVVQHALKKSEKALDTLNKAIVIDPKNPLCKFHRASVLFANEKYKSALQELEELKQIVPKESLVYFLIGKVYKKLGQTHLALMNFSWAMDLDPKGANNQIKEAIDKRYLPDDEEPITQEEQIMGTDESQESSMTDADDTQLHAAESDEF

SEQ ID NO: 42859 - DNA, 2493 bp, Artificial Sequence
  derived and/or modified sequence
atgactgtgctccaggaaccggttcaggcagccatctggcaagccctgaaccattatgcataccgggacgccgtgttcttggccgaacgcctgtatgccgaagtacacagtgaggaggccttgttcctgctggcaacgtgttattacagatctggcaaggcttataaggcataccggttactcaagggccactcctgtacaactccccaatgtaagtacctgctggccaagtgttgtgtggatttatccaaactcgctgaaggagagcagatcttgagtggaggcgtttttaacaaacagaaaagtcacgacgatatcgtgacggaatttggcgactctgcctgtttcacgctcagtctgttaggccatgtatactgtaagacagaccgtctcgccaagggctcagagtgctaccaaaagagcctgtcgctgaacccattcttgtggtcaccctttgagagtctctgcgaaattggtgaaaagccagacccagaccaaacctttaagtttacaagcttacagaacttctccaattgtctccccaacagctgcaccacgcaggtccccaaccactctttgagccacagacagcctgaaaccgtgctgacagagacacctcaagatacgatcgagttgaatagactcaatctggagtcaagcaattctaaatactcacttaatactgatagcagtgtgagctacatagattccgcagttattagtccagacacagtccctttagggactgggacatctatcctctccaagcaggtgcagaataaaccaaagactggacgctcactccttggaggtcccgctgctctgtcgcctttaacaccttctttcggcattctgcccctggagaccccctctcccggtgacggaagttatcttcaaaactataccaacacaccacccgtcattgatgtgccttccaccggggcccccagtaaaaagacatttcgcgttctccagtctgtggcacgcataggacagacgggaaccaagtctgtgttttcacagtcaggtaattcgagagaggtgactccgatcctggctcagacccagagctctggtccacagaccagcaccacaccccaggtgctctcacccacaataacaagtcctccaaatgcactacctagaaggtcgtcacggctttttactagtgattccagcactacaaaggagaattctaaaaagctgaaaatgaaattcccaccaaaaatcccaaacagaaagacaaaaagcaaaacaaataagggcggcatcactcagccgaatattaacgattccctagagataactaaacttgatagctctataatctcagaaggcaagatatcaaccatcacacctcagatccaggcgttcaacctccagaaagccgctgccgaaggcctgatgtctctgttgcgggaaatgggaaagggttatctggcgctttgttcctacaattgtaaggaggcaatcaacattctgagtcacttaccatcacaccactacaacaccgggtgggtgttgtgccaaatcggtagggcgtatttcgagttgtcagaatacatgcaagctgaacgcattttctcagaggtaaggcggattgaaaactacagagtcgaagggatggagatttactcaaccactctgtggcacctccagaaagatgtcgcattgtctgtactcagcaaggatctgacagacatggataagaatagcccggaggcttggtgcgcagctggcaactgttttagcctgcagcgggaacatgacatcgcgatcaaattcttccaaagggctatccaggtggaccccaattacgcttacgcttacacccttcttggccacgagtttgtgctcacagaggagttggataaggcactggcctgcttccgtaatgccattcgggtaaatcctcgccattacaatgcatggtatgggctcggcatgatctattataagcaggagaaattctcattagccgagatgcacttccagaaagctcttgacataaatccacagagttccgtgctcctgtgccacatcggtgtggtccaacacgccctgaagaaaagtgaaaaggccttggataccctgaacaaggccatcgttatcgatcctaagaacccgttgtgtaagttccatcgcgcgtcagtgcttttcgcgaacgagaaatataaaagcgctctccaagaactcgaggaactgaagcagattgttccaaaggagtcattggtatatttccttatcggcaaggtgtataaaaaactcggccagacccatctggccctgatgaacttctcttgggccatggatctggaccctaaaggagcaaataaccaaataaaggaagcgatcgataagcgctatctacccgatgacgaagagcctattacccaggaagaacaaataatgggcactgacgaaagccaggaatcttctatgacggacgctgatgatacacagctacacgcagcagaatccgacgagttttag

SEQ ID NO: 42860 - DNA, 2493 bp, Artificial Sequence
  derived and/or modified sequence
atgacagtgctgcaggagcctgtgcaggccgccatctggcaggccctgaaccactacgcctacagagatgctgtgttcctggccgagcggctgtatgcagaggtgcacagcgaggaggccctcttcctgctggccacctgctactacagaagtggcaaggcctacaaggcctaccgcctgctgaagggccacagctgcaccaccccccagtgcaagtacctgctggccaagtgctgcgtggacctgagcaagctggccgagggggagcagatcctgtctggaggagtcttcaacaagcagaagagccatgatgacatcgtgacagaatttggagacagcgcctgcttcaccctgagcctgctgggccacgtgtactgcaagacagaccggctggccaagggcagcgagtgctaccagaagagcctgagcctgaaccccttcctgtggagcccctttgagagcctgtgtgagatcggggagaagccagaccctgaccagaccttcaagttcaccagcctgcagaacttcagcaactgcctgcccaacagctgcaccacccaggtgcccaaccacagcctgagccaccggcagcctgagaccgtgctgacagagaccccccaggacaccatcgagctgaaccggctgaacctggagagcagcaacagcaagtacagcctgaacacagacagctctgtgtcctacattgattctgctgtgatcagcccagacacagtgcccctgggcaccggcaccagcatcctgagcaagcaggtgcagaacaagcccaagacaggccgcagcctgctgggcggccctgctgccctgagccccctgacccccagctttggcatcctgcccctggagacccccagccctggagatggcagctacctgcagaactacaccaacaccccacctgtgattgatgtgcccagcactggagcccccagcaagaagaccttccgggtgctgcagagcgtggcccgcatcggccagacaggcaccaagtctgtgttcagccagagcggcaacagccgggaggtgacccccatcctggcccagacccagagcagcggcccccagaccagcaccaccccccaggtgctgagccccaccatcaccagccccccaaatgccctgccccggcgcagcagccgcctcttcaccagtgacagcagcaccaccaaggagaacagcaagaagctgaagatgaagtttcctcccaagatccccaacaggaagaccaagagcaagaccaacaagggcggcatcacccagcccaacatcaatgacagcctggagatcaccaagctggacagcagcatcatcagcgagggcaagatcagcaccatcaccccccagatccaggccttcaacctgcagaaggctgctgctgagggcctgatgagcctgctgcgggagatgggcaagggctacctggccctgtgcagctacaactgcaaggaggccatcaacatcctgagccacctgcccagccaccactacaacacaggctgggtgctgtgccagatcggccgggcctactttgagctgtctgagtacatgcaggccgagcgcatcttcagcgaggtgagaagaattgagaactacagagtggagggcatggagatctacagcaccaccctgtggcacctgcagaaggatgtggccctgtctgtgctgagcaaggacctgacagacatggacaagaacagccctgaggcctggtgtgccgccggcaactgcttcagcctgcagcgggagcatgacatcgccatcaagttcttccagagggccatccaggtggaccccaactatgcctatgcctacaccctgctgggccatgaatttgtgctgacagaggagctggacaaggccctggcctgcttcagaaatgccatccgggtgaaccccaggcactacaatgcctggtacggcctgggcatgatctactacaagcaggagaagttcagcctggccgagatgcacttccagaaggccctggacatcaacccccagagctctgtgctgctgtgccacatcggcgtggtgcagcacgccctgaagaagtctgagaaggccctggacaccctgaacaaggccatcgtcatcgaccccaagaaccccctgtgcaagttccaccgggcctctgtgctgtttgccaatgagaagtacaagagcgccctgcaggagctggaggagctgaagcagatcgtgcccaaggagagcctggtgtacttcctgattggcaaggtgtacaagaagctgggccagacccacctggccctgatgaacttctcctgggccatggacctggaccccaagggggccaacaaccagatcaaggaggccatcgacaagcgctacctgcctgatgatgaggagcccatcacccaggaggagcagatcatgggcacagatgagagccaggagagctccatgacagatgctgatgacacccagctgcacgccgctgagagtgatgagttctag

SEQ ID NO: 42861 - DNA, 2493 bp, Artificial Sequence
  derived and/or modified sequence
atgaccgtgctgcaggagcccgtgcaggccgccatctggcaggccctgaatcattacgcctatagagatgcagtgtttttggctgaacgactctatgctgaggtgcacagtgaagaggctctatttctgctggccacttgttactatcgaagcgggaaggcatacaaggcctaccgtctgctgaagggccacagctgcaccacgcctcaatgtaagtacctgctagccaaatgctgcgttgacctgtccaaacttgcagaaggcgagcagatcctcagtggtggggtgtttaacaagcaaaaatcccatgacgatatcgttacagaatttggagactcagcttgcttcaccctgtccctgctagggcacgtctactgcaagacggataggttggcaaaggggagcgaatgctaccagaagagcttatcacttaatcccttcctgtggtctcccttcgaatcactctgcgaaattggcgagaaaccggatccagatcagacctttaagttcacaagcctgcagaacttctccaactgcctgcctaactcttgcacaacacaggtccctaatcacagcctcagccacagacagcctgagactgtgttgacagaaacccctcaggatacaattgagctaaatcgactgaacctggaaagttctaatagtaagtactccctgaatactgacagctccgtgtcgtacatcgacagtgccgtgatctccccagacacggtaccattaggcaccgggaccagtatcctaagtaaacaggtgcagaataagccgaagaccggccgcagcctgcttggcggtcctgccgcattatctcccctgactccatctttcgggatactccctttagagaccccttcccccggcgacgggagctatctacaaaactacacgaacacgccgcctgtcatagatgtcccatctaccggcgcaccatctaagaaaacatttcgggttctgcagagcgtagcaagaataggccaaaccggaaccaagtccgtattctctcagtcaggtaacagccgcgaggtgacacccatcttggctcagacccagtccagcgggccccagacttcaacgacacctcaggtgctttcacccactataacgagtccacctaatgcactgccccgtaggagttccaggctttttacctctgacagctccaccaccaaagagaattctaaaaaactgaagatgaaattcccacccaaaatcccaaaccgcaagacaaagtccaagactaataagggcggcattactcagcctaacatcaatgactctttggagatcacaaaattggattcatccatcatcagcgaagggaagattagcaccattacacctcagattcaggctttcaacctgcagaaagccgccgcagagggactgatgagcctcctgagggagatgggaaaagggtacttggccctctgttcatataattgcaaagaggcaataaacatcctgagccatctgccatctcaccattacaataccggctgggtactttgccagatcgggagggcttatttcgagctctccgagtacatgcaggctgagcgaatcttcagtgaagtccgtcggattgagaactatcgcgtcgagggtatggagatctattcaacaaccctctggcacttgcaaaaggatgtggccttgtccgtcctgtctaaggatctgacggacatggacaagaactctccagaggcctggtgcgcagccggaaactgcttttcactccagcgggagcacgacattgccatcaaattctttcagcgggccatccaggtcgatcctaactatgcctacgcttatacactcttaggccacgaatttgtcctcaccgaggagctcgacaaagcactggcgtgttttcggaacgcaatcagggtaaatcctcggcattacaacgcctggtatggactgggcatgatatactacaagcaggagaaattttccctggccgagatgcactttcagaaagctctcgacatcaacccacaatcttctgtgttgttatgtcatatcggcgtggttcaacacgcgctcaagaaatcagaaaaagctctggataccttgaataaggcgatcgtcattgatcccaagaatccgctgtgcaaatttcacagagcgtcggtcctctttgctaatgagaaatacaaatcagccctgcaggaactcgaagagctgaaacagatcgtgccaaaagagagcctggtttattttctgatcgggaaggtttataagaagttgggccagacccacctagccctgatgaacttttcatgggccatggatctcgacccaaagggcgccaacaatcagattaaagaggccatcgacaagcgctacctgccggatgatgaagagcccatcacccaggaggaacaaataatggggaccgacgaaagccaagaatcctcgatgaccgatgctgacgatactcaactgcacgccgcggagtccgacgagttctag

SEQ ID NO: 42862 - DNA, 2493 bp, Artificial Sequence
  derived and/or modified sequence
atgaccgttctgcaagagcccgtacaggccgcaatttggcaggctctcaaccactacgcatatcgcgacgctgtcttcctggctgagcgcctgtatgcagaagtgcacagcgaggaggctctgttcttactggccacatgttattatagaagcgggaaagcctataaggcttatcgactcctgaaaggccattcttgtacgacccctcagtgcaaatatcttctcgccaagtgctgcgtggatctgagcaagctcgccgagggagaacagatcctttccggaggtgtgttcaataaacagaaaagccatgatgacattgtaactgagttcggagacagcgcctgtttcactctgagcttgctaggccacgtgtactgtaagactgatcgcctcgctaaaggatcagaatgctaccagaaatcgctctctttgaacccctttctgtggagcccatttgaatcactctgcgaaattggcgagaaacctgaccccgatcaaaccttcaaatttacatctttacaaaactttagcaactgtctgcccaatagctgtaccacccaggtgccgaaccatagcctcagccaccggcaaccagagacagtgctgaccgaaacacctcaggataccatagagttgaaccggctgaatcttgagtcatctaacagcaagtattctctgaacacagattcctcagtttcgtacatcgattccgcagtaataagtcctgatactgtgcccctgggcaccggcaccagcattctgtcaaagcaggtgcagaacaaacctaagactggtcgatccttgctcggcggaccagcagctctaagcccgctcacaccgtcgtttggaatcctgccccttgaaaccccatctcccggagacggaagctatttacaaaactacaccaatacccccccagtcatcgacgtgccctcaaccggagcaccatctaaaaaaaccttcagagtcttgcagtcagtggccagaattggacagaccggaactaaatccgttttctctcagtctgggaactcccgtgaggtgacacccatcctggcccagacccagtcttccgggccacagacctccactaccccacaggtgttgtctcctacaatcacgtcacccccaaatgcactgccacgcagatccagtcgactgtttacctctgactcctccaccacaaaagagaactcaaagaagttgaaaatgaaatttcctcctaagatcccgaacagaaaaactaaaagtaaaaccaataaagggggaatcacacagccgaatataaatgactccctggagatcacgaagctcgacagttccatcatcagcgagggcaagatctcgacaatcactcctcagatccaggccttcaatcttcagaaggcagctgccgagggtcttatgagcctattgcgggagatgggtaaggggtatctggcactgtgctcctacaattgtaaagaggccattaatatcctgtcccacctcccgagccaccactacaacaccgggtgggttctttgtcagattggccgagcctatttcgaactgagtgaatacatgcaggccgagagaatatttagtgaagttcgcagaattgagaattaccgagtcgaaggcatggaaatttacagcaccaccctgtggcacctgcaaaaggacgtggcactatccgtgctttccaaagacctgacagatatggacaagaacagtccagaagcctggtgtgccgctggcaactgtttttctttgcaacgagaacacgacattgctataaaattctttcaaagagcgatccaggtggacccgaattatgcatacgcctacaccctgctgggacatgaatttgtgttgactgaggaactggataaggccctcgcctgctttaggaatgccattcgcgtcaatccgaggcactacaacgcatggtacggactagggatgatttactacaagcaggaaaagttcagcctagctgagatgcattttcaaaaagctctggatatcaatccccagtcctccgttcttctctgtcacattggggttgtacagcacgcacttaagaagagcgaaaaagccttggacacactaaacaaggctatcgtcatcgatcccaaaaacccactgtgtaagttccatcgagcatccgtactttttgccaatgaaaaatataaatctgcacttcaagagctggaggaactgaaacaaatcgtcccgaaagaaagcctggtgtacttcctcatcggtaaagtctataagaagcttgggcagacacaccttgccctgatgaacttcagttgggccatggacttggaccctaagggggctaacaatcagatcaaagaggctattgacaaaagatatctgcccgacgatgaagaacccattacgcaggaggaacaaatcatggggacagatgagagccaggagtctagcatgacggatgctgatgatacacagctacatgccgctgagtccgatgagttttag

SEQ ID NO: 42863 - DNA, 3177 bp, Artificial Sequence
  derived and/or modified sequence
gaggatgacggtgctgcaggaacccgtccaggctgctatatggcaagcactaaaccactatgcttaccgagatgcggttttcctcgcagaacgcctttatgcagaagtacactcagaagaagccttgtttttactggcaacctgttattaccgctcaggaaaggcatataaagcatatagactcttgaaaggacacagttgtactacaccgcaatgcaaatacctgcttgcaaaatgttgtgttgatctcagcaagcttgcagaaggggaacaaatcttatctggtggagtgtttaataagcagaaaagccatgatgatattgttactgagtttggtgattcagcttgctttactctttcattgttgggacatgtatattgcaagacagatcggcttgccaaaggatcagaatgttaccaaaagagccttagtttaaatcctttcctctggtctccctttgaatcattatgtgaaataggtgaaaagccagatcctgaccaaacatttaaattcacatctttacagaactttagcaactgtctgcccaactcttgcacaacacaagtacctaatcatagtttatctcacagacagcctgagacagttcttacggaaacaccccaggacacaattgaattaaacagattgaatttagaatcttccaattcaaagtactccttgaatacagattcctcagtgtcttatattgattcagctgtaatttcacctgatactgtcccactgggaacaggaacttccatattatctaaacaggttcaaaataaaccaaaaactggtcgaagtttattaggaggaccagcagctcttagtccattaaccccaagttttgggattttgccattagaaaccccaagtcctggagatggatcctatttacaaaactacactaatacacctcctgtaattgatgtgccatccaccggagccccttcaaaaaagacttttcgtgttttacagtctgttgccagaatcggccaaactggaacaaagtctgtcttctcacagagtggaaatagccgagaggtaactccaattcttgcacaaacacaaagttctggtccacaaacaagtacaacacctcaggtattgagccccactattacatctcccccaaacgcactgcctcgaagaagttcacgactctttactagtgacagctccacaaccaaggagaatagcaaaaaattaaaaatgaagtttccacctaaaatcccaaacagaaaaacaaaaagtaaaactaataaaggaggaataactcaacctaacataaatgatagcctggaaattacaaaattggactcttccatcatttcagaagggaaaatatccacaatcacacctcagattcaggcctttaatctacaaaaagcagcagcagaaggtttgatgagccttcttcgtgaaatggggaaaggttatttagctttgtgttcatacaactgcaaagaagctataaatattttgagccatctaccttctcaccactacaatactggttgggtactgtgccaaattggaagggcctattttgaactttcagagtacatgcaagctgaaagaatattctcagaggttagaaggattgagaattatagagttgaaggcatggagatctactctacaacactttggcatcttcaaaaagatgttgctctttcagttctgtcaaaagacttaacagacatggataaaaattcgccagaggcctggtgtgctgcagggaactgtttcagtctgcaacgggaacatgatattgcaattaaattcttccagagagctatccaagttgatccaaattacgcttatgcctatactctattagggcatgagtttgtcttaactgaagaattggacaaagcattagcttgttttcgaaatgctatcagagtcaatcctagacattataatgcatggtatggtttaggaatgatttattacaagcaagaaaaattcagccttgcagaaatgcatttccaaaaagcgcttgatatcaaccctcaaagttcagttttactttgccacattggagtagttcaacatgcactgaaaaaatcagagaaggctttggataccctaaacaaagccattgtcattgatcccaagaaccctctatgcaaatttcacagagcctcagttttatttgcaaatgaaaaatataagtctgctttacaagaacttgaagaattgaaacaaattgttcccaaagaatccctcgtttacttcttaataggaaaggtttacaagaagttaggtcaaacgcacctcgccctgatgaatttctcttgggctatggatttagatcctaaaggagccaataaccagattaaagaggcaattgataagcgttatcttccagatgatgaggagccaataacccaagaagaacagatcatgggaacagatgaatcccaggagagcagcatgacagatgcggatgacacacaacttcatgcagctgaaagtgatgaattttaacttctggaaatcagacttttacaactggatgtgtgactagtgctgacgtgtttcttgtccctctgtatactgagtctttactcttgagctggcggtgtcatcgtccgtcacttataccatgagtgtgccactttcattggaccctgactgtatacagaatgaaaggcagtgcaatatttagctgctaacaagactggctcttttaccagtatgaatgacaatttatggggggtagggtggggaactttcttttctgtttttctttaatctccctttgttggaaagtatcatgaaaggaagagttatgctttatcttgaaggaaccattagatatggaaaatagtgatgaaccagagtttcttggttgctttttcaaaaatttgtttttatttggttctgttcctgataaacagagtaactgaccttcatttctaggttcttcaagaatggtgtttgcaagtgccagatggaacaataaaagacgttgcctataacagtgacttgattgccaaggaatgtaaattaccttaaacttgcagtatctcccataaacaaatgtaatgggcatattgggactcgtatgtaggaatcaaatatccctccatacagtgtactcttattcttggcaagaatgctttaatgtctaaccaagaattttaatttattcatcttgcttcaaa

SEQ ID NO: 42864 - DNA, 2493 bp, Artificial Sequence
  derived and/or modified sequence
atgaccgtgctgcaggagcccgtgcaggccgccatctggcaggccctgaaccactacgcctacagagacgccgtgttcctggccgagagactgtacgccgaggtgcacagcgaggaggccctgttcctgctggccacctgctactacagaagcggcaaggcctacaaggcctacagactgctgaagggccacagctgcaccaccccccagtgcaagtacctgctggccaagtgctgcgtggacctgagcaagctggccgagggcgagcagatcctgagcggcggcgtgttcaacaagcagaagagccacgacgacatcgtgaccgagttcggcgacagcgcctgcttcaccctgagcctgctgggccacgtgtactgcaagaccgacagactggccaagggcagcgagtgctaccagaagagcctgagcctgaaccccttcctgtggagccccttcgagagcctgtgcgagatcggcgagaagcccgaccccgaccagaccttcaagttcaccagcctgcagaacttcagcaactgcctgcccaacagctgcaccacccaggtgcccaaccacagcctgagccacagacagcccgagaccgtgctgaccgagaccccccaggacaccatcgagctgaacagactgaacctggagagcagcaacagcaagtacagcctgaacaccgacagcagcgtgagctacatcgacagcgccgtgatcagccccgacaccgtgcccctgggcaccggcaccagcatcctgagcaagcaggtgcagaacaagcccaagaccggcagaagcctgctgggcggccccgccgccctgagccccctgacccccagcttcggcatcctgcccctggagacccccagccccggcgacggcagctacctgcagaactacaccaacaccccccccgtgatcgacgtgcccagcaccggcgcccccagcaagaagaccttcagagtgctgcagagcgtggccagaatcggccagaccggcaccaagagcgtgttcagccagagcggcaacagcagagaggtgacccccatcctggcccagacccagagcagcggcccccagaccagcaccaccccccaggtgctgagccccaccatcaccagcccccccaacgccctgcccagaagaagcagcagactgttcaccagcgacagcagcaccaccaaggagaacagcaagaagctgaagatgaagttcccccccaagatccccaacagaaagaccaagagcaagaccaacaagggcggcatcacccagcccaacatcaacgacagcctggagatcaccaagctggacagcagcatcatcagcgagggcaagatcagcaccatcaccccccagatccaggccttcaacctgcagaaggccgccgccgagggcctgatgagcctgctgagagagatgggcaagggctacctggccctgtgcagctacaactgcaaggaggccatcaacatcctgagccacctgcccagccaccactacaacaccggctgggtgctgtgccagatcggcagagcctacttcgagctgagcgagtacatgcaggccgagagaatcttcagcgaggtgagaagaatcgagaactacagagtggagggcatggagatctacagcaccaccctgtggcacctgcagaaggacgtggccctgagcgtgctgagcaaggacctgaccgacatggacaagaacagccccgaggcctggtgcgccgccggcaactgcttcagcctgcagagagagcacgacatcgccatcaagttcttccagagagccatccaggtggaccccaactacgcctacgcctacaccctgctgggccacgagttcgtgctgaccgaggagctggacaaggccctggcctgcttcagaaacgccatcagagtgaaccccagacactacaacgcctggtacggcctgggcatgatctactacaagcaggagaagttcagcctggccgagatgcacttccagaaggccctggacatcaacccccagagcagcgtgctgctgtgccacatcggcgtggtgcagcacgccctgaagaagagcgagaaggccctggacaccctgaacaaggccatcgtgatcgaccccaagaaccccctgtgcaagttccacagagccagcgtgctgttcgccaacgagaagtacaagagcgccctgcaggagctggaggagctgaagcagatcgtgcccaaggagagcctggtgtacttcctgatcggcaaggtgtacaagaagctgggccagacccacctggccctgatgaacttcagctgggccatggacctggaccccaagggcgccaacaaccagatcaaggaggccatcgacaagagatacctgcccgacgacgaggagcccatcacccaggaggagcagatcatgggcaccgacgagagccaggagagcagcatgaccgacgccgacgacacccagctgcacgccgccgagagcgacgagttctag

SEQ ID NO: 42865 - protein, 433 aa, Artificial Sequence
  derived and/or modified sequence
MDKLNKITVPASQKLRQLQKMVHDIKNNEGGIMNKIKKLKVKAPPSVPRRDYASESPADEEEQWSDDFDSDYENPDEHSDSEMYVMPAEENADDSYEPPPVEQETRPVHPALPFARGEYIDNRSSQRHSPPFSKTLPSKPSWPSEKARLTSTLPALTALQKPQVPPKPKGLLEDEADYVVPVEDNDENYIHPTESSSPPPEKGRNSGAWETKSPPPAAPSPLPRAGKKPTTPLKTTPVASQQNASSVCEEKPIPAERHRGSSHRQEAVQSPVFPPAQKQIHQKPIPLPRFTEGGNPTVDGPLPSFSSNSTISEQEAGVLCKPWYAGACDRKSAEEALHRSNKDGSFLIRKSSGHDSKQPYTLVVFFNKRVYNIPVRFIEATKQYALGRKKNGEEYFGSVAEIIRNHQHSPLVLIDSQNNTKDSTRLKYAVKVS

SEQ ID NO: 42866 - protein, 67 aa, Artificial Sequence
  derived and/or modified sequence
LDSYSCLLQLPNRMDKLNKITVPASQKLRQLQKMVHDIKNNEGGIMNKIKKTATMKIQMSTRTQRCT

SEQ ID NO: 42867 - protein, 209 aa, Artificial Sequence
  derived and/or modified sequence
MDKLNKITVPASQKLRQLQKMVHDIKNNEGGIMNKIKKLKVKAPPSVPRRDYASESPADEEEQWSDDFDSDYENPDEHSDSEMYVMPAEENADDSYEPPPVEQETRPVHPALPFARGEYIDNRSSQRHSPPFSKTLPSKPSWPSEKARLTSTLPALTALQKPQVPPKPKGLLEDEADYVVPVEDNDENYIHPTESSSPPPEKGKNQRHH

SEQ ID NO: 42868 - DNA, 1302 bp, Artificial Sequence
  derived and/or modified sequence
atggacaagttgaacaagattactgtgcctgccagccaaaaactgaggcagctgcaaaaaatggtgcacgacatcaaaaataatgagggcgggataatgaataaaattaagaagcttaaggtgaaggcgcctccttcggtgcctaggagagactacgcgagcgaatctccagcagatgaagaggagcaatggtcggacgatttcgactccgactatgagaaccctgacgagcatagtgactccgagatgtatgtcatgcccgctgaggagaatgccgatgactcatatgagccaccccctgtcgagcaagaaacccgcccagtccaccccgcactacctttcgcaagaggcgaatacatagacaaccgctccagccagagacatagccccccgttttcaaaaacactgccttctaaaccttcttggccttctgaaaaagctcgcctcacatctacacttccggcacttacggcactgcagaaaccacaggtgcctccaaaaccgaagggacttctcgaggatgaagctgactacgtggtgcccgtggaagacaacgacgagaactatatccatccaaccgagtcttccagccctcctccagagaaaggtcggaatagcggtgcatgggagacaaagtctccaccaccagctgccccatcccctctacctcgagccgggaagaaacctactacccctctcaagaccacccccgttgcctctcagcagaacgcgtcaagcgtgtgcgaggagaagccaattcccgcagagaggcaccgcggctcttctcaccgccaggaggccgtgcagagtccagtctttcccccggctcaaaaacagattcaccagaagcccatccccctgccacggttcactgagggcgggaatcccacagtggatggcccactgccctctttctcctcaaactcaacaatctctgaacaggaggccggggtgctgtgtaagccatggtacgccggcgcctgtgaccggaagtctgcggaggaagcacttcacaggagcaacaaggacggttctttcctgattagaaaaagttctgggcacgatagcaaacagccttacactttggtcgtctttttcaataagagagtgtacaacattccggtccggtttatcgaggccactaaacaatacgccttaggccggaaaaagaatggtgaagagtatttcggcagcgtggcagaaattatccgtaaccaccagcactcacccctggttcttatcgattcccagaataatactaaagacagcacaagactcaagtatgccgtcaaagtatcctag

SEQ ID NO: 42869 - DNA, 1302 bp, Artificial Sequence
  derived and/or modified sequence
atggacaagctgaacaagatcaccgtgcctgccagccagaagctgcggcagctgcagaagatggtgcatgacatcaagaacaatgaaggaggcatcatgaacaagatcaagaagctgaaggtgaaggccccacccagcgtgccccggcgggactatgccagcgagagccctgcagatgaggaggagcagtggagcgatgactttgacagcgactatgaaaatccagatgagcacagcgacagcgagatgtatgtgatgcctgctgaggagaatgctgatgacagctatgagcccccacctgtggagcaggagaccaggcctgtgcacccagccctgccctttgcccggggggagtacatcgacaacagaagcagccagaggcacagcccccccttcagcaagaccctgcccagcaagcccagctggcccagcgagaaggcccggctgaccagcaccctgcctgccctgacagccctgcagaagccccaggtgccccccaagcccaagggcctgctggaggatgaggccgactatgtggtgcctgtggaggacaatgatgagaactacatccaccccacagagagcagcagccccccacctgagaagggcaggaacagcggggcctgggagaccaagagccccccacctgctgcccccagccccctgcccagggctgggaagaagcccaccacccccctgaagaccacccctgtggccagccagcagaatgccagctctgtgtgtgaggagaagcccatcccagctgagcggcaccggggcagcagccaccggcaggaggccgtgcagagccctgtgttccccccagcccagaagcagatccaccagaagcccatccccctgccccgcttcacagaaggaggcaaccccaccgtggatggccccctgcccagcttcagcagcaacagcaccatcagcgagcaggaggccggcgtgctgtgcaagccctggtacgccggggcctgtgacaggaagtctgctgaggaggccctgcacaggagcaacaaggatggcagcttcctgatcaggaagagcagcggccatgacagcaagcagccctacaccctggtggtgttcttcaacaagagggtgtacaacatccctgtgcgcttcatcgaggccaccaagcagtatgccctgggcaggaagaagaatggagaggagtacttcggctctgtggccgagatcatccggaaccaccagcacagccccctggtgctgattgacagccagaacaacaccaaggacagcacccggctgaagtatgctgtgaaggtgtcctag

SEQ ID NO: 42870 - DNA, 1302 bp, Artificial Sequence
  derived and/or modified sequence
atggacaagctgaacaagatcaccgtgcccgccagccagaagctgcgtcagctgcagaagatggtccacgatataaagaacaatgagggaggcataatgaataagattaaaaaactcaaggtgaaggcgccacccagtgtacccagacgggattacgccagcgaaagtccagcagacgaggaggagcagtggtcagacgatttcgacagcgattacgagaatccagacgagcactcggatagtgaaatgtatgtgatgcccgccgaggagaacgctgacgattcatatgagccccctcctgttgagcaggagacgaggcccgtgcacccagctcttcccttcgcaaggggagaatatattgataaccggtcttcccagcggcactcccccccattttcaaagacccttccttcaaagcccagttggcctagtgaaaaggctaggctgacatctacactgcccgcgttgaccgccttacaaaaaccacaggtgcctccaaaacctaagggcttgcttgaggatgaggctgactacgtagtgcccgtcgaggacaacgacgagaattatatccacccaaccgaaagctcttccccacctcctgaaaagggacgaaactctggtgcatgggagaccaaaagcccacccccagctgcgccttcccctctgcctcgtgcaggcaaaaaaccgaccaccccattgaaaaccacaccagtggcttctcagcaaaatgcctcaagcgtttgtgaggaaaagcccattcccgcagaaaggcacagaggctccagccaccggcaggaagcagttcagagccctgtgttcccgcctgcacaaaagcaaattcatcagaaacccatccctctgccccgttttaccgaagggggcaatccaaccgtagacggcccacttccatctttctcgtctaacagtacgatatccgaacaggaagccggcgttttgtgtaagccatggtacgctggagcctgtgacaggaagagtgcagaagaagctctgcaccggagtaataaagacggcagctttttaatccggaagagctctgggcacgactccaaacaaccctataccctcgtggtgttttttaacaagcgggtctataacatacctgtgcgattcattgaagccactaaacagtatgccctgggtaggaagaagaacggcgaggagtacttcggctctgtggctgagatcattcgaaaccatcaacacagtccactcgtgctcatcgactcacagaataataccaaggattcaaccagattgaaatatgccgtgaaggtttcctag

SEQ ID NO: 42871 - DNA, 1302 bp, Artificial Sequence
  derived and/or modified sequence
atggataagctcaataagataaccgtgccagcaagtcagaagctgagacagctccagaagatggtgcacgatattaaaaataacgagggcggaattatgaacaaaatcaagaagctcaaagttaaagcgcctcctagcgttccgcgacgcgattatgcgagcgagagtccagcagatgaggaggagcagtggtccgacgactttgattcggattatgagaacccagatgaacattccgattccgaaatgtacgttatgcccgctgaagagaacgcggatgactcttacgagccaccccctgtcgaacaggaaactcgccctgtgcaccctgccctccccttcgcgaggggagagtacattgataatcgatcatcacaaaggcattcaccccctttctccaagacactcccttctaagccaagctggcctagcgaaaaggccagactgacgagtacgctccccgctttgaccgctttacagaagccacaggtgccacccaaaccaaagggcctgctggaggatgaggccgattacgtggtccccgtggaagataatgacgagaactatattcacccaacagaatcatcaagtccgcctcccgagaagggccgaaactcaggcgcttgggagactaagtccccccctccagcggctccctcccccttaccaagagctgggaaaaagcctaccaccccgctgaagacgaccccagttgccagtcaacagaacgcgtcttccgtctgtgaagaaaaacctattccagctgagcgacaccggggatcgtcccaccgacaagaagcagtccagtctccagtgtttccgccagctcaaaaacaaatccaccaaaaacccatccccctccccagattcactgagggtggcaatcctacagtcgatggacctctacctagcttctccagcaacagcaccatctcagaacaggaagccggtgtcctttgtaagccctggtacgcgggagcctgcgatagaaaatccgccgaggaggcacttcataggtcgaacaaggacggctccttcttgattagaaaaagttccgggcacgactccaaacaaccctacacccttgttgtgtttttcaacaagagggtttacaatattcctgttcgtttcatagaggccacaaaacagtatgccctgggcaggaagaagaatggggaggaatactttggaagcgtggccgaaataatcagaaatcatcagcatagtcctttggtgcttatcgatagtcagaacaacactaaagatagcacacgcctcaagtatgccgtcaaggtttcatag

SEQ ID NO: 42872 - DNA, 1715 bp, Artificial Sequence
  derived and/or modified sequence
gcagcctgcactctcagaaatcagacttgagtggccggaacccttgagaccagaggcttaccatgctgctccctaggagggccaggaactgctgacgtgaccactggacagttattcgtgtctcttacaattaccaaacagaatggacaagcttaataaaataaccgtccccgccagtcagaagttgaggcagcttcaaaagatggtccatgatattaaaaacaatgaaggtggaataatgaataaaatcaaaaagctaaaagtcaaagcacctccaagtgttcctcgaagggactacgcttcagagagccctgctgacgaagaggagcagtggtccgatgactttgacagcgactatgaaaatccagatgagcactcggactcagagatgtacgtgatgcccgccgaggagaacgctgatgacagctacgagccgcctccagtagagcaggaaaccaggccggttcacccagccctgcccttcgccagaggcgagtatatagacaatcgatcaagccagaggcattccccacccttcagcaagacacttcccagtaagcccagctggccttcagagaaagcaaggctcacctccaccctgccggccctgactgctttgcagaaacctcaagtcccacccaaacccaaaggcctccttgaggatgaggctgattatgtggtccccgtggaagataatgatgaaaactatattcatcccacagaaagcagttcacctccacctgaaaaaggtcgaaacagtggggcctgggaaaccaagtcacctccaccagctgcaccatccccgttgccacgggccgggaaaaaaccaacgacaccactgaagacaactccagttgcctctcaacagaatgcttcaagtgtttgtgaagaaaaacctatacctgctgaacgccaccgagggtcaagtcacagacaagaagctgtgcagtcaccagtgtttcctcctgcccagaaacaaatccaccaaaaacccatacctctgccaagatttacagaagggggaaacccaactgtggatgggcccctacccagcttttcatctaattccactatttcagaacaggaagctggcgttctctgcaagccatggtatgctggagcctgtgatcgaaagtctgctgaagaggcattgcacagatcaaacaaggatggatcatttcttattcggaaaagctctggccatgattccaaacaaccatatacactagttgtattctttaataagcgagtatataatattcctgtgcgatttattgaagcaacaaaacaatatgccttgggcagaaagaaaaatggtgaagagtactttggaagtgttgctgaaatcatcaggaatcatcaacatagtcctttggttcttattgacagtcagaataacacaaaagattccaccagactgaagtatgcagttaaagtttcataaagggggaaaaaaaagatcaataccattgcttcagacactttcccaaagtttctccttttgagaaaaagtcccaaaacttcatattttggattatgaatcatccagtaataaaatggaagatggagtcagctattgaagtggtcatccatttctttttaagaagctcatgtggacttgttctattgcctgacctgatgaactgttaatatctggtgaggttgagttatcatgctactaatattttccaaataaatatttttatttttaaaaa

SEQ ID NO: 42873 - DNA, 1676 bp, Artificial Sequence
  derived and/or modified sequence
aagttttacttctccctagagcaggggtgtttgccagcagcctgcactctcagaaatcagacttgagtggccggaacccttgagaccagaggcttaccatgctgctccctaggagggccaggaactgctgacgtgaccactggacagttattcgtgtctcttacaattaccaaacagaatggacaagcttaataaaataaccgtccccgccagtcagaagttgaggcagcttcaaaagatggtccatgatattaaaaacaatgaaggtggaataatgaataaaatcaaaaagctaaaagtcaaagcacctccaagtgttcctcgaagggactacgcttcagagagccctgctgacgaagaggagcagtggtccgatgactttgacagcgactatgaaaatccagatgagcactcggactcagagatgtacgtgatgcccgccgaggagaacgctgatgacagctacgagccgcctccagtagagcaggaaaccaggccggttcacccagccctgcccttcgccagaggcgagtatatagacaatcgatcaagccagaggcattccccacccttcagcaagacacttcccagtaagcccagctggccttcagagaaagcaaggctcacctccaccctgccggccctgactgctttgcagaaacctcaagtcccacccaaacccaaaggcctccttgaggatgaggctgattatgtggtccccgtggaagataatgatgaaaactatattcatcccacagaaagcagttcacctccacctgaaaaaggaaaaaaccaacgacaccactgaagacaactccagttgcctctcaacagaatgcttcaagtgtttgtgaagaaaaacctatacctgctgaacgccaccgagggtcaagtcacagacaagaagctgtgcagtcaccagtgtttcctcctgcccagaaacaaatccaccaaaaacccatacctctgccaagatttacagaagggggaaacccaactgtggatgggcccctacccagcttttcatctaattccactatttcagaacaggaagctggcgttctctgcaagccatggtatgctggagcctgtgatcgaaagtctgctgaagaggcattgcacagatcaaacaaggatggatcatttcttattcggaaaagctctggccatgattccaaacaaccatatacactagttgtattctttaataagcgagtatataatattcctgtgcgatttattgaagcaacaaaacaatatgccttgggcagaaagaaaaatggtgaagagtactttggaagtgttgctgaaatcatcaggaatcatcaacatagtcctttggttcttattgacagtcagaataacacaaaagattccaccagactgaagtatgcagttaaagtttcataaagggggaaaaaaaagatcaataccattgcttcagacactttcccaaagtttctccttttgagaaaaagtcccaaaacttcatattttggattatgaatcatccagtaataaaatggaagatggagtcagctattgaagtggtcatccatttctttttaagaagctcatgtggacttgttctattgcctgacctgatgaactgttaatatctggtgaggttgagttatcatgctactaatattttccaaataaatatttttattttt

SEQ ID NO: 42874 - DNA, 1302 bp, Artificial Sequence
  derived and/or modified sequence
atggacaagctgaacaagatcaccgtgcccgccagccagaagctgagacagctgcagaagatggtgcacgacatcaagaacaacgagggcggcatcatgaacaagatcaagaagctgaaggtgaaggccccccccagcgtgcccagaagagactacgccagcgagagccccgccgacgaggaggagcagtggagcgacgacttcgacagcgactacgagaaccccgacgagcacagcgacagcgagatgtacgtgatgcccgccgaggagaacgccgacgacagctacgagcccccccccgtggagcaggagaccagacccgtgcaccccgccctgcccttcgccagaggcgagtacatcgacaacagaagcagccagagacacagcccccccttcagcaagaccctgcccagcaagcccagctggcccagcgagaaggccagactgaccagcaccctgcccgccctgaccgccctgcagaagccccaggtgccccccaagcccaagggcctgctggaggacgaggccgactacgtggtgcccgtggaggacaacgacgagaactacatccaccccaccgagagcagcagccccccccccgagaagggcagaaacagcggcgcctgggagaccaagagccccccccccgccgcccccagccccctgcccagagccggcaagaagcccaccacccccctgaagaccacccccgtggccagccagcagaacgccagcagcgtgtgcgaggagaagcccatccccgccgagagacacagaggcagcagccacagacaggaggccgtgcagagccccgtgttcccccccgcccagaagcagatccaccagaagcccatccccctgcccagattcaccgagggcggcaaccccaccgtggacggccccctgcccagcttcagcagcaacagcaccatcagcgagcaggaggccggcgtgctgtgcaagccctggtacgccggcgcctgcgacagaaagagcgccgaggaggccctgcacagaagcaacaaggacggcagcttcctgatcagaaagagcagcggccacgacagcaagcagccctacaccctggtggtgttcttcaacaagagagtgtacaacatccccgtgagattcatcgaggccaccaagcagtacgccctgggcagaaagaagaacggcgaggagtacttcggcagcgtggccgagatcatcagaaaccaccagcacagccccctggtgctgatcgacagccagaacaacaccaaggacagcaccagactgaagtacgccgtgaaggtgagctag

SEQ ID NO: 42875 - protein, 809 aa, Artificial Sequence
  derived and/or modified sequence
MGTPRAQHPPPPQLLFLILLSCPWIQGLPLKEEEILPEPGSETPTVASEALAELLHGALLRRGPEMGYLPGSDRDPTLATPPAGQTLAVPSLPRATEPGTGPLTTAVTPNGVRGAGPTAPELLTPPPGTTAPPPPSPASPGPPLGPEGGEEETTTTIITTTTVTTTVTSPAYLLSCGFPPRPAHGDVSVTDLHPGGTATFHCDSGYQLQGEETLICLNGTRPSWNGETPSCMASCGGTIHNATLGRIVSPEPGGAVGPNLTCRWVIEAAEGRRLHLHFERVSLDEDNDRLMVRSGGSPLSPVIYDSDMDDVPERGLISDAQSLYVELLSETPANPLLLSLRFEAFEEDRCFAPFLAHGNVTTTDPEYRPGALATFSCLPGYALEPPGPPNAIECVDPTEPHWNDTEPACKAMCGGELSEPAGVVLSPDWPQSYSPGQDCVWGVHVQEEKRILLQVEILNVREGDMLTLFDGDGPSARVLAQLRGPQPRRRLLSSGPDLTLQFQAPPGPPNPGLGQGFVLHFKEVPRNDTCPELPPPEWGWRTASHGDLIRGTVLTYQCEPGYELLGSDILTCQWDLSWSAAPPACQKIMTCADPGEIANGHRTASDAGFPVGSHVQYRCLPGYSLEGAAMLTCYSRDTGTPKWSDRVPKCALKYEPCLNPGVPENGYQTLYKHHYQAGESLRFFCYEGFELIGEVTITCVPGHPSQWTSQPPLCKVAYEELLDNRKLEVTQTTDPSRQLEGGNLALAILLPLGLVIVLGSGVYIYYTKLQGKSLFGFSGSHSYSPITVESDFSNPLYEAGDTREYEVSI

SEQ ID NO: 42876 - DNA, 2430 bp, Artificial Sequence
  derived and/or modified sequence
atgggcacccccagagcccagcaccccccccccccccagctgctgttcctgatcctgctgagctgcccctggatccagggcctgcccctgaaggaggaggagatcctgcccgagcccggcagcgagacccccaccgtggccagcgaggccctggccgagctgctgcacggcgccctgctgagaagaggccccgagatgggctacctgcccggcagcgacagagaccccaccctggccaccccccccgccggccagaccctggccgtgcccagcctgcccagagccaccgagcccggcaccggccccctgaccaccgccgtgacccccaacggcgtgagaggcgccggccccaccgcccccgagctgctgacccccccccccggcaccaccgccccccccccccccagccccgccagccccggcccccccctgggccccgagggcggcgaggaggagaccaccaccaccatcatcaccaccaccaccgtgaccaccaccgtgaccagccccgcctacctgctgagctgcggcttcccccccagacccgcccacggcgacgtgagcgtgaccgacctgcaccccggcggcaccgccaccttccactgcgacagcggctaccagctgcagggcgaggagaccctgatctgcctgaacggcaccagacccagctggaacggcgagacccccagctgcatggccagctgcggcggcaccatccacaacgccaccctgggcagaatcgtgagccccgagcccggcggcgccgtgggccccaacctgacctgcagatgggtgatcgaggccgccgagggcagaagactgcacctgcacttcgagagagtgagcctggacgaggacaacgacagactgatggtgagaagcggcggcagccccctgagccccgtgatctacgacagcgacatggacgacgtgcccgagagaggcctgatcagcgacgcccagagcctgtacgtggagctgctgagcgagacccccgccaaccccctgctgctgagcctgagattcgaggccttcgaggaggacagatgcttcgcccccttcctggcccacggcaacgtgaccaccaccgaccccgagtacagacccggcgccctggccaccttcagctgcctgcccggctacgccctggagccccccggcccccccaacgccatcgagtgcgtggaccccaccgagccccactggaacgacaccgagcccgcctgcaaggccatgtgcggcggcgagctgagcgagcccgccggcgtggtgctgagccccgactggccccagagctacagccccggccaggactgcgtgtggggcgtgcacgtgcaggaggagaagagaatcctgctgcaggtggagatcctgaacgtgagagagggcgacatgctgaccctgttcgacggcgacggccccagcgccagagtgctggcccagctgagaggcccccagcccagaagaagactgctgagcagcggccccgacctgaccctgcagttccaggccccccccggcccccccaaccccggcctgggccagggcttcgtgctgcacttcaaggaggtgcccagaaacgacacctgccccgagctgcccccccccgagtggggctggagaaccgccagccacggcgacctgatcagaggcaccgtgctgacctaccagtgcgagcccggctacgagctgctgggcagcgacatcctgacctgccagtgggacctgagctggagcgccgccccccccgcctgccagaagatcatgacctgcgccgaccccggcgagatcgccaacggccacagaaccgccagcgacgccggcttccccgtgggcagccacgtgcagtacagatgcctgcccggctacagcctggagggcgccgccatgctgacctgctacagcagagacaccggcacccccaagtggagcgacagagtgcccaagtgcgccctgaagtacgagccctgcctgaaccccggcgtgcccgagaacggctaccagaccctgtacaagcaccactaccaggccggcgagagcctgagattcttctgctacgagggcttcgagctgatcggcgaggtgaccatcacctgcgtgcccggccaccccagccagtggaccagccagccccccctgtgcaaggtggcctacgaggagctgctggacaacagaaagctggaggtgacccagaccaccgaccccagcagacagctggagggcggcaacctggccctggccatcctgctgcccctgggcctggtgatcgtgctgggcagcggcgtgtacatctactacaccaagctgcagggcaagagcctgttcggcttcagcggcagccacagctacagccccatcaccgtggagagcgacttcagcaaccccctgtacgaggccggcgacaccagagagtacgaggtgagcatctag

SEQ ID NO: 42877 - DNA, 2430 bp, Artificial Sequence
  derived and/or modified sequence
atgggcaccccacgggcacagcatccaccccctccacagctgttattcttgattctgctgagctgtccttggattcagggtctgccgcttaaggaggaagaaatactgcctgagcccggcagtgagacccccacggtggcctccgaggccctggcagagttactccatggagcactgcttaggaggggtcctgagatggggtatctgcccggtagcgaccgcgaccccactcttgcgacgccacctgcgggtcaaacattggccgtgccaagcctgcctagggcaacggaacctgggactggccctttaacaactgctgtaacacccaatggcgtgcggggagcaggccccaccgcccctgagctactgaccccaccacccggcaccaccgcccctcctccaccttcgcctgcctcccccggcccccccttggggccagagggcggcgaggaggagactaccactactatcattactaccacgacagtcacaaccaccgtcacctctccagcttacctcctctcctgtggattccctcctcgccccgcgcatggagacgtgtcggttactgacctacatcccggcggtacagccaccttccattgcgacagtgggtatcagctgcagggggaagaaaccctaatttgccttaacggcacgagaccctcttggaatggagagactccgtcttgcatggccagctgcgggggtacaatccacaatgcaacattgggccggatagtgtctcccgagcctggaggcgctgtcggcccgaacctcacatgcaggtgggtgatagaggccgcagagggtcgaagactgcacttgcactttgagagggtgagcctggacgaagataacgatcgcctgatggtcaggagcggcggctctcctcttagcccagttatatacgattcagacatggatgatgtgccagagcggggcttgatttctgacgcccagtcactgtacgtggaattactgtccgagacaccagcgaatcctttgttgttatcacttaggttcgaggcgtttgaggaggacagatgcttcgctcctttcctggcccacggaaacgtgacgacgaccgatcccgaatatcgaccaggcgccttggcaaccttctcgtgtttgcccggatatgctttagagccacctggtccccccaatgccattgaatgcgtagacccaactgagccccattggaacgataccgagcctgcctgcaaagccatgtgtggcggcgaactgtcagagccggcgggcgttgtattatcacccgattggcctcaatcctatagtcccggccaggattgtgtctggggcgttcacgtacaggaggaaaagcgcatcctccttcaggttgagatactgaacgtgagagagggagatatgctcacactcttcgacggggatgggccatctgctcgcgttctggcccagttacggggtccacagccccgcagacgtcttttgtcctccggtcctgacttgaccttgcagttccaagcgccccctggaccaccgaatccaggtctcggccagggctttgtgctccacttcaaggaggtccccagaaacgacacatgccctgaacttcctccgccagaatggggttggaggacagcatcccacggtgacttaattagaggaaccgtactcacataccagtgcgaaccgggctatgagcttcttggctcagacatcctcacctgtcagtgggacctgagctggagcgctgccccgcccgcctgtcaaaagatcatgacatgcgctgacccgggagaaatagctaacgggcaccggacagcatccgatgccggatttcctgtcggatctcacgtccagtaccggtgcctccccggctatagcctggaaggggcggcaatgcttacatgctactcccgtgacactggaactcctaagtggagcgatcgagtgccgaagtgcgcactcaaatatgagccctgtctgaatccaggtgttccagagaacggctaccagaccctgtacaaacatcattatcaggctggcgagtccctaagatttttttgttacgaaggctttgagttgatcggggaggtgaccataacatgcgtgcctgggcacccttcacagtggacatcccaaccccctctgtgtaaggtagcatatgaggagttgctggataatcgcaagttagaagtgacacaaaccacagatccttcccgacagttggaaggaggcaatctggctttagctatcctgctgccgctgggtcttgtcatagttcttggctctggggtgtacatttattacaccaagcttcaggggaaaagcctgtttggcttttcaggcagccactcatacagcccaataacagtagagtccgacttctccaatccgctctacgaggccggagataccagagaatatgaggttagtatctag

SEQ ID NO: 42878 - DNA, 2430 bp, Artificial Sequence
  derived and/or modified sequence
atgggcaccccccgggcccagcaccccccaccaccccagctgctcttcctgatcctgctgagctgcccctggatccagggcctgcccctgaaggaggaggagatcctgcctgagcccggcagcgagacccccaccgtggccagcgaggccctggccgagctgctgcacggggccctgctgcggcggggccctgagatgggctacctgcccggcagtgaccgggaccccaccctggccaccccacctgctggccagaccctggccgtgcccagcctgccccgggccacagagcccggcaccggccccctgaccacagctgtgacccccaacggggtgagaggagctggccccacagcccctgagctgctgaccccacctcctggcaccacagcccctcctccacccagccctgccagccctggcccccccctgggccctgagggcggggaggaggagaccaccaccaccatcatcaccaccaccaccgtgaccaccaccgtgaccagccctgcctacctgctgagctgtggcttcccccccaggcctgcccatggagatgtgtctgtgacagacctgcaccctgggggcacagccaccttccactgtgacagcggctaccagctgcagggcgaggagaccctcatctgcctgaatggcacccggcccagctggaatggagagacccccagctgcatggccagctgtggcggcaccatccacaatgccaccctgggcagaattgtgtccccagagcccggcggcgctgtgggccccaacctgacctgccgctgggtgattgaggccgctgagggccggcggctgcacctgcactttgagcgggtgtccctggatgaagataatgaccggctgatggtgcgcagcggcggcagccccctgagccctgtgatctatgacagcgacatggatgatgtgcctgagcggggcctcatcagtgatgcccagagcctgtatgtggagctgctgtctgagaccccagccaaccccctgctgctgagcctgcgctttgaggcctttgaagaagatcgctgctttgcccccttcctggcccatggaaatgtgaccaccacagatcctgagtacagacctggggccctggccaccttcagctgcctgcccggctacgccctggagcccccaggccccccaaatgccattgaatgtgtggaccccacagagccccactggaatgacacagagcccgcctgcaaggccatgtgtggcggggagctgtctgagcctgctggggtggtgctgagcccagactggccccagagctacagccctggccaggactgtgtgtggggcgtgcacgtgcaggaggagaagaggatcctgctgcaggtggagatcctgaatgtgcgggagggggacatgctgaccctgtttgatggagatggccccagcgcccgggtgctggcccagctgcggggcccccagccccggcggcggctgctgagcagcggccctgacctgaccctgcagttccaggcccctcctggcccccccaaccctggcctgggccagggctttgtgctgcacttcaaggaggtgcccagaaatgacacctgcccagagctgcccccacctgagtggggctggaggacagccagccatggagacctgatccggggcaccgtgctgacctaccagtgtgagcccggctatgagctgctgggcagtgacatcctgacctgccagtgggacctgtcctggagcgctgcccccccagcctgccagaagatcatgacctgtgccgaccccggggagatcgccaacggccacaggacagccagtgatgctggcttccctgtgggcagccacgtgcagtaccgctgcctgcccggctacagcctggagggcgccgccatgctgacctgctacagccgggacaccggcacccccaagtggagcgacagagtgcccaagtgtgccctgaagtatgagccctgcctgaaccctggggtgcctgaaaatggctaccagaccctgtacaagcaccactaccaggccggggagagcctgcgcttcttctgctatgagggctttgagctgattggagaggtgaccatcacctgtgtgcccggccaccccagccagtggaccagccagccccccctgtgcaaggtggcctatgaggagctgctggacaacaggaagctggaggtgacccagaccacagaccccagccggcagctggagggcggcaacctggccctggccatcctgctgcccctgggcctggtgattgtgctgggcagcggcgtgtacatctactacaccaagctgcagggcaagagcctgtttggcttcagcggcagccacagctacagccccatcaccgtggagagtgacttcagcaaccccctgtatgaagctggggacacccgggagtatgaggtgtccatctag

SEQ ID NO: 42879 - DNA, 2430 bp, Artificial Sequence
  derived and/or modified sequence
atgggcaccccccgggcccagcaccccccccccccccagctgctgtttcttatcctgttgtcctgcccctggattcaagggttgcccctgaaggaggaagagatcctgcctgagccaggatcagaaacgccaaccgttgctagtgaagctctggccgagctgctccacggagccctcctccgcagaggtcctgaaatggggtatttgcctgggtctgatcgagatccaactctggcaacacccccagccggccagactctggcagttccttccctgccacgggctacagaaccaggcacagggcccctgactactgctgttactcctaacggggtgcggggggccgggccgacagcgcccgagctgctcacacctccacccggaactaccgccccccctcctccctcccccgcatcgcctggacctcccctggggccagagggaggggaggaggaaactaccactacaatcatcactactactacagtcactacaaccgtcacttcgcccgcctacctgctgagctgtggcttcccgccccggcccgcccacggagatgtatctgtgactgacctacaccctggcggcacagctaccttccactgcgattctggctaccagttacagggagaggagacccttatttgccttaacggaacacgcccaagctggaatggtgagaccccaagctgcatggcctcatgcggaggcacaatccataatgccacactaggccgcatcgtttctcccgagcccggtggggccgtaggacctaatcttacatgtagatgggtgattgaagctgcggagggcaggaggctacatcttcactttgaacgtgtctctctggacgaggacaacgacaggctgatggtacgcagtggaggctctcctctgtcacctgtgatttatgactctgacatggacgacgttcccgagagaggcctgatctctgacgcccagtcgctatacgtggagctcttaagtgaaactcctgctaacccactcctactgtctctccgtttcgaggccttcgaagaggatcgttgtttcgcacctttcctggcgcacggaaacgtgacaaccacagaccctgaataccggccaggggctctcgccaccttctcttgtcttccaggatacgcactcgaacctcctggccctccgaatgcaatcgaatgcgttgacccaacagagcctcattggaacgataccgagccggcctgcaaagccatgtgcggtggtgagctctcagaacctgccggggtcgtgctgtcccccgactggccccagagctattcccccgggcaggactgcgtctggggagttcacgttcaagaagaaaaaaggatccttctccaagtagaaattctgaatgtaagggaaggggacatgctgaccctttttgatggggacgggccatctgcccgggtgctggcgcaactgcggggcccccagcctcggaggaggctgttgagtagtggacctgatctgactttacagtttcaggcccctcccggcccccctaacccaggacttggacaggggttcgtgcttcattttaaggaagtgccacggaatgatacttgtcccgagctcccaccccctgaatggggctggcgaacagcctcccatggcgatctcattagaggaacagtcctcacttaccagtgtgaacccggatacgaactgctgggaagcgatatcctaacctgccagtgggacttatcttggtccgcagcgcccccggcctgccaaaaaattatgacatgtgcggatcccggcgagattgctaacggccacaggacagcctccgatgccggatttccagttgggtcacatgtacagtacaggtgcttacccggatacagcctggaaggggccgccatgctcacctgttattctagagacaccgggactcctaagtggagtgatagggtgccaaagtgcgcccttaagtacgagccctgtctgaacccaggagtaccagaaaacggctaccagacgctgtataagcaccactaccaagccggtgagtccctcaggtttttttgctacgaaggcttcgagcttatcggcgaggtgactattacatgcgtcccagggcatccgagccagtggaccagccagccaccactctgcaaagtggcatatgaggagttactcgacaatagaaagttggaggtgactcagacaacagacccttcaagacagttggaaggaggcaacctggcactcgccattctgctcccgctaggactggttatcgttctaggaagtggggtgtatatctactacactaagctgcaaggaaagagtctgtttggttttagcggcagtcattcctacagtcccattaccgtcgaaagtgacttcagcaaccccttatacgaggctggagacactagggaatacgaagttagcatttag

SEQ ID NO: 42880 - DNA, 2430 bp, Artificial Sequence
  derived and/or modified sequence
atgggtacgcccagagcccagcacccccctccccctcaactgctgtttttgatactcttgagctgtccatggatccagggactgccactgaaggaagaagagatcttgcccgagcccggttcagaaacacctaccgtggcatccgaagctcttgccgagctgctacacggggcattgctgagacggggtcccgaaatggggtatctaccagggtctgatcgggatcctactcttgccacaccacccgctggacagaccctggctgtgccttctctgccaagagcgaccgagcctgggactgggccactcaccactgcagtgactcccaatggcgtgaggggggcaggacctacggcccctgaactgcttacgcctccccctggaacaacagcacccccaccacctagccccgcaagccccggacctccactggggccagagggcggagaggaggaaacgactacaacgataatcacaaccacgacggtcaccacaactgtaacttcccccgcataccttttaagctgcggattcccgccacgcccagctcacggcgacgtgagcgtgacagacctccatcccggagggactgctacttttcactgcgattctgggtaccagctgcagggcgaggaaaccctgatatgcctgaacggaactagaccgtcctggaatggcgagaccccatcctgtatggcctcctgtggaggaacaatacataatgctactctggggcgtatcgtctcgcccgagccagggggtgctgtggggccaaatctgacttgtcggtgggtaattgaggcagctgaaggtcgcaggttacacctgcattttgagcgcgtctcattggatgaggataatgataggcttatggttcgttccggaggatcccccctgtctccagtcatctatgattcagacatggacgatgtcccggagcggggactaatcagtgatgctcaaagcctgtacgttgagcttttatcagaaactccagcaaatcctctgctgttatccctgaggtttgaagcttttgaggaggaccgctgctttgctcccttcctagcccacggtaacgtcacgactaccgatccagaataccgacccggtgcactggctaccttcagttgccttcccggatacgcactggagcctccaggccctcctaacgctatcgaatgcgtcgatccgacagagccccattggaacgacacggaacctgcctgcaaagcaatgtgcggaggagagctcagtgaacccgctggagtagtattatcacctgattggcctcagagttattctccagggcaagactgtgtgtggggcgtacatgtgcaggaggagaagaggattctcctgcaggtagagatattgaatgtccgtgagggggacatgctgactctctttgatggtgatgggcctagtgcaagagtgctggcccagctccgcggacctcagccacgacgccgacttttgagcagtggcccagaccttaccctgcagttccaggcccctcccggtccgccaaacccaggcctgggtcagggctttgtccttcacttcaaagaggtgcctcgaaacgatacgtgtccagaactgccccctcctgagtgggggtggcggactgcaagccacggtgatctgatccgcggaaccgtcttgacctaccagtgtgagcccggatacgagttgttgggctccgatatcctgacatgccagtgggacctcagctggtctgccgctcctccagcgtgccaaaaaattatgacctgtgctgatccaggtgagatcgccaacggccacaggactgctagcgatgcagggtttcccgtgggcagtcatgtccagtatcgatgtttaccgggatactctttggaaggggcagccatgctgacctgttactcccgggacacaggcacccccaaatggagcgaccgggtccctaaatgtgcactgaagtatgagccctgcctgaacccaggtgtgccggagaacggctatcagacactctacaaacatcactaccaagcaggggaatccctaaggtttttttgctacgaaggctttgaactcatcggcgaagttactattacctgcgtgcctggccatccaagccaatggacctctcagcctcctctctgtaaagtcgcctacgaagagctgcttgataatcgtaagctggaggtgactcaaaccacagaccctagcagacagctggaggggggaaacctagctcttgccattctactaccccttggcctcgtgatcgtcctcggaagcggtgtgtatatttactatacaaagctccaaggaaaatctttgttcgggttttctgggtcacacagctactccccgatcactgttgaatccgactttagtaatcctctttatgaggctggcgatactcgcgagtatgaagtttccatatag

SEQ ID NO: 42881 - DNA, 3208 bp, Artificial Sequence
  derived and/or modified sequence
agagccgcgagaagaggacagaggagactgagcaaaggggggtgggctccaggcgacccctagcccaattctgcccctccatcccaaggggcagagaaattgtctttctttgctgactcctacgaggaaaaaaaaaaaaaaaaaaaaaacaattaaagggaaagataaacggagacggaggaaaggtggcagccagattacttagagaggcacagaggagagagatcggggtgagtcgccatggggactcccagggcccagcacccgccgcctccccagctgctgttcctaattctgctgagctgtccctggatccagggtctgcccctgaaggaggaggagatattgccagagcctggaagtgagacccccacggtggcctctgaggccctggctgaactgcttcatggggccctgctgaggaggggcccagagatgggctacctgccaggatctgatcgggaccccacgctagccacccctccggccggccagactctcgcagtgccctccctgccacgggccactgagccggggacagggcctctgacaacagccgtcacccctaacggggtcaggggggcaggccccactgcgccagaactgctgaccccgcccccaggaaccacagccccacccccacccagccctgcctccccagggcctccccttgggcctgagggaggagaggaggagacgacgaccaccatcatcaccacgacaactgttaccactacggtgaccagcccagcctacctcctgagctgtggcttccctccccggccggcccatggggacgtgagtgtgacggacctgcaccctgggggcactgccacctttcactgtgattcgggctaccagctgcagggagaggagaccctcatctgcctcaatggcacccggccatcctggaacggtgaaacccccagctgcatggcatcctgtggtggcaccatccacaatgccaccctgggccgcatcgtgtccccagagcctgggggagccgtagggcccaacctcacctgccgttgggtcattgaagcagctgaggggcgccggctgcacctgcactttgaaagggtctcgctggatgaggacaatgaccggctgatggtgcgctcagggggcagccccctatcccccgtgatctatgattcggacatggacgatgtccccgagcggggtctcatcagtgacgcccagtccctctacgtggagctgctgtcagagacacctgccaatcccctgctgttaagccttcgatttgaagcctttgaggaggatcgctgcttcgcccccttcctggcacatggaaatgtcactaccacggaccctgagtatcgcccaggggcactggcaaccttctcgtgcctcccaggatatgccctggagccccctgggccccccaatgccatcgaatgtgtggatcccacagaaccccactggaacgacacagagccggcctgcaaagccatgtgtggaggggagctgtcggaaccagctggcgtggtcctctctcccgactggccccagagctatagcccgggccaagactgcgtgtggggcgtgcacgtccaggaagagaagcgcatcttgctccaagttgagatattgaatgtgcgggaaggggacatgctgacgctgttcgacggggacggtcccagcgcccgagtcttggcccagctgcggggacctcagccgcgccgccgccttctctcctctgggcccgacctcacactgcagtttcaggcaccgcccgggcccccaaatccaggcctgggccagggcttcgtattgcacttcaaagaggtcccgaggaacgacacgtgccccgagctgccacctccggagtggggctggagaacggcatcccacggggacctgatccggggcacggtgctcacctaccagtgcgagcctggctacgagctgctaggctccgacattctcacttgccagtgggacctgtcttggagcgccgcgccgcccgcctgccaaaagatcatgacttgtgctgaccctggcgagattgccaacgggcaccgcaccgcctcggacgccggcttccccgttggctcccacgtccagtaccgctgcctgccagggtacagcctcgagggggcagccatgctcacctgctacagccgggacacaggcacacccaagtggagcgatagggtccccaaatgcgccttgaagtacgagccgtgcctgaacccgggggttcccgagaatggctaccagacgctgtacaagcaccactaccaggcgggcgagtctctgcgcttcttctgctatgagggctttgagcttatcggcgaggtcaccatcacctgtgtgcccggccacccctcccagtggaccagccagcccccactctgcaaagttgcctatgaggagctcctggacaaccgaaaactggaagtgacccagaccacagatccatcacggcagctggaaggggggaacctggccctggccatcctgctgcctctaggcttggtcattgtcctcggcagtggcgtttacatctactacaccaagcttcagggaaagtcccttttcggcttctcgggctcccactcctacagccccatcaccgtggagtcggacttcagcaacccgctgtatgaagctggggatacgcgggagtatgaagtttccatctgaaccccaagactacagctgcaggacccaggacgcccctcccctcctcattcgggcagagggaaatacgggacccggtctctgcctcctggctgccctcctccctggctgtgtaaatagtctccctatcccacgagggggctttgatggccctggagatcctacagtaaataaaccagcatcctgccgcccaaagccgcctcttctcagttgccaaacgaggggcctgccccccgccctaccggcttttggattctgggaggggaactctgcctccctgcaaatcttgcagcccctcctgcccagggcacccctcaaggactgcccccgatagctctactgttcccttggccacgaaggtgcccccctcccagatgccctggccctaggcctgactccggccaggagggtcagaagaaggacaaaggggagagctgggacaaggccttgcccccttcctgccatctccccaacccacagtctctccacctttgcttctgaattcttgtttttgagcaataaacagaaaatcgccacttgt

SEQ ID NO: 42882 - protein, 316 aa, Artificial Sequence
  derived and/or modified sequence
MPQTVILPGPAPWGFRLSGGIDFNQPLVITRITPGSKAAAANLCPGDVILAIDGFGTESMTHADAQDRIKAAAHQLCLKIDRGETHLWSPQVSEDGKAHPFKINLESEPQEFKPIGTAHNRRAQPFVAAANIDDKRQVVSASYNSPIGLYSTSNIQDALHGQLRGLIPSSPQNEPTASVPPESDVYRMLHDNRNEPTQPRQSGSFRVLQGMVDDGSDDRPAGTRSVRAPVTKVHGGSGGAQRMPLCDKCGSGIVGAVVKARDKYRHPECFVCADCNLNLKQKGYFFIEGELYCETHARARTKPPEGYDTVTLYPKA

SEQ ID NO: 42883 - DNA, 951 bp, Artificial Sequence
  derived and/or modified sequence
atgccacagactgtgatcctgcctgggccagccccctggggcttccgactcagcggggggatcgacttcaatcagcccctcgtcataacacgtattactccaggatccaaggctgccgccgcgaacctttgccctggtgacgtaatactggccattgacgggtttggaacagaatccatgacacatgctgatgcgcaggacagaattaaggccgcagctcaccagctttgcctgaagatagatcggggagaaacgcacctgtggtctccacaagtgtcagaagacggcaaagcccacccattcaaaattaatctcgagtcagaaccgcaggaatttaaacccataggcacggctcacaaccggagggcacaaccgtttgttgccgccgccaatatcgacgataagagacaggtggtgagcgcttcctacaactcacccatcggcctgtattcaacatctaatattcaggatgccctgcacggtcagttgcgcgggctgatcccttctagtccacaaaatgagccgacagcgtcagttccccccgagagcgatgtgtataggatgctgcacgataacagaaatgaaccgactcagccccgccagagcggctcttttagagttctgcaaggcatggttgacgatggatctgatgaccggccagccggcaccaggtctgttcgggcccccgtcacaaaagtccacggcggctccggcggtgcgcaaaggatgcccttgtgcgacaaatgtgggagtgggatcgtgggggctgtggtgaaagcaagggataagtatcgtcacccagaatgttttgtgtgtgcagactgtaacttgaatctcaaacagaaaggttacttttttattgagggtgaactgtattgcgaaacgcacgcgcgtgccaggaccaaacccccagaggggtatgacacagttacactgtaccccaaagcgtag

SEQ ID NO: 42884 - DNA, 951 bp, Artificial Sequence
  derived and/or modified sequence
atgccccagaccgtcatcctgcccggccctgccccctggggcttccggctgagcggcggcatcgacttcaaccagcccctggtgatcacccgcatcaccccaggcagcaaggctgctgctgccaacctgtgccctggagatgtgatcctggccattgatggctttggaacagagagcatgacccatgctgatgcccaggaccgcatcaaggccgccgcccaccagctgtgcctgaagattgacagaggagagacccacctgtggagcccccaggtgtctgaagatggcaaggcccaccccttcaagatcaacctggagagcgagccccaggagttcaagcccatcggcacagcccacaacagaagagcccagccctttgtggccgccgccaacattgatgacaagaggcaggtggtgtctgccagctacaacagccccatcggcctgtacagcaccagcaacatccaggatgccctgcacggccagctgcggggcctcatccccagcagcccccagaatgagcccacagcctctgtgcccccagagagtgatgtgtacaggatgctgcatgacaacagaaatgagcccacccagccccggcagagcggcagcttccgggtgctgcagggcatggtggatgatggcagtgatgacaggcctgctggcaccaggtctgtgcgggcccctgtgaccaaggtgcacggcggcagcggcggggcccagaggatgcccctgtgtgacaagtgtggcagcggcatcgtgggcgctgtggtgaaggcccgggacaagtaccgccaccctgagtgctttgtgtgtgccgactgcaacctgaacctgaagcagaagggctacttcttcattgaaggagagctgtactgtgagacccacgcccgggcccggaccaagcccccagagggctatgacacagtgaccctgtaccccaaggcctag

SEQ ID NO: 42885 - DNA, 951 bp, Artificial Sequence
  derived and/or modified sequence
atgccccagaccgtgatcctgcccggccccgccccctggggcttccgcctcagcggggggattgacttcaaccagcctctggtaattaccaggatcaccccaggatcaaaagctgccgcagctaacctttgcccaggggatgtgatacttgccatcgacgggttcggaaccgaatccatgacccatgctgacgcacaggacagaataaaagccgcagctcatcaactgtgcctcaaaattgacaggggagaaacgcacctgtggagtcctcaggtgagcgaggacggtaaagcacaccccttcaagatcaatcttgagagcgagccgcaggaatttaagcccattggaaccgcacacaatcgaagagctcagccctttgtggccgccgccaatattgatgataaacggcaggtggtaagcgccagctataatagtcccatcgggctctatagtacatccaatatccaagacgcgctgcatggccagctgcgcgggctaatcccctcctcaccacaaaacgaaccaaccgctagtgtgccacctgaatctgatgtgtatcgtatgctgcacgataacagaaatgaaccaacccagccaagacagtccggcagttttcgtgtcctacagggaatggtcgacgatggatcagacgataggcccgccggcactcggtccgtgcgggcacctgtgactaaggtgcacgggggatctggcggcgcccagaggatgcccctgtgcgacaaatgtgggtccgggatcgttggggctgtggtcaaagcccgtgacaagtataggcaccccgagtgtttcgtgtgtgccgactgtaaccttaacctaaaacagaagggctacttctttattgagggcgagttgtactgcgaaacccacgcgcgagcccgtacgaaacctcctgagggatacgatactgtaaccctctatcctaaagcctag

SEQ ID NO: 42886 - DNA, 951 bp, Artificial Sequence
  derived and/or modified sequence
atgccccagaccgtgatcctcccagggcctgctccttggggctttcggcttagcgggggaatcgacttcaaccaacctctcgtgatcacacgcattacacccggaagcaaagccgctgccgcaaatttatgtcctggggacgtcatcctggctattgacggcttcggcaccgagagtatgacgcatgcagatgcccaagaccgaatcaaggctgcagcacaccagctatgtctaaagattgacaggggagagactcatctctggtcaccccaggtctcagaggatggcaaagctcatccgtttaagataaatctggagtcagagccgcaggaatttaagcctatagggacggctcacaacagacgagcccagcctttcgtggcagccgcaaacatcgacgacaagaggcaggtagtctccgcaagctataacagtccgatcggactttactcaacctctaacattcaggacgcactgcacggtcagttgcgcggtctgatcccgtcatcccctcagaacgaaccgacagcatcagtcccgcctgaaagtgatgtctatcgtatgctgcatgacaatcggaacgagccaacgcaaccaaggcagtccggttccttcagagtcctgcagggaatggtggacgatggctctgatgatagacccgctgggaccaggtcagtgagggcacccgtgacaaaagtacacgggggttcaggaggcgcacagaggatgccactgtgtgacaaatgcggcagcggcattgttggtgccgtggtgaaggcccgagataaatatcgtcatcccgaatgctttgtgtgtgccgactgcaacctgaatctcaagcagaagggttacttcttcatcgagggagagttatactgcgaaacccacgcacgagctagaaccaagcctccagagggatatgatacagttactctgtacccaaaagcctag

SEQ ID NO: 42887 - DNA, 1672 bp, Artificial Sequence
  derived and/or modified sequence
cgcttccaaagttggagctctccggggtgggagggggcggggaggacggcggggcggtgacgtcacccccagcggggataaagcgcccccgcccgggtcggggccaggacgccgcccggcgcggagtggctgccctgcgcggggacacttagagcccggtgggcgggaggaaggcggcatgccccagacggtgatcctcccgggccctgcgccctggggcttcaggctctcagggggcatagacttcaaccagcctttggtcatcaccaggattacaccaggaagcaaggcggcagctgccaacctgtgtcctggagatgtcatcctggctattgacggctttgggacagagtccatgactcatgctgatgcgcaggacaggattaaagcagcagctcaccagctgtgtctcaaaattgacaggggagaaactcacttatggtctccacaagtatctgaagatgggaaagcccatcctttcaaaatcaacttagaatcagaaccacaggaattcaaacccattggtaccgcgcacaacagaagggcccagccttttgttgcagctgcaaacattgatgacaaaagacaggtagtgagcgcttcctataactcgccaattgggctctattcaactagcaatatacaagatgcgcttcacggacagctgcggggtctcattcctagctcacctcaaaacgagcccacagcctcggtgccccccgagtcggacgtgtaccggatgctccacgacaatcggaatgagcccacacagcctcgccagtcgggctccttcagagtgctccagggaatggtggacgatggctctgatgaccgtccggctggaacgcggagtgtgagagctccggtgacgaaagtccatggcggttcaggcggggcacagaggatgccgctctgtgacaaatgtgggagtggcatagtcggtgctgtggtgaaggcgcgggataagtaccggcaccctgagtgcttcgtgtgtgccgactgcaacctcaacctcaagcaaaagggctacttcttcatagaaggggagctgtactgcgaaacccacgcaagagcccgcacaaagcccccagagggctatgacacggtcactctgtatcccaaagcttaagtctctgcaggcgtggcacgcacgcacgcacccacccacgcgcacttacacgagaagacattcatggctttgggcagaaggattgtgcagattgtcaactccaaatctaaagtcaaggctttagacctttatcctattgtttattgaggaaaaggaatgggaggcaaatgcctgctatgtgaaaaaaacatacacttagctatgttttgcaactctttttggggctagcaataatgatatttaaagcaataattttttgtatgtcatactccacaatttacatgtatattacagccatcaaacacataaacatcaagatatttgaaggactctaattgtctttccttgacaagttgattttgcaattgtggtaaatagcaaataacaatcttgtattctaacataatctgcagttgtctgtatgtgttttaactattacagtgcatgttagggagaaattccctgaatttctttagttttgtattcaaacaattatgccactcgatgcaacaaacataataaatacataaaagatttaaaaaa

SEQ ID NO: 42888 - DNA, 951 bp, Artificial Sequence
  derived and/or modified sequence
atgccccagaccgtgatcctgcccggccccgccccctggggcttcagactgagcggcggcatcgacttcaaccagcccctggtgatcaccagaatcacccccggcagcaaggccgccgccgccaacctgtgccccggcgacgtgatcctggccatcgacggcttcggcaccgagagcatgacccacgccgacgcccaggacagaatcaaggccgccgcccaccagctgtgcctgaagatcgacagaggcgagacccacctgtggagcccccaggtgagcgaggacggcaaggcccaccccttcaagatcaacctggagagcgagccccaggagttcaagcccatcggcaccgcccacaacagaagagcccagcccttcgtggccgccgccaacatcgacgacaagagacaggtggtgagcgccagctacaacagccccatcggcctgtacagcaccagcaacatccaggacgccctgcacggccagctgagaggcctgatccccagcagcccccagaacgagcccaccgccagcgtgccccccgagagcgacgtgtacagaatgctgcacgacaacagaaacgagcccacccagcccagacagagcggcagcttcagagtgctgcagggcatggtggacgacggcagcgacgacagacccgccggcaccagaagcgtgagagcccccgtgaccaaggtgcacggcggcagcggcggcgcccagagaatgcccctgtgcgacaagtgcggcagcggcatcgtgggcgccgtggtgaaggccagagacaagtacagacaccccgagtgcttcgtgtgcgccgactgcaacctgaacctgaagcagaagggctacttcttcatcgagggcgagctgtactgcgagacccacgccagagccagaaccaagccccccgagggctacgacaccgtgaccctgtaccccaaggcctag

SEQ ID NO: 42889 - protein, 2604 aa, Artificial Sequence
  derived and/or modified sequence
MASRERLFELWMLYCTKKDPDYLKLWLDTFVSSYEQFLDVDFEKLPTRVDDMPPGISLLPDNILQVLRIQLLQCVQKMADGLEEQQQALSILLVKFFIILCRNLSNVEEIGTCSYINYVITMTTLYIQQLKSKKKEKEMADQTCIEEFVIHALAFCESLYDPYRNWRHRISGRILSTVEKSRQKYKPASLTVEFVPFFYQCFQESEHLKESLKCCLLHLFGAIVAGGQRNALQAISPATMEVLMRVLADCDSWEDGDPEEVGRKAELTLKCLTEVVHILLSSNSDQRQVETSTILENYFKLLNSDHSALPNQRRSRQWENRFIALQIKMLNTITAMLDCTDRPVLQAIFLNSNCFEHLIRLLQNCKVFQGQLDCLAISTIQALTAVMNKSPAAKEVFKERIGYTHMLEVLKSLGQPPLELLKELMNMAVEGDHTSVGILGISNVQPLLLLIQWLPELQSHDLQIFISDWLKRICCINRQSRTTCVNANMGIRIIETLDLHSSLHQTCAENLIAIHGSLGSQSVSSEEIRRLLRLLRVDESESVHPYVTPVTRAILTMARKLSLESALQYFNLSHSMAGISVPPIQKWPGSAFSFSAWFCLDQDQLTLGIANKGGKRKQLYSFFTGSGMGFEAFITHSGMLVVAVCTKREYATVMLPDHSFCDSLWHNITVVHMPGKRPFGQSFVYIYDNGQQKVSAPLRFPAMNEPFTSCCIGSAGQRTTTPPPSQIPDPPFSSPITPHRTSFGGILSSASWGGTIEKSKLITKLISAGTQDSEWGCPTSLEGQLGSVIIFYEPLQPPQVKALYLAGPNCLSPWKCQESDMADLPGNILLYYTAKACKNSICLDLSTNCLHGRLTGNKVVNWDIKDIINCIGGLNVLFPLLEQISHFSEGQIPEEKNESTVPESVTPVEGDWLVWTSTKASESRLERNLVATFILIVKHFIQRHPINQGNLIHSHGVATLGALLQKVPSTLMDVNVLMAVQLLIEQVSLEKNMQLLQQMYQYLLFDFRIWNRGDFPFRIGHIQYLSTIIKDSRRVFRKKYGVQFLLDTLRIYYGNGCKYNELSLDDIRTIRTSLYGLIKYFLCKGGSHEEIQSIMGYIAATNEEEQLFGILDVLFSLLRTSPTRGQLFLLLFEPGNADILYALLLNQKYSDRLREIIFKIMEQMLKCTNVYERSKQHIRLREVGYSGLGLLLNEALVNTSLIKNLTHQIINTDPVINFKDLLSVVYISHRAHINVRVAICRKVLQILQFQPDAAHQISQQVGWQDTLVRLFLKAKFENGNTLHKHSRAVLMKDNDKNMSTEDTKKNSDEKTDEEKITSFASANVSSDQWSLEDRHSLDSNTPLFPEDSSVGELSFKSENQEEFWHSNPSHLSLDLSGIDSCEMSDSGSQVPDSLPSTPSPVESTKSFSVHSDRESSITNDMGFSDDFSLLESQERCEEELLQLLTHILNYVMCKGLEKSDDDTWIERGQVFSALSKPGISSELLRPSDEIKLTLLQKMLEWAISENREAKTNPVTAENAFRLVLIIQDFLQSEGLVNSNMWTEKLLEDMMLLFDCLSVCYSESPVWVKLSQIQIQLLLGFIGRGNLQVCAMASAKLNTLLQTKVIENQDEACYILGKLEHVLSQSIKEQTEIYSFLIPLVRTLVSKIYELLFMNLHLPSLPFTNGSSSFFEDFQEYCNSNEWQVYIEKYIVPYMKQYEAHTFYDGHENMALYWKDCYEALMVNMHKRDREGGESKLKFQELFVEPFNRKARQENLRYNNMLKQLSSQQLATLRRWKAIQLYLTCERGPWAKRKQNPIHWKLANVENYSRMRLKLVPNYNFKTHEEASALRDNLGIQHSQPSSDTLLLEVVKQVKVSDMVEDKLDLPEEDITARVNVDEKEEQDQKEKLVLMEDCELITIIDVIPGRLEITTQHIYFYDGSIEKEDGVGFDFKWPHSQIREIHLRRYNLRRSALEIFHVDQSNYFLNFKKEVRNKIYSRLLSLHSPNSYYGSRSPQELFKASGLTQKWVNREISNFDYLIQINTMAGRTYNDLAQYPVFPWILQDYTSEELDLNNPAVFRDLSKPIGVVNEKNAKAMREKYENFEDPMGTIDKFHYGTHYSNSAGVMHYLIRVEPFTTLHIQLQSGRFDCADRQFHSIPATWQALMDNPYDVKELIPEFFYFPEFLENQNQFNLGRLQISKELVNDVILPKWAKSAEDFIYKHRKALESEYVSAHLHEWIDLIFGYKQRGPAAVEALNVFYYCSYEGAVDLDALTDEKERKALEGMINNFGQTPCQLLKITISMNYVIGTHGWLPYDRNISNYFTFIKDQTVTNPKTQRSINGSFAPGLEITSKLFVVSHDAKLLFSAGYWDNSIQVMSLTKGKIISHIIRHMDIVTCLATDYCGIHLISGSRDTTCMIWQITQQGGVPVGLASKPFQILYGHTNEVLSVGISTELDMAVSGSRDGTVIIHTIPNLAISWEGHIVVYSSTEEKTTLKDKNALHLFSINGKYLGSQILKEQVSDICIIGEHIVTGSIQGFLSIRDLHSLNLSINPLAMRLPIHCVCVTKEYSHILVGLEDGKLIVVGVGKPAEMRSGQLSRKFWGSSKRLSQISAGETEYNTQDSK

SEQ ID NO: 42890 - protein, 2694 aa, Artificial Sequence
  derived and/or modified sequence
MASRERLFELWMLYCTKKDPDYLKLWLDTFVSSYEQFLDVDFEKLPTRVDDMPPGISLLPDNILQVLRIQLLQCVQKMADGLEEQQQALSILLVKFFIILCRNLSNVEEIGTCSYINYVITMTTLYIQQLKSKKKEKEMADQTCIEEFVIHALAFCESLYDPYRNWRHRISGRILSTVEKSRQKYKPASLTVEFVPFFYQCFQESEHLKESLKCCLLHLFGAIVAGGQRNALQAISPATMEVLMRVLADCDSWEDGDPEEVGRKAELTLKCLTEVVHILLSSNSDQRQVETSTILENYFKLLNSDHSALPNQRRSRQWENRFIALQIKMLNTITAMLDCTDRPVLQAIFLNSNCFEHLIRLLQNCKVFQGQLDCLAISTIQALTAVMNKSPAAKEVFKERIGYTHMLEVLKSLGQPPLELLKELMNMAVEGDHTSVGILGISNVQPLLLLIQWLPELQSHDLQIFISDWLKRICCINRQSRTTCVNANMGIRIIETLDLHSSLHQTCAENLIAIHGSLGSQSVSSEEIRRLLRLLRVDESESVHPYVTPVTRAILTMARKLSLESALQYFNLSHSMAGISVPPIQKWPGSAFSFSAWFCLDQDQLTLGIANKGGKRKQLYSFFTGSGMGFEAFITHSGMLVVAVCTKREYATVMLPDHSFCDSLWHNITVVHMPGKRPFGQSFVYIYDNGQQKVSAPLRFPAMNEPFTSCCIGSAGQRTTTPPPSQIPDPPFSSPITPHRTSFGGILSSASWGGTIEKSKLITKLISAGTQDSEWGCPTSLEGQLGSVIIFYEPLQPPQVKALYLAGPNCLSPWKCQESDMADLPGNILLYYTAKACKNSICLDLSTNCLHGRLTGNKVVNWDIKDIINCIGGLNVLFPLLEQISHFSEGQIPEEKNESTVPESVTPVEGDWLVWTSTKASESRLERNLVATFILIVKHFIQRHPINQGNLIHSHGVATLGALLQKVPSTLMDVNVLMAVQLLIEQVSLEKNMQLLQQMYQYLLFDFRIWNRGDFPFRIGHIQYLSTIIKDSRRVFRKKYGVQFLLDTLRIYYGNGCKYNELSLDDIRTIRTSLYGLIKYFLCKGGSHEEIQSIMGYIAATNEEEQLFGILDVLFSLLRTSPTRGQLFLLLFEPGNADILYALLLNQKYSDRLREIIFKIMEQMLKCTNVYERSKQHIRLREVGYSGLGLLLNEALVNTSLIKNLTHQIINTDPVINFKDLLSVVYISHRAHINVRVAICRKVLQILQFQPDAAHQISQQVGWQDTLVRLFLKAKFENGNTLHKHSRAVLMKDNDKNMSTEDTKKNSDEKTDEEKITSFASANVSSDQWSLEDRHSLDSNTPLFPEDSSVGELSFKSENQEEFWHSNPSHLSLDLSGIDSCEMSDSGSQVPDSLPSTPSPVESTKSFSVHSDRESSITNDMGFSDDFSLLESQERCEEELLQLLTHILNYVMCKGLEKSDDDTWIERGQVFSALSKPGISSELLRPSDEIKLTLLQKMLEWAISENREAKTNPVTAENAFRLVLIIQDFLQSEGLVNSNMWTEKLLEDMMLLFDCLSVCYSESPVWVKLSQIQIQLLLGFIGRGNLQVCAMASAKLNTLLQTKVIENQDEACYILGKLEHVLSQSIKEQTEIYSFLIPLVRTLVSKIYELLFMNLHLPSLPFTNGSSSFFEDFQEYCNSNEWQVYIEKYIVPYMKQYEAHTFYDGHENMALYWKDCYEALMVNMHKRDREGGESKLKFQELFVEPFNRKARQENLRYNNMLKQLSSQQLATLRRWKAIQLYLTCERGPWAKRKQNPIHWKLANVENYSRMRLKLVPNYNFKTHEEASALRDNLGIQHSQPSSDTLLLEVVKQVKVSDMVEDKLDLPEEDITARVNVDEKEEQDQKEKLVLMEDCELITIIDVIPGRLEITTQHIYFYDGSIEKEDGVGFDFKWPHSQIREIHLRRYNLRRSALEIFHVDQSNYFLNFKKEVRNKIYSRLLSLHSPNSYYGSRSPQELFKASGLTQKWVNREISNFDYLIQINTMAGRTYNDLAQYPVFPWILQDYTSEELDLNNPAVFRDLSKPIGVVNEKNAKAMREKYENFEDPMGTIDKFHYGTHYSNSAGVMHYLIRVEPFTTLHIQLQSGRFDCADRQFHSIPATWQALMDNPYDVKELIPEFFYFPEFLENQNQFNLGRLQISKELVNDVILPKWAKSAEDFIYKHRKALESEYVSAHLHEWIDLIFGYKQRGPAAVEALNVFYYCSYEGAVDLDALTDEKERKALEGMINNFGQTPCQLLKEPHPPRLSAEEAVQKPTKIDTSTLNLFQHLPELKSFFIEGISDGIPLLKATIPKNQYRSFMSQGSPELLITISMNYVIGTHGWLPYDRNISNYFTFIKDQTVTNPKTQRSINGSFAPGLEITSKLFVVSHDAKLLFSAGYWDNSIQVMSLTKGKIISHIIRHMDIVTCLATDYCGIHLISGSRDTTCMIWQITQQGGVPVGLASKPFQILYGHTNEVLSVGISTELDMAVSGSRDGTVIIHTIQKGQYMRTLRPPCESSLFLTIPNLAISWEGHIVVYSSTEEKTTLKDKNALHLFSINGKYLGSQILKEQVSDICIIGEHIVTGSIQGFLSIRDLHSLNLSINPLAMRLPIHCVCVTKEYSHILVGLEDGKLIVVGVGKPAEMRSGQLSRKFWGSSKRLSQISAGETEYNTQDSK

SEQ ID NO: 42891 - DNA, 7815 bp, Artificial Sequence
  derived and/or modified sequence
atggcaagtcgggagcgactgtttgagctgtggatgctctactgtacaaagaaggaccctgattacttgaagctgtggctggacactttcgtgtccagttatgaacagtttttagacgtggacttcgagaaactaccgactagggtcgatgatatgccacctggcatctctttgctacccgacaatattcttcaggtgttacggattcaactgctacagtgtgttcaaaagatggctgacggcctggaagagcagcaacaggccttgtccattttgttggtcaaattttttattattctgtgtaggaatttgagcaacgtcgaagaaattgggacatgctcctatataaactatgtgattacaatgacaactctatacattcagcagttgaagtcgaaaaaaaaggagaaggaaatggccgatcagacttgtatagaagaattcgtcatccacgcacttgccttttgcgagagcctctacgatccctatagaaattggagacacagaatctccggaagaatcctatccactgtcgaaaaatcgcgccaaaaatataagccagcaagcctaacagtcgagtttgtcccgtttttctaccagtgttttcaggagtcggaacacttaaaggagagcttgaagtgttgcctacttcatctgtttggggctatcgttgcaggaggccagaggaacgcacttcaggccatatctccagccacgatggaggttctgatgcgggtcctggctgactgcgactcttgggaggacggcgatccggaggaggtcggtcggaaagccgagcttaccctgaagtgcttgacagaggtcgtgcatattttattgtcaagcaactcagatcagcggcaggtggaaacctctactattttagaaaactatttcaaactactgaacagtgaccattctgctcttccaaaccagcggagatcacggcagtgggaaaatcgcttcattgcactacagatcaaaatgcttaatacaatcactgcaatgttggactgtaccgacaggcccgtgctccaggctatctttcttaattcaaactgctttgagcacttaattaggctactgcagaattgcaaagtgttccagggccagctggactgcctagccatttccactatacaggcactgacagcagtcatgaacaagtcaccagccgccaaggaagttttcaaggagagaatcggttacacccacatgctcgaggtgctgaagtctcttggacagccaccactggagctgctcaaggaactcatgaatatggctgtcgaaggagaccacacaagtgttgggattctaggcatttccaatgtgcaaccgctgcttttgctgattcagtggctgcccgaattgcaatcccatgatctgcagatctttatcagtgattggctgaagcgcatttgctgtattaaccgacagagccgcaccacttgcgttaatgctaacatgggaattaggattatcgagacactggacctccactccagcctccatcagacatgtgccgagaatctgatcgcgatccacgggtccctaggatcgcaatcagtctcctcagaggaaatccggcgcctgttgcgtcttctccgcgtggacgagtcagaatccgtgcacccctatgtgacgcctgtaacccgcgccattttaactatggcgcgaaagctgtccctagaatccgctctacagtatttcaatctgtcccatagcatggccgggatcagcgtgccccctatccagaagtggccaggctctgctttctcattctctgcttggttctgtctggaccaggatcagctgaccctcgggatcgctaacaaagggggaaaacgaaagcagctatatagttttttcactggaagcggtatggggttcgaagcctttataactcacagcggcatgctcgtggtggctgtttgtaccaagcgcgagtatgccactgtgatgctccccgatcattccttttgcgactccctgtggcacaatatcacggtggtgcatatgcctggaaagcggcccttcggtcaatcctttgtatacatctacgataacgggcagcagaaggtcagtgctccgctccgtttccctgccatgaatgaacctttcacctcctgttgtattggcagcgccggccagagaaccacaaccccccctccctcacagatcccagacccaccatttagctctccaataacaccacaccgaacgtcctttggtggcatcctaagctccgcttcttggggtggcactattgagaagagtaagttaattactaaactgatctctgcaggtactcaagactcagagtggggctgcccaacgtcactcgagggacagttaggctccgtgatcatcttctatgagcctcttcaaccaccccaggtgaaagctctttacctggcaggtcccaactgcctttctccgtggaagtgtcaggaatccgatatggccgacctgcctggtaacatccttttatactataccgccaaagcctgcaagaactccatttgtttagacctgtcaacaaactgtttgcatgggaggctgaccggaaataaggtcgtgaactgggatattaaagacatcatcaactgcattgggggccttaacgtgttattccccttgcttgaacagatcagccatttctctgaaggccaaattcctgaggagaagaacgagtctactgttccagagagtgtgaccccggtggaaggcgattggttagtatggaccagtacgaaggcatcggagagccggctagaacggaatctggttgccacgttcatacttatcgtgaagcatttcatccaaagacatccaatcaaccaagggaacctaatccactcacacggcgtcgcaacgctgggggccttgcttcagaaagtacctagcaccctgatggacgtgaatgtgctcatggctgtgcaactgctgatagagcaggtgagcctggagaagaatatgcagcttcttcagcagatgtaccaatacttactcttcgatttcaggatatggaaccgtggcgatttcccattccgtattggacatattcagtatctgagcaccataattaaagactcaagacgcgtgtttcgtaaaaaatacggagtgcagtttttgctcgacacccttcgtatctactacggtaatggttgtaaatataacgagctctctttggacgacattcggacaattaggacaagcctctacggcctgatcaaatattttctctgtaagggcgggtctcatgaagaaattcagtcgataatgggctacatcgcagctaccaatgaggaggagcagctctttggcatattggacgtccttttcagccttttacgaactagcccgacgagaggccagctgttcttactgctcttcgaaccaggaaatgctgatatcctgtacgccctgcttctcaaccagaagtactcagatagactacgagaaatcatatttaaaatcatggagcaaatgctgaagtgcactaacgtgtacgagaggtccaagcagcacattcggctaagagaggtgggatactcggggttggggcttctcctgaatgaagctctcgtcaacacttctttgatcaagaatctcactcatcagataattaatactgaccctgtgatcaacttcaaagatctcttgagcgtggtatacatttcccacagagcccacatcaatgtgcgagttgccatatgcagaaaagtcttacagatcttgcagttccagcccgatgcagcccatcaaatcagccagcaggttgggtggcaggacacccttgtgcgactgttcctgaaggccaagtttgaaaatgggaatactcttcataagcacagccgcgccgtgctcatgaaggataatgacaaaaacatgtctacagaggacacgaagaaaaattctgacgagaaaactgacgaagaaaagattacttcgttcgcttcagcgaacgtgtccagcgaccagtggtcactggaggatcggcactctctggactccaacactcctctgttcccagaagattcatcagtgggcgaactgagtttcaaaagtgagaaccaggaagaattctggcattctaacccttctcacctgagcctagacttatccggcattgactcctgtgaaatgagcgattctggatcccaggtgccagactcgcttcctagtacacctagcccagtcgaaagcactaagtcctttagtgtgcatagtgaccgagaaagttctatcacaaacgacatgggcttttctgacgatttctcactgctcgagagccaagagcggtgtgaggaggagctgttacaactgcttactcacatcttgaattatgtgatgtgtaagggcctggaaaaatctgacgacgatacctggatcgagcggggtcaagtgttctccgcactgagtaagccaggaatctcaagcgagctcttgaggccatctgatgagatcaagctgacactgttgcagaaaatgcttgaatgggccataagtgagaatagagaggccaaaacaaacccggtaaccgccgaaaacgcttttcgcttggtgctcattatacaagactttctgcagagcgagggactggtcaacagtaatatgtggacagagaaactgttagaagacatgatgctgctcttcgactgtctgagcgtgtgttattccgagtctcccgtttgggttaaactgagccaaatacagattcagttgctgttaggattcattggtaggggcaacctccaggtatgtgccatggctagcgcaaaactgaacacgctcctccagacgaaagttatagagaatcaggacgaggcctgttatatactgggcaaactcgagcacgtgttgagccagtctattaaagagcagacggagatatacagctttctgattccactagtgcggacgctcgtcagcaaaatttacgagctcttattcatgaatctacatctgccaagcctgccctttaccaacggcagttcatctttcttcgaggacttccaggaatactgtaattccaacgagtggcaagtctatattgagaagtacattgtgccatacatgaaacagtacgaggcacacacattctacgatggacatgagaacatggctctttactggaaagactgttatgaagctctgatggtgaacatgcataaaagggatagagagggcggcgaaagcaaattgaagttccaggaattgtttgtcgaaccatttaatagaaaggcaagacaggaaaatctccgttacaataatatgctgaagcagctcagttcccaacagcttgccactctacggaggtggaaggccatccagctgtacctgacctgtgagcggggcccttgggccaaaagaaagcagaacccaattcactggaagttggccaacgtggagaactattcacggatgagactcaagctcgtgccaaactataatttcaaaacacacgaggaagcctccgcccttcgagataacctgggcatccagcatagccaacctagcagcgacacattacttttagaggtcgtcaagcaggtgaaagtgtctgacatggtcgaggataagctggacctccccgaagaagatattaccgccagggtaaacgtcgacgaaaaggaagaacaggatcagaaagaaaagctcgtactcatggaagattgtgagctgatcacaattattgacgtcatccccgggagactggagataacgacacaacatatatacttctatgacggatctattgaaaaagaagatggagtgggcttcgacttcaagtggccccacagccaaattagggagatccatctgagaaggtataatctacgtaggtcagccctcgagattttccacgttgaccagtcaaactacttcctgaattttaaaaaggaagtccggaataaaatatactcgaggctgctgtccctgcattctccgaacagttattacggatcgaggtccccccaggagctatttaaagcctccggattgacgcagaaatgggtgaatagagaaatttcaaacttcgattatcttattcagattaacaccatggccggcaggacatataacgacctggcccaataccccgtgtttccttggattcttcaggactatacatccgaggagcttgatctgaataatcctgccgtcttcagagacctgtcaaaaccaattggcgttgtaaatgaaaaaaatgcaaaggcaatgcgggagaagtatgagaatttcgaagaccctatggggaccattgataagttccactacggtacgcattactctaacagtgctggcgtgatgcactatctcatccgcgtcgaaccgtttaccactctgcatatacagctccagagcgggaggtttgactgcgcagatagacagttccactctatccctgccacatggcaggccctcatggataatccatacgacgtgaaagaattaatccctgaattcttttacttcccggagtttctagagaaccagaaccagttcaatttggggcgcctgcagatttccaaggaacttgtcaatgacgtgatattgcccaagtgggcaaagtccgcagaggactttatttacaaacacagaaaggcactggagtccgaatatgtttccgctcacctgcacgaatggattgacctgattttcggttacaagcagaggggccccgccgccgtggaagccctcaatgtcttttactactgttcctacgagggagccgtcgacctggacgcgctgacggatgagaaagaacgaaaggcattggagggcatgattaacaatttcggccaaacaccctgccagctgctcaagattaccattagcatgaactatgtgattggcacacacggatggctgccctatgaccgaaatatcagcaattatttcactttcatcaaggaccagaccgtgacgaaccccaagacccagcgtagcattaacgggtcctttgctcccggtctggagatcacgtcaaaacttttcgttgtctctcacgatgctaaactacttttcagcgccgggtactgggacaactccatccaggtcatgagtctgaccaaaggcaaaattatttcgcacattatacgccacatggacattgtgacttgccttgccactgattactgcggcatccacttaattagcggaagccgcgacaccacgtgcatgatctggcagatcacccagcagggtggagtccctgtgggccttgctagcaagccatttcaaatactctatgggcacactaatgaggtactgagcgtaggtatatctactgaactggacatggccgtctccggatcccgcgacgggactgtgatcatacatacgatccctaacttagctataagctgggagggccacatagtggtgtactcatctacagaggagaagaccacccttaaagacaaaaatgccttgcacttatttagtatcaacggtaagtacctgggctcacaaattttaaaggagcaagtctctgacatctgcattattggcgagcacattgtgactggctccattcagggtttcctgagcattagggatctgcattccctgaatctaagtatcaaccctttagctatgcggttacctattcactgcgtgtgtgttacaaaggagtattcccacattctggtggggctcgaggatggcaaattgatcgtagtgggagtggggaagccggccgaaatgagaagcgggcagctgagcaggaaattttggggctcatctaagaggttaagccagatctccgccggtgagactgagtacaacacgcaggactcgaagtag

SEQ ID NO: 42892 - DNA, 8085 bp, Artificial Sequence
  derived and/or modified sequence
atggcatctagagagcgcctgtttgagttgtggatgctgtattgcacaaagaaggatcctgattatctgaaactctggctagatacctttgtcagttcttacgaacagtttctggacgtggacttcgagaaactacccacacgagttgacgatatgccaccaggaattagcctgctgcccgataatattctgcaagttctccgaatccagttactccagtgtgtccagaagatggcagacggcctcgaggagcagcaacaagctctgtccattctgcttgtgaagttctttatcatcctgtgcagaaatctgagcaacgtggaagagattggtacatgcagctacataaactatgtgattaccatgaccactctgtacattcaacagcttaagtcaaaaaaaaaagagaaagaaatggctgaccaaacgtgtatagaagaatttgtaatccacgctttggccttttgcgagtccctgtatgacccttatcgaaactggcggcatagaatttctggtcgcatcttgtctacggttgaaaagtcacgacagaagtacaaaccagccagccttaccgtggaattcgttccgtttttctaccaatgctttcaggagagcgaacaccttaaggagtccctgaagtgctgcttactgcatctgtttggcgcaatcgtggcaggtggccagcgaaacgctctacaggcaataagccctgcaactatggaagtcctgatgagggtgctggccgattgtgattcttgggaagacggggatccagaggaggtgggcaggaaagccgagctaactctcaaatgccttaccgaggtggtacacatactactcagttcaaatagcgaccaaaggcaggtggagacatccacaattttagagaattacttcaagctactgaattctgaccactctgccctccccaatcagcgcagaagcaggcagtgggagaaccggtttatcgctctgcagataaagatgctaaacactattacagcgatgctggactgtaccgataggcccgtacttcaagccatcttcctgaactctaactgttttgagcacttgataaggctgctccaaaattgcaaggttttccagggccaactggactgcctggcgatatctactattcaggccctgaccgcggttatgaacaagtctcccgcagcaaaagaggtattcaaagaacggattggatatacccacatgctcgaggtgttgaaaagcttgggccagcccccactggaactgctaaaggagctcatgaatatggctgtggaaggtgatcacacgtccgtcggcatcttgggcatctctaacgttcaaccactcctgctcctgattcagtggctgccggagttgcagtcacatgacctgcagatattcatctctgactggctcaaacggatctgctgtatcaataggcaatcacgaacgacctgcgtcaatgcgaacatggggattcggattatcgagacattggatttacattcctccctccatcagacctgtgctgagaacctgattgcaatacatggatctctgggaagccagtccgtaagtagcgaggagattaggcggctgctccggctgctgagagttgacgaatcagagtcagttcacccttacgtaacacccgtgacaagggctatcttgactatggcgcggaagctgtcactcgagtctgccctgcagtattttaacctttcccacagcatggccggtatctcagtgccacctattcagaaatggccaggcagtgccttcagtttctccgcttggttttgtctggatcaggatcagctgacacttggaattgctaacaaggggggcaaacggaagcaactgtactccttttttaccggcagcgggatgggttttgaggcatttatcacccattcgggcatgctcgtggtagctgtctgcactaaaagggagtatgccacggtgatgctccctgaccattcattctgcgactccctctggcacaatattaccgttgtccacatgcccggaaaaagaccatttggccaatcatttgtgtacatatacgacaatggacagcagaaagtctctgcaccattgaggttccctgccatgaacgagccttttacctcttgctgtatcggctcagcagggcaaagaactactactccacctcctagccaaatacccgacccaccgttttcttctccaatcactccacatcgcaccagtttcggcggaatactgtcgtcagcctcatggggaggaacaatcgagaagtctaaactaatcacgaagctgatatctgcgggtacccaagatagtgagtggggttgccccacctccttggagggccaacttggaagcgtcattatcttttatgagccgctacagccccctcaggtgaaagccttatatctggccggccctaattgcttgtcaccctggaaatgtcaggaaagtgatatggctgaccttccgggaaatatcttgctgtattataccgcaaaagcctgtaaaaatagcatatgtctggacctgtccacaaattgtctccacggccggttgactggcaacaaggtggtgaattgggacattaaagacatcatcaattgcataggcggacttaacgtgcttttcccacttttagagcaaatcagtcatttctctgagggacagattccagaggaaaaaaacgagagcacggtgccagagagcgtcacacccgtcgaaggggattggttggtctggacttctactaaagcgagcgagtcaaggctggagagaaatctggttgcgacctttatcctgatcgtgaaacactttatccagagacaccccattaaccagggtaatttaatccatagtcacggagtcgctacgttgggagcactgctgcagaaagtcccaagcactctgatggacgttaatgtcctcatggcggtgcagttgctcattgaacaggtgtccctcgaaaaaaacatgcagcttctgcaacagatgtaccagtacttattattcgatttccgcatatggaataggggcgacttcccattccgcataggccacattcaatacttgagcacaattatcaaggattcaaggagggttttccggaagaagtacggagtccagttcctccttgacaccctccgcatttactatggcaatggatgcaaatataacgagctatcgttggatgacatccgcacaatacgcacgagtttgtacggcttaattaagtatttcctatgcaaggggggcagtcacgaggaaatacagtcaataatggggtatattgcggctaccaatgaggaggaacagttatttggcatcctcgacgtgctgttcagtcttctgcgaaccagcccaaccaggggacagctctttcttttactgtttgagccaggcaatgcagatattctgtatgccctcctgttgaatcagaaatatagcgaccggctgcgcgagatcatatttaagatcatggaacagatgctgaagtgtacaaatgtttacgagcggagcaaacaacacatccggttgcgggaagttggctactcaggactgggcctgctgctgaatgaggcgctggtgaacacgtcccttataaagaacctcactcatcagattatcaacaccgatcccgtgatcaactttaaggacctgctctctgtagtgtacataagccaccgtgcccacatcaacgttagagtggctatctgtaggaaagtgttacagatcctccagttccagcccgatgcagcacaccagatctcacaacaggttggatggcaggataccctcgtgcgactgtttttgaaggcaaaatttgagaacggtaataccctccacaaacatagccgagcagtcctcatgaaggacaacgacaagaacatgtccaccgaagatactaagaaaaatagtgatgagaagaccgacgaggagaaaatcacgtcattcgcctccgccaatgtgtcctccgatcagtggagtctcgaagatagacactccttagacagcaacacacccctctttcctgaggactctagtgttggcgaactttcttttaagtctgaaaaccaagaagagttctggcactctaaccccagtcacctttctctggacctttctggtatcgactcctgcgagatgagcgactccggatcacaagtgcccgattctttaccatcaactccctcaccggtcgagtcaactaaatccttttctgtccattcagaccgcgagagtagcatcacaaatgatatgggcttttctgatgacttttccttgctggagtcgcaggaacggtgtgaggaggagttgttacaactgctcacgcatatccttaattatgtgatgtgcaagggcctggagaagtccgatgatgacacatggatcgagagaggccaggtgttcagcgccctgtccaaaccagggatatcgagcgaattgctccgacctagtgacgaaattaagctgaccttgctccagaagatgctggaatgggctatctcagaaaacagggaagccaaaactaaccctgtcaccgccgagaacgccttccggcttgtactcataatccaggattttctccagtctgaaggactggttaactcaaacatgtggacagaaaaactcctggaggatatgatgctgctgtttgattgtttaagcgtgtgttatagcgagtcgcccgtctgggtgaaactgtcacagatccagattcagttgctcctgggcttcattgggaggggcaacctgcaggtgtgcgctatggcctcggctaagctcaatactctgctgcagacgaaagtgattgaaaatcaggatgaggcctgttatatcctgggaaagttggaacacgtgctgtcacagtcaataaaagagcagacagagatctattcattcttgattcccctggtcaggactctggtgtctaagatctatgagctcttgtttatgaacctgcatcttccctctctcccctttaccaatggtagctctagcttcttcgaggattttcaggagtactgcaacagtaatgagtggcaggtttatatcgaaaaatacatcgtgccctacatgaagcagtatgaggcccacaccttttacgacgggcacgaaaacatggccttgtactggaaggactgttatgaagctcttatggtgaacatgcacaaacgtgatagagaaggcggagagtccaagttgaaatttcaggagctctttgtggagccctttaaccgcaaagcccggcaagagaatttgcggtacaacaacatgctcaagcagctttcttctcagcagctcgccacccttcgtagatggaaagccatacagctctacctgacttgcgagcgcggcccctgggccaaacggaagcagaatcctatccactggaaattggccaatgtggaaaactatagtcgaatgcgcctgaaactcgtcccaaactataactttaagacccatgaagaggcctccgctctccgggacaaccttggtatccaacattcccagccctcgtctgataccctgctgctggaggtcgtgaaacaggtaaaggtttctgacatggttgaagataaactcgacctgcccgaagaggacatcactgcccgtgtaaacgtggatgaaaaagaggaacaggatcagaaggaaaaactggtgttgatggaggactgcgagctcatcacaatcatcgatgtaatacccgggcgcttggagatcactacccagcatatctacttttacgatggtagcatcgaaaaggaggatggcgtcggtttcgatttcaagtggcctcacagccagataagagaaattcatctcagacgctataatttgcgacggtccgcattagaaatctttcacgttgaccagagtaattactttctgaactttaaaaaagaagtcaggaataaaatctactccaggctgctctctctgcattctccaaacagctattacggatcacgctccccacaggaactgtttaaagcgagtggattgacacagaagtgggtcaatagggaaatcagcaactttgactatctgattcaaattaacaccatggcgggtagaacctataacgacctggcacagtaccccgtgtttccctggatactgcaagattacacttctgaagagttggaccttaataatccagccgtattcagagatttgtccaaacctataggcgtcgttaacgagaagaatgcaaaggctatgagagagaagtacgaaaattttgaggatcccatgggaaccattgataagttccattatgggacacattacagcaatagcgcaggggtgatgcattacttaataagagtcgaaccatttaccactctccacatccagctgcaaagtgggagattcgattgcgctgataggcagttccactcaattcccgctacatggcaggccctgatggataacccttatgatgtgaaggaactgatcccggagttcttctatttccccgagtttctggaaaaccaaaaccaatttaacctagggaggctccagatttccaaggaactcgtgaacgatgtgatactgccgaaatgggccaaaagcgcagaagactttatctacaagcatagaaaagcactggagtctgagtatgttagcgcacacctacacgagtggattgatttaatcttcggttataaacaaagaggcccagctgccgttgaggctctgaatgtgttttactactgtagctacgagggcgcagtggatctggacgcgctaaccgatgagaaggaacgaaaggctctcgagggtatgatcaacaacttcggccaaacgccttgtcaactgctaaaggagcctcaccccccacggctgtcggctgaggaggccgttcagaagccaactaagattgacacttctaccctgaatttattccagcacctgcccgagctgaagtcttttttcattgaaggaatcagcgacggaattcccctactcaaggccacgatccctaagaatcagtaccggagtttcatgagtcaaggatcaccggagctcctgatcacaatttccatgaactatgtgattgggacccatggatggcttccttatgacagaaatatatctaactactttacttttatcaaagaccagacggtcacaaacccaaaaacacagcgatccattaatggctccttcgcacccggcctggaaatcacctctaagttattcgtggtgtcccatgatgctaaactactcttctctgctggatattgggacaattcgatccaggtcatgtccctgactaagggcaaaatcatcagccacattatccggcacatggacattgtgacgtgtttggccaccgactactgcggcattcaccttataagtggatcccgcgacactacttgcatgatctggcagatcactcagcagggcggcgtgcctgtgggtctggcgagcaaacctttccaaattttatacggccatactaatgaagtgttgagtgtaggtattagcaccgaactggacatggccgtttcagggagtagggatgggacagtgatcatccatactattcagaaaggccaatacatgcgcacgctccgccccccctgtgagtccagtctgttccttacaatcccaaatttagccatttcctgggaaggacacatagtggtctactcatcaacagaagaaaagacaacactcaaggacaaaaatgccctccatttgtttagcatcaacgggaaatatctggggtctcagattctcaaggagcaggtgagtgacatatgcatcattggtgagcatatcgtgaccggtagtatccaaggatttctttccatacgggacctgcactccctcaacttgagtatcaatcctctggcaatgaggctgccaatccactgtgtgtgcgtgacaaaagaatatagccacatcctcgtcgggcttgaagatggcaaactgatcgtggtgggggtcggtaagccagcagagatgaggtctgggcagctttccagaaaattctggggaagctctaagaggttatctcagatctccgcgggagaaacagaatacaatacccaagattccaaatag

SEQ ID NO: 42893 - DNA, 7815 bp, Artificial Sequence
  derived and/or modified sequence
atggccagccgggagcggctgtttgagctgtggatgctgtactgcaccaagaaggaccctgactacctgaagctgtggctggacacctttgtgtcctcctatgagcagttcctggatgtggactttgagaagctgcccaccagggtggatgacatgcctcctggcatcagcctgctgcctgacaacatcctgcaggtgctgcgcatccagctgctgcagtgtgtgcagaagatggctgatggcctggaggagcagcagcaggccctgagcatcctgctggtgaagttcttcatcatcctgtgcaggaacctgagcaatgtggaggagatcggcacctgcagctacatcaactacgtgatcaccatgaccaccctgtacatccagcagctgaagagcaagaagaaggagaaggagatggctgaccagacctgcatcgaggagtttgtgattcatgccctggccttctgtgagagcctgtatgacccctacagaaactggaggcaccgcatcagcggccgcatcctgagcacagtggagaagagccggcagaagtacaagccagccagcctgactgtggagtttgtgcccttcttctaccagtgcttccaggagagcgagcacctgaaggagagcctgaagtgctgcctgctgcacctgtttggagccatcgtggccggcggccagagaaatgccctgcaggccatcagccctgccaccatggaggtgctgatgagggtgctggccgactgtgacagctgggaggatggagaccctgaggaggtgggcaggaaggccgagctgaccctgaagtgcctgacagaggtggtgcacatcctgctgagcagcaacagcgaccagaggcaggtggagaccagcaccatcctggagaactacttcaagctgctgaacagcgaccacagcgccctgcccaaccagaggaggagccggcagtgggagaaccgcttcatcgccctgcagatcaagatgctgaacaccatcacagccatgctggactgcacagacaggcctgtgctgcaggccatcttcctgaacagcaactgctttgagcacctgatccggctgctgcagaactgcaaggtgttccagggccagctggactgcctggccatcagcaccatccaggccctgacagctgtgatgaacaagagccctgctgccaaggaggtgttcaaggagagaattggctacacccacatgctggaggtgctgaagagcctgggccagccccccctggagctgctgaaggagctgatgaacatggctgtggagggggaccacacctctgtgggcatcctgggcatcagcaatgtgcagcccctgctgctgctgatccagtggctgcctgagctgcagagccatgacctgcagatcttcatcagtgactggctgaagaggatctgctgcatcaaccggcagagcaggaccacctgtgtgaatgccaacatgggcatccgcatcatcgagaccctggacctgcacagcagcctgcaccagacctgtgctgaaaatctcatcgccatccacggcagcctgggcagccagagcgtgtcctctgaggagatccggcggctgctgcggctgctgcgggtggatgagagcgagagcgtgcacccctacgtgacccctgtgacccgggccatcctgaccatggccaggaagctgagcctggagagcgccctgcagtacttcaacctgagccacagcatggccggcatctctgtgccccccatccagaagtggccaggcagcgccttctccttcagcgcctggttctgcctggaccaggaccagctgaccctgggcatcgccaacaagggcggcaagaggaagcagctgtacagcttcttcaccggcagcggcatgggctttgaggccttcatcacccacagcggcatgctggtggtggccgtgtgcaccaagcgggagtatgccaccgtgatgctgcctgaccacagcttctgtgacagcctgtggcacaacatcaccgtggtgcacatgcctgggaagaggcccttcggccagagctttgtgtacatctatgacaatggccagcagaaggtgtctgcccccctgcgcttccctgccatgaatgagcccttcaccagctgctgcatcggcagcgctggccagaggaccaccaccccaccacccagccagatcccagacccccccttcagcagccccatcaccccccacaggaccagctttggaggcatcctgagcagcgcctcctggggcggcaccatcgagaagagcaagctgatcaccaagctgatctctgctggcacccaggacagcgagtggggctgccccaccagcctggagggccagctgggcagcgtcatcatcttctatgagcccctgcagcccccccaggtgaaggccctgtacctggccggccccaactgcctgagcccctggaagtgccaggagagtgacatggctgacctgcccggcaacatcctgctgtactacacagccaaggcctgcaagaacagcatctgcctggacctgagcaccaactgcctgcacggccgcctgactggaaacaaggtggtgaactgggacatcaaggacatcatcaactgcattggaggcctgaatgtgctcttccccctgctggagcagatcagccacttcagcgagggccagatccctgaggagaagaatgaaagcacagtgcctgagagcgtgacccctgtggagggggactggctggtgtggaccagcaccaaggccagcgagagccggctggagaggaacctggtggccaccttcatcctgattgtgaagcacttcatccagaggcaccccatcaaccagggcaacctgatccacagccatggagtggccaccctgggcgccctgctgcagaaggtgcccagcaccctgatggatgtgaatgtgctgatggctgtgcagctgctgattgagcaggtgtccctggagaagaacatgcagctgctgcagcagatgtaccagtacctgctgtttgacttccgcatctggaacagaggagacttccccttcagaattggccacatccagtacctgagcaccatcatcaaggacagcagaagagtcttcaggaagaagtatggagtgcagttcctgctggacaccctgcgcatctactatggaaatggctgcaagtacaatgagctgagcctggatgacatccgcaccatccgcaccagcctgtatggcctcatcaagtacttcctgtgcaagggcggcagccatgaggagatccagagcatcatgggctacatcgccgccaccaatgaggaggagcagctgtttggcatcctggatgtgctcttcagcctgctgcggaccagccccacccggggccagctgttcctgctgctgtttgagcctggaaatgctgacatcctgtatgccctgctgctgaaccagaagtacagcgaccggctgcgggagatcatcttcaagatcatggagcagatgctgaagtgcaccaacgtgtatgaaagaagcaagcagcacatccggctgcgggaggtgggctacagcggcctgggcctgctgctgaatgaggccctggtgaacaccagcctcatcaagaacctgacccaccagatcatcaacacagaccccgtcatcaacttcaaggacctgctgtctgtggtgtacatcagccaccgggcccacatcaacgtgcgggtggccatctgcaggaaggtgctgcagatcctgcagttccagccagatgctgcccaccagatcagccagcaggtgggctggcaggacaccctggtgcggctcttcctgaaggccaagtttgaaaatggaaacaccctgcacaagcacagcagagctgtgctgatgaaggacaatgacaagaacatgagcacagaggacaccaagaagaacagtgatgagaagacagatgaggagaagatcaccagctttgccagcgccaacgtgtccagtgaccagtggagcctggaggacagacacagcctggacagcaacacccccctcttccctgaggacagctctgtgggggagctgtccttcaagtctgagaaccaggaggagttctggcacagcaaccccagccacctgagcctggacctgagcggcatcgacagctgtgagatgtctgacagcggcagccaggtgcctgacagcctgcccagcacccccagccctgtggagagcaccaagagcttctctgtgcacagcgaccgggagagcagcatcaccaatgacatgggcttcagtgatgacttcagcctgctggagagccaggagcgctgtgaggaggagctgctgcagctgctgacccacatcctgaactacgtgatgtgcaagggcctggagaagagtgatgatgacacctggattgagcggggccaggtgttcagcgccctgagcaagccaggcatcagcagcgagctgctgcggcccagtgatgagatcaagctgaccctgctgcagaagatgctggagtgggccatcagtgaaaatcgggaggccaagaccaaccctgtgacagcagaaaatgccttccggctggtgctgatcatccaggacttcctgcagagcgagggcctggtgaacagcaacatgtggacagagaagctgctggaggacatgatgctgctgtttgactgcctgtctgtgtgctacagcgagagccctgtgtgggtgaagctgagccagatccagatccagctgctgctgggcttcatcggccggggcaacctgcaggtgtgtgccatggccagcgccaagctgaacaccctgctgcagaccaaggtgattgagaaccaggatgaggcctgctacatcctgggcaagctggagcacgtgctgagccagagcatcaaggagcagacagagatctacagcttcctgatccccctggtgaggaccctggtgtccaagatctatgagctgctcttcatgaacctgcacctgcccagcctgcccttcaccaacggcagcagcagcttctttgaggacttccaggagtactgcaacagcaatgagtggcaggtgtacatcgagaagtacatcgtgccctacatgaagcagtatgaggcccacaccttctatgatggccacgagaacatggccctgtactggaaggactgctatgaggccctgatggtgaacatgcacaagagggaccgggagggcggggagagcaagctgaagttccaggagctgtttgtggagcccttcaacaggaaggcccggcaggagaacctgcgctacaacaacatgctgaagcagctgagcagccagcagctggccaccctgcggcgctggaaggccatccagctgtacctgacctgtgagcggggcccctgggccaagaggaagcagaaccccatccactggaagctggccaacgtggagaactacagcaggatgaggctgaagctggtgcccaactacaacttcaagacccatgaggaggccagcgccctgcgggacaacctgggcatccagcacagccagcccagcagtgacaccctgctgctggaggtggtgaagcaggtgaaggtgtctgacatggtggaggacaagctggacctgcctgaggaggacatcacagcccgggtgaatgtggatgagaaggaggagcaggaccagaaggagaagctggtgctgatggaggactgtgagctgatcaccatcattgatgtgattcctggccgcctggagatcaccacccagcacatctacttctatgatggcagcattgagaaggaggatggagtgggctttgacttcaagtggccccacagccagatccgggagatccacctgcggcgctacaacctgcggcgcagcgccctggagatcttccacgtggaccagagcaactacttcctgaacttcaagaaggaggtgaggaacaagatctacagccggctgctgagcctgcacagccccaacagctactacggcagccgcagcccccaggagctgttcaaggccagcggcctgacccagaagtgggtgaaccgggagatcagcaactttgactacctgatccagatcaacaccatggccggccgcacctacaatgacctggcccagtaccctgtgttcccctggatcctgcaggactacaccagcgaggagctggacctgaacaacccagctgtgttccgggacctgagcaagcccatcggcgtggtgaatgagaagaatgccaaggccatgagggagaagtatgaaaattttgaggaccccatgggcaccatcgacaagttccactacggcacccactacagcaacagcgctggggtgatgcactacctgatccgggtggagcccttcaccaccctgcacatccagctgcagagcggccgctttgactgtgccgaccggcagttccacagcatcccagccacctggcaggccctgatggacaacccctatgatgtgaaggagctgatccctgagttcttctacttccctgagttcctggagaaccagaaccagttcaacctgggccgcctgcagatcagcaaggagctggtgaatgatgtgatcctgcccaagtgggccaagtctgctgaggacttcatctacaagcacaggaaggccctggagagtgaatatgtgtctgcccacctgcacgagtggattgacctgatcttcggctacaagcagaggggccctgctgctgtggaggccctgaatgtgttctactactgcagctatgagggcgctgtggacctggatgccctgacagatgagaaggagaggaaggccctggagggcatgatcaacaactttggccagaccccctgccagctgctgaagatcaccatctccatgaactacgtgattggcacccacggctggctgccctatgacaggaacatcagcaactacttcaccttcatcaaggaccagacagtgaccaaccccaagacccagaggagcatcaatggcagctttgcccctggcctggagatcaccagcaagctgtttgtggtgtcccatgatgccaagctgctcttctctgctggctactgggacaacagcatccaggtgatgagcctgaccaagggcaagatcatcagccacatcatccgccacatggacatcgtgacctgcctggccacagactactgcggcatccacctgatcagcggcagccgggacaccacctgcatgatctggcagatcacccagcagggcggcgtgcctgtgggcctggccagcaagcccttccagatcctgtatggccacaccaatgaggtgctgtctgtgggcatcagcacagagctggacatggctgtgtctggcagcagagatggcaccgtcatcatccacaccatccccaacctggccatctcctgggagggccacatcgtggtgtacagcagcacagaggagaagaccaccctgaaggacaagaatgccctgcacctgttcagcatcaatggcaagtacctgggcagccagatcctgaaggagcaggtgtctgacatctgcatcatcggggagcacatcgtgacaggcagcatccagggcttcctgagcatccgggacctgcacagcctgaacctgagcatcaaccccctggccatgaggctgcccatccactgtgtgtgtgtgaccaaggagtacagccacatcctggtgggcctggaggatggcaagctgattgtggtgggcgtgggcaagccagctgagatgaggagcggccagctgagcaggaagttctggggcagcagcaagaggctgagccagatctctgctggggagacagagtacaacacccaggacagcaagtag

SEQ ID NO: 42894 - DNA, 8085 bp, Artificial Sequence
  derived and/or modified sequence
atggccagccgggagcggctgtttgagctgtggatgctgtactgcaccaagaaggaccctgactacctgaagctgtggctggacacctttgtgtcctcctatgagcagttcctggatgtggactttgagaagctgcccaccagggtggatgacatgcctcctggcatcagcctgctgcctgacaacatcctgcaggtgctgcgcatccagctgctgcagtgtgtgcagaagatggctgatggcctggaggagcagcagcaggccctgagcatcctgctggtgaagttcttcatcatcctgtgcaggaacctgagcaatgtggaggagatcggcacctgcagctacatcaactacgtgatcaccatgaccaccctgtacatccagcagctgaagagcaagaagaaggagaaggagatggctgaccagacctgcatcgaggagtttgtgattcatgccctggccttctgtgagagcctgtatgacccctacagaaactggaggcaccgcatcagcggccgcatcctgagcacagtggagaagagccggcagaagtacaagccagccagcctgactgtggagtttgtgcccttcttctaccagtgcttccaggagagcgagcacctgaaggagagcctgaagtgctgcctgctgcacctgtttggagccatcgtggccggcggccagagaaatgccctgcaggccatcagccctgccaccatggaggtgctgatgagggtgctggccgactgtgacagctgggaggatggagaccctgaggaggtgggcaggaaggccgagctgaccctgaagtgcctgacagaggtggtgcacatcctgctgagcagcaacagcgaccagaggcaggtggagaccagcaccatcctggagaactacttcaagctgctgaacagcgaccacagcgccctgcccaaccagaggaggagccggcagtgggagaaccgcttcatcgccctgcagatcaagatgctgaacaccatcacagccatgctggactgcacagacaggcctgtgctgcaggccatcttcctgaacagcaactgctttgagcacctgatccggctgctgcagaactgcaaggtgttccagggccagctggactgcctggccatcagcaccatccaggccctgacagctgtgatgaacaagagccctgctgccaaggaggtgttcaaggagagaattggctacacccacatgctggaggtgctgaagagcctgggccagccccccctggagctgctgaaggagctgatgaacatggctgtggagggggaccacacctctgtgggcatcctgggcatcagcaatgtgcagcccctgctgctgctgatccagtggctgcctgagctgcagagccatgacctgcagatcttcatcagtgactggctgaagaggatctgctgcatcaaccggcagagcaggaccacctgtgtgaatgccaacatgggcatccgcatcatcgagaccctggacctgcacagcagcctgcaccagacctgtgctgaaaatctcatcgccatccacggcagcctgggcagccagagcgtgtcctctgaggagatccggcggctgctgcggctgctgcgggtggatgagagcgagagcgtgcacccctacgtgacccctgtgacccgggccatcctgaccatggccaggaagctgagcctggagagcgccctgcagtacttcaacctgagccacagcatggccggcatctctgtgccccccatccagaagtggccaggcagcgccttctccttcagcgcctggttctgcctggaccaggaccagctgaccctgggcatcgccaacaagggcggcaagaggaagcagctgtacagcttcttcaccggcagcggcatgggctttgaggccttcatcacccacagcggcatgctggtggtggccgtgtgcaccaagcgggagtatgccaccgtgatgctgcctgaccacagcttctgtgacagcctgtggcacaacatcaccgtggtgcacatgcctgggaagaggcccttcggccagagctttgtgtacatctatgacaatggccagcagaaggtgtctgcccccctgcgcttccctgccatgaatgagcccttcaccagctgctgcatcggcagcgctggccagaggaccaccaccccaccacccagccagatcccagacccccccttcagcagccccatcaccccccacaggaccagctttggaggcatcctgagcagcgcctcctggggcggcaccatcgagaagagcaagctgatcaccaagctgatctctgctggcacccaggacagcgagtggggctgccccaccagcctggagggccagctgggcagcgtcatcatcttctatgagcccctgcagcccccccaggtgaaggccctgtacctggccggccccaactgcctgagcccctggaagtgccaggagagtgacatggctgacctgcccggcaacatcctgctgtactacacagccaaggcctgcaagaacagcatctgcctggacctgagcaccaactgcctgcacggccgcctgactggaaacaaggtggtgaactgggacatcaaggacatcatcaactgcattggaggcctgaatgtgctcttccccctgctggagcagatcagccacttcagcgagggccagatccctgaggagaagaatgaaagcacagtgcctgagagcgtgacccctgtggagggggactggctggtgtggaccagcaccaaggccagcgagagccggctggagaggaacctggtggccaccttcatcctgattgtgaagcacttcatccagaggcaccccatcaaccagggcaacctgatccacagccatggagtggccaccctgggcgccctgctgcagaaggtgcccagcaccctgatggatgtgaatgtgctgatggctgtgcagctgctgattgagcaggtgtccctggagaagaacatgcagctgctgcagcagatgtaccagtacctgctgtttgacttccgcatctggaacagaggagacttccccttcagaattggccacatccagtacctgagcaccatcatcaaggacagcagaagagtcttcaggaagaagtatggagtgcagttcctgctggacaccctgcgcatctactatggaaatggctgcaagtacaatgagctgagcctggatgacatccgcaccatccgcaccagcctgtatggcctcatcaagtacttcctgtgcaagggcggcagccatgaggagatccagagcatcatgggctacatcgccgccaccaatgaggaggagcagctgtttggcatcctggatgtgctcttcagcctgctgcggaccagccccacccggggccagctgttcctgctgctgtttgagcctggaaatgctgacatcctgtatgccctgctgctgaaccagaagtacagcgaccggctgcgggagatcatcttcaagatcatggagcagatgctgaagtgcaccaacgtgtatgaaagaagcaagcagcacatccggctgcgggaggtgggctacagcggcctgggcctgctgctgaatgaggccctggtgaacaccagcctcatcaagaacctgacccaccagatcatcaacacagaccccgtcatcaacttcaaggacctgctgtctgtggtgtacatcagccaccgggcccacatcaacgtgcgggtggccatctgcaggaaggtgctgcagatcctgcagttccagccagatgctgcccaccagatcagccagcaggtgggctggcaggacaccctggtgcggctcttcctgaaggccaagtttgaaaatggaaacaccctgcacaagcacagcagagctgtgctgatgaaggacaatgacaagaacatgagcacagaggacaccaagaagaacagtgatgagaagacagatgaggagaagatcaccagctttgccagcgccaacgtgtccagtgaccagtggagcctggaggacagacacagcctggacagcaacacccccctcttccctgaggacagctctgtgggggagctgtccttcaagtctgagaaccaggaggagttctggcacagcaaccccagccacctgagcctggacctgagcggcatcgacagctgtgagatgtctgacagcggcagccaggtgcctgacagcctgcccagcacccccagccctgtggagagcaccaagagcttctctgtgcacagcgaccgggagagcagcatcaccaatgacatgggcttcagtgatgacttcagcctgctggagagccaggagcgctgtgaggaggagctgctgcagctgctgacccacatcctgaactacgtgatgtgcaagggcctggagaagagtgatgatgacacctggattgagcggggccaggtgttcagcgccctgagcaagccaggcatcagcagcgagctgctgcggcccagtgatgagatcaagctgaccctgctgcagaagatgctggagtgggccatcagtgaaaatcgggaggccaagaccaaccctgtgacagcagaaaatgccttccggctggtgctgatcatccaggacttcctgcagagcgagggcctggtgaacagcaacatgtggacagagaagctgctggaggacatgatgctgctgtttgactgcctgtctgtgtgctacagcgagagccctgtgtgggtgaagctgagccagatccagatccagctgctgctgggcttcatcggccggggcaacctgcaggtgtgtgccatggccagcgccaagctgaacaccctgctgcagaccaaggtgattgagaaccaggatgaggcctgctacatcctgggcaagctggagcacgtgctgagccagagcatcaaggagcagacagagatctacagcttcctgatccccctggtgaggaccctggtgtccaagatctatgagctgctcttcatgaacctgcacctgcccagcctgcccttcaccaacggcagcagcagcttctttgaggacttccaggagtactgcaacagcaatgagtggcaggtgtacatcgagaagtacatcgtgccctacatgaagcagtatgaggcccacaccttctatgatggccacgagaacatggccctgtactggaaggactgctatgaggccctgatggtgaacatgcacaagagggaccgggagggcggggagagcaagctgaagttccaggagctgtttgtggagcccttcaacaggaaggcccggcaggagaacctgcgctacaacaacatgctgaagcagctgagcagccagcagctggccaccctgcggcgctggaaggccatccagctgtacctgacctgtgagcggggcccctgggccaagaggaagcagaaccccatccactggaagctggccaacgtggagaactacagcaggatgaggctgaagctggtgcccaactacaacttcaagacccatgaggaggccagcgccctgcgggacaacctgggcatccagcacagccagcccagcagtgacaccctgctgctggaggtggtgaagcaggtgaaggtgtctgacatggtggaggacaagctggacctgcctgaggaggacatcacagcccgggtgaatgtggatgagaaggaggagcaggaccagaaggagaagctggtgctgatggaggactgtgagctgatcaccatcattgatgtgattcctggccgcctggagatcaccacccagcacatctacttctatgatggcagcattgagaaggaggatggagtgggctttgacttcaagtggccccacagccagatccgggagatccacctgcggcgctacaacctgcggcgcagcgccctggagatcttccacgtggaccagagcaactacttcctgaacttcaagaaggaggtgaggaacaagatctacagccggctgctgagcctgcacagccccaacagctactacggcagccgcagcccccaggagctgttcaaggccagcggcctgacccagaagtgggtgaaccgggagatcagcaactttgactacctgatccagatcaacaccatggccggccgcacctacaatgacctggcccagtaccctgtgttcccctggatcctgcaggactacaccagcgaggagctggacctgaacaacccagctgtgttccgggacctgagcaagcccatcggcgtggtgaatgagaagaatgccaaggccatgagggagaagtatgaaaattttgaggaccccatgggcaccatcgacaagttccactacggcacccactacagcaacagcgctggggtgatgcactacctgatccgggtggagcccttcaccaccctgcacatccagctgcagagcggccgctttgactgtgccgaccggcagttccacagcatcccagccacctggcaggccctgatggacaacccctatgatgtgaaggagctgatccctgagttcttctacttccctgagttcctggagaaccagaaccagttcaacctgggccgcctgcagatcagcaaggagctggtgaatgatgtgatcctgcccaagtgggccaagtctgctgaggacttcatctacaagcacaggaaggccctggagagtgaatatgtgtctgcccacctgcacgagtggattgacctgatcttcggctacaagcagaggggccctgctgctgtggaggccctgaatgtgttctactactgcagctatgagggcgctgtggacctggatgccctgacagatgagaaggagaggaaggccctggagggcatgatcaacaactttggccagaccccctgccagctgctgaaggagccccaccccccccggctgtctgctgaggaggccgtgcagaagcccaccaagattgacaccagcaccctgaacctcttccagcacctgcctgagctgaagagcttcttcatcgagggcatcagtgatggcatccccctgctgaaggccaccatccccaagaaccagtaccgctccttcatgagccagggcagccctgagctgctgatcaccatctccatgaactacgtgattggcacccacggctggctgccctatgacaggaacatcagcaactacttcaccttcatcaaggaccagacagtgaccaaccccaagacccagaggagcatcaatggcagctttgcccctggcctggagatcaccagcaagctgtttgtggtgtcccatgatgccaagctgctcttctctgctggctactgggacaacagcatccaggtgatgagcctgaccaagggcaagatcatcagccacatcatccgccacatggacatcgtgacctgcctggccacagactactgcggcatccacctgatcagcggcagccgggacaccacctgcatgatctggcagatcacccagcagggcggcgtgcctgtgggcctggccagcaagcccttccagatcctgtatggccacaccaatgaggtgctgtctgtgggcatcagcacagagctggacatggctgtgtctggcagcagagatggcaccgtcatcatccacaccatccagaagggccagtacatgaggaccctgcggcccccctgtgagagcagcctcttcctgaccatccccaacctggccatctcctgggagggccacatcgtggtgtacagcagcacagaggagaagaccaccctgaaggacaagaatgccctgcacctgttcagcatcaatggcaagtacctgggcagccagatcctgaaggagcaggtgtctgacatctgcatcatcggggagcacatcgtgacaggcagcatccagggcttcctgagcatccgggacctgcacagcctgaacctgagcatcaaccccctggccatgaggctgcccatccactgtgtgtgtgtgaccaaggagtacagccacatcctggtgggcctggaggatggcaagctgattgtggtgggcgtgggcaagccagctgagatgaggagcggccagctgagcaggaagttctggggcagcagcaagaggctgagccagatctctgctggggagacagagtacaacacccaggacagcaagtag

SEQ ID NO: 42895 - DNA, 7815 bp, Artificial Sequence
  derived and/or modified sequence
atggccagccgggagcggctgttcgagctgtggatgctgtactgcactaaaaaggatccggactatctgaagctgtggctcgacactttcgtttccagctacgaacagtttctggacgtggacttcgagaaacttccaacacgcgtcgacgacatgccacccgggatcagcctcctgcccgacaatatactccaggttctgcgaatccagcttcttcagtgcgtgcagaaaatggccgacggccttgaggaacaacaacaggctttgtcaattttattggtcaagttttttattatactctgtaggaacctgtcaaacgtggaggagataggcacctgctcttacatcaattacgtgatcactatgactaccctttatatccagcagctaaagagcaagaagaaggagaaggagatggcagaccagacttgtatcgaggaatttgtcatccatgccctggccttctgcgaatccttgtacgatccctatcgcaattggaggcaccggatctcggggcgaatcctgagcaccgtcgagaagtcccgacagaaatacaaaccggcaagcctgaccgtagagttcgtgccattcttctaccaatgcttccaggagagcgaacatctgaaggagtcactgaaatgctgtctgttgcacctgtttggggcgatcgtggccggaggacagcgaaacgcgctgcaggccattagccctgccaccatggaagtcctgatgagggttttagcagattgcgattcttgggaggatggggaccccgaggaggtgggacgtaaggctgagcttactttgaaatgcctgacggaagtggtacacattctgctgtccagtaactcagaccagagacaggtggaaacatcaaccatactggaaaactactttaagctattaaatagcgaccatagcgccctccctaatcaacgcagaagcaggcagtgggaaaacagattcatcgccctgcagattaagatgctgaacactatcacggccatgctggattgcactgatcgcccagtccttcaggcaatcttcttaaactccaattgcttcgaacacctgatcaggctactacaaaactgtaaggtgttccagggccaactcgattgcctggccatttcaactattcaagctttgaccgccgtgatgaacaagtctccggccgcaaaagaggtctttaaggaacgtatcggttatactcacatgttggaggttctgaaatctttgggccagccccccctggagctgctgaaggaactgatgaacatggctgtcgagggggatcacacctctgtgggaattctcggcatttcgaacgtccaacctctgctgctactaattcagtggctccctgaattgcagtcacatgacctgcaaattttcatttcagattggctgaaacgcatctgttgcattaacagacagtcccgaaccacctgcgttaatgcaaatatgggaattaggattatcgagaccttggatctccacagctcactccaccaaacctgtgcagagaaccttattgctatccacgggtccctaggaagccaatctgtgtcttcagaggaaattcggcggctgctgcgtctcttgcgggtcgatgagtccgagagtgtccatccctacgtgaccccagtgacccgagctatcctcacaatggctcgcaagttgtcactggagtcagctctgcagtactttaacctgagccattctatggccggcatttccgtgccacccatccagaaatggccggggagtgcattcagcttctctgcatggttttgccttgatcaggatcagctgaccctcggaatcgccaataagggaggaaaaagaaagcagttatactcgttcttcaccggatcgggaatgggattcgaagcatttattacacactctgggatgctcgttgtcgccgtgtgtacaaaacgcgagtacgcgacagtcatgttgcctgatcatagcttctgcgactcactttggcacaacatcacagtggtccacatgcccggtaagagaccctttgggcagtcattcgtgtacatttacgataacggacagcagaaagtcagcgcccctctccggtttccagccatgaacgaaccttttacctcttgctgtatcggatcggcgggccaacgaacgactacccctcctccatctcagatcccagaccccccattctccagccctattactccacaccgcacaagcttcggtgggatcctgtctagtgcttcctggggggggacaatcgaaaagagcaagctgattacgaaactaataagcgccggaactcaggactccgaatgggggtgtccgacaagtttagagggccaactggggagcgttattatattctacgagcccttgcagcctcctcaggtaaaggccctttatctggcaggacccaactgtcttagtccatggaagtgccaagagtcagacatggcggacctgccaggaaatatcctcctctattatacagctaaagcctgcaagaattctatctgtttagacctctccaccaactgcctgcacgggagattgacggggaataaagttgtcaattgggatataaaggatattataaactgcataggtgggctaaacgtgctgtttccgcttctggagcagatctcgcatttttcagaaggccagatacctgaggagaagaacgaatccacagttcctgaatcagtgacacctgtcgaaggcgactggttagtttggacttcaactaaggcaagcgagtcccggctggagcggaatctggtcgcaacgttcatccttatcgtgaagcacttcatccaacgacaccccatcaatcagggcaacttgattcactcgcacggcgtggcaaccctcggagcactcctacagaaagtgccttcaacactcatggatgtaaatgtactcatggcagtacagctactcatcgaacaggtgtctctggaaaaaaatatgcaactactacaacagatgtaccagtacttgctttttgacttccggatctggaaccggggggacttcccattcaggatcggacatattcaatacctatccacaataatcaaagactcaagacgagtctttaggaaaaaatacggagtgcaatttctgctagacacactcagaatctactatggtaacggctgcaaatataacgaactttcattggacgacattcgcacaattcgcacaagcctctacggcctgatcaagtacttcctctgcaaaggtgggagccatgaggaaatacagtccattatgggatatattgcagccaccaatgaagaggagcaactgttcggcatcttagacgtgctgttctcacttctgaggaccagcccaacgaggggccaactgtttctcctgctctttgagcccggcaacgcagatattctttatgctttgctgctaaatcagaagtatagcgataggttgcgcgagattatcttcaagattatggagcaaatgctgaagtgcacgaatgtgtacgagcggagcaaacagcatatcaggctgagggaggtgggttatagcgggctgggactcttactgaatgaagctctggtgaacaccagtctgattaagaacctgactcatcaaataattaacactgaccccgtgataaactttaaagaccttctctctgttgtatacatctcacaccgcgcgcatatcaatgtccgagttgccatttgtcgcaaggtgctgcaaattctccagttccagcctgacgctgcccaccagatttctcagcaggtgggctggcaggacacacttgttcgacttttcttgaaagccaagttcgagaatgggaataccctccacaaacacagcagggccgtgctcatgaaagacaatgacaaaaacatgtccacagaagacaccaaaaaaaattcggatgagaaaactgacgaggaaaaaattacttcctttgctagcgccaatgtgagctccgaccagtggtcactcgaagacaggcatagtctcgattctaacacccccttgtttccagaagactcttctgttggggagcttagcttcaaaagcgagaatcaggaagagttttggcactccaacccctcccatctgtccctagacctctctggaattgactcatgcgaaatgtccgattccgggagccaggtgcctgatagtctaccgtcgaccccctctcccgtagagagcactaaaagcttttccgtccattcagacagggagtcaagtataaccaatgacatgggtttttctgatgatttttcacttctcgaaagccaggagcgctgcgaggaggagcttctacaactcctgacccacatcttgaactatgtcatgtgcaaggggttagagaaatctgatgatgacacctggattgagagaggacaggtttttagcgcactgtcgaagcccggcatcagctctgagctgctgcggccaagcgacgagatcaaactaacactgctacaaaagatgctggagtgggcaattagcgagaatagagaagcaaagacaaacccggtcaccgcagagaacgccttcaggctcgtgctcattatacaggacttccttcagtctgagggattggtcaactcaaacatgtggacagagaaactgctagaggatatgatgttgctttttgattgcctttctgtgtgttactctgaatctccagtgtgggttaaactttcccagattcagatccagcttctgctgggattcatcggacgcggaaacctgcaggtctgcgccatggcatccgctaaactgaatacactactgcagaccaaggtgattgagaatcaagatgaggcgtgctacatcttgggaaagctggagcacgtgctgtctcaatcaatcaaagaacaaactgaaatatattcttttctaatccctttggtaagaacactggtctcaaaaatatacgagctgctatttatgaatctgcacctgccgtccctaccatttaccaacggaagttcttctttctttgaggatttccaggaatactgcaactctaatgaatggcaggtatacattgagaagtatattgtgccgtatatgaaacaatacgaggcccacacattctacgatggtcacgaaaatatggcgttgtattggaaggactgctacgaggccctgatggtgaacatgcataaacgcgacagagaggggggtgagagtaaactgaaattccaggaactctttgtggaacccttcaatcgcaaagcaagacaagagaatcttcgctacaataatatgcttaaacaactgtccagccagcaactagcgaccctgcgaaggtggaaggcaatccaactgtatctgacctgcgaacggggaccttgggccaagagaaagcagaacccaattcactggaagctcgcaaatgtggagaactactcacgtatgcggctgaaacttgtccccaattataactttaagactcatgaggaggcgtccgcactaagagacaatctagggatccagcactcccagccatcaagcgacaccctattactggaggttgtgaagcaggttaaggtatccgacatggtggaggataagctggatctgcccgaggaggacattaccgcgagggtcaacgtggacgagaaagaagaacaggaccagaaggaaaagttggtactgatggaggattgtgagctgatcaccatcatagacgtcatcccaggcagactggagataactacacaacacatatatttttatgacggttctatcgagaaggaggatggagtgggtttcgacttcaagtggccccacagccagattagagagatccatttgcgaaggtacaatcttcggcggagtgccctcgaaatcttccacgttgatcagagtaattactttctgaatttcaagaaggaagtaagaaacaagatatatagtcggttgctgagcctacacagtccgaacagctactacggaagccgctctccacaggagctctttaaggcctcaggactgacacagaagtgggtgaatcgtgagatttccaactttgattacctgatccaaattaatacaatggccgggagaacgtataatgacttagctcagtaccctgttttcccctggattctgcaggactatacctccgaggagcttgatcttaataaccctgccgtctttagggacctgtccaaacccataggtgtggtcaacgagaaaaatgcaaaggccatgagagaaaagtacgagaatttcgaggacccgatggggacgatagacaagtttcactacgggacccattacagtaactctgccggcgtcatgcactatttgatccgggtggagcccttcactacattgcatattcagttgcagagtgggcggttcgactgcgccgatcgacaattccatagtatccccgccacttggcaggccctaatggacaacccctatgacgtgaaggagctgatccccgagttcttttacttcccagagtttctagagaatcagaatcaattcaatcttggtagactgcagattagtaaggagctggtaaatgacgtgatcctccccaagtgggcaaaaagcgccgaagacttcatttacaagcatcgcaaagcccttgagtcagaatacgtctcagcgcatctgcatgagtggatcgacctgattttcggttacaagcagcgaggtccagccgctgtggaagccctgaacgttttctactactgttcatacgagggcgccgtggacctagacgccctcacggatgagaaggaaagaaaggccctggagggaatgataaacaacttcggccagaccccttgccagctcctcaagatcaccatatccatgaattacgtcatcggaacgcatgggtggctgccatatgatcggaacatctctaactacttcacctttatcaaggaccagacagtgacaaacccaaagacgcaaaggtcaatcaatgggagttttgctcccggcctggagattacctctaagttgttcgtcgtgagccacgacgctaagttactgttctctgccgggtactgggacaattccattcaggtgatgtccctgaccaagggaaagatcatctcccatatcataagacacatggatatcgtgacttgcctagctacagattactgtgggattcatctaatcagcgggtctagagacaccacatgtatgatctggcaaattacacaacaggggggagttcccgtcgggctcgcttccaagcctttccagatcctgtacgggcacaccaatgaggtgctctccgtagggatttctaccgagctggatatggctgtctcaggctctcgggatggcactgtaatcatccacaccatcccaaacctcgccatttcatgggagggacatatagtggtctattcatctaccgaggagaagaccacgctgaaggataaaaacgccttgcacctgttctcgattaatggcaaatacctgggttctcagattttaaaggagcaggtctcagatatttgtatcatcggagaacatattgtgaccgggagcatacaggggttcttatctatccgtgatctgcattcacttaatttgtccatcaacccactagctatgaggctgcccatccactgtgtctgcgtcacaaaggagtattcccacatcctcgtcggcttggaagatgggaaattaatcgtggtgggggtgggcaagccggccgagatgcgaagcggccagctctcgcgaaaattttggggcagctctaaacgcctctcgcagatatccgcaggggagaccgagtacaacacccaagattcaaaatag

SEQ ID NO: 42896 - DNA, 8085 bp, Artificial Sequence
  derived and/or modified sequence
atggccagccgggagcggctgttcgagctgtggatgctgtactgcacaaagaaggaccccgattatttgaagctgtggcttgacactttcgtgtccagctacgagcagttcctggacgtggatttcgaaaaactgcctacaagagtggacgacatgcctcccggtatcagcttgttgccggataacattctgcaggtattaaggattcagctgctccagtgtgtccagaagatggcagatgggctggaagagcagcagcaggctctatccattctactggtaaaattttttattatcctctgtcggaatttgtccaatgtggaggagattgggacctgttcttacattaactatgtgatcacaatgaccacattatatatccagcagttaaaatcaaagaagaaggaaaaagaaatggcagaccagacttgcattgaggaattcgttatacatgcgcttgcgttttgtgaaagcctgtatgatccctacaggaactggcgccaccgaataagcgggcgcattctgagtacagtagaaaagagcagacagaagtataaaccagcttcacttacggttgagttcgttccgttcttttatcagtgttttcaggagtccgagcacctgaaggaatctcttaagtgctgtctgcttcacttgttcggagcaatcgtagcaggcggccagaggaatgctcttcaagccattagtcccgccacaatggaagttctcatgagggtcctggcggactgtgattcatgggaggatggtgatccggaggaggtgggtcgtaaggctgagctgacacttaagtgccttaccgaggtggttcacatactcttatcttccaattccgatcaacgacaggtggaaacgagcacaatcctagagaactacttcaagctccttaacagcgaccattctgccctccccaatcagcgaaggtcccggcagtgggaaaaccggttcatagcgttgcagattaagatgctgaatactatcaccgccatgttggattgcaccgacaggcccgtcctgcaggccatcttcctgaattcaaactgcttcgagcacctgatcagactgttacagaattgcaaggtgttccaggggcagctcgactgcctagcaatttccaccatccaggctctgacagcagtgatgaacaagtcaccggcggccaaagaagtgttcaaggaaaggatcggctacacgcacatgctggaagttctgaagagtctaggccagcctcctctcgagttactgaaggaactcatgaacatggcagtggaaggcgatcatacaagcgtcgggattctcgggatttcgaacgtacaaccgctgctgctgctgatacagtggctccctgagctccaatcccatgatctccagatcttcatctccgattggctgaagaggatctgttgtatcaaccgccagtccaggaccacatgcgtgaacgcaaatatgggtataaggattatcgagacattggatctgcacagtagcctccatcagacatgtgccgaaaatcttattgccattcacggctctttgggctcccaaagcgttagctccgaagagatccgacgcctcttaagactcctcagggtcgacgagtcagaatcagttcacccatatgtgaccccggtgactcgggcgatcctgactatggcccgcaagctcagcctagagtctgcactccagtactttaatctgagccactccatggcgggcatttccgtccccccaatccagaagtggcctggctccgccttctctttcagcgcatggttttgcctcgatcaggatcagctcaccttaggcatagctaacaagggtggtaagcgcaaacagctgtactccttctttacaggatcaggcatgggctttgaggccttcattactcattcaggaatgctggtcgtggccgtgtgtacaaagagggaatatgccacagtgatgctacctgatcatagcttctgtgactctctttggcataacatcacagtcgtgcacatgcccggcaagcgcccattcggtcaaagctttgtttatatttacgacaatggtcagcagaaagtctccgctcctctgcgctttcccgccatgaatgagccttttacttcctgctgtattggatcagcgggccagcggacaaccacacctcccccatcacagatcccagacccgccgttctcttctcctatcaccccacatcggacgagcttcggggggattctgtctagtgcgtcttggggagggacaatagaaaagtccaagttgattaccaaactcatctcggccggaactcaggattccgagtggggctgcccaacctcgctcgaaggacagctgggatcggtgattattttttatgagcctctgcagcctccccaggtgaaggctctctatttggccggacccaattgccttagcccctggaaatgccaggaatccgatatggcagacctgcctggcaacatccttctgtactacacagccaaagcctgtaagaactctatctgtctggatctgtcgactaactgcttgcacggccggctcacaggaaacaaggtcgtgaactgggatataaaagacatcatcaattgcatcggaggcctgaacgtcctgtttccactgcttgagcaaatatcccacttctctgagggccagattccagaggagaagaatgagagcactgttccggagtccgtgactcccgttgagggcgattggctggtatggacatcaacgaaggccagcgagtcaaggctcgaacggaacttggtcgccacatttattttgatcgtaaaacactttattcaacgccatcccataaatcagggcaacctaatccattctcatggggtggcaactttgggggcgctgcttcagaaagtgccatccacactgatggatgtgaacgtgctaatggccgtgcaattattgatcgaacaggtgtcccttgaaaagaacatgcagctgttacagcagatgtaccagtatctgcttttcgatttccgcatttggaaccgcggcgatttcccattcagaataggccatatccagtacctctccacgatcatcaaagactcaaggcgggtgttccgcaaaaagtacggcgtacagttcttgctggataccctcaggatctactatggaaatggatgtaagtataacgagctcagtttggacgacatacgtacgatccgaacgtcgttgtacggactcattaagtacttcttatgtaaaggtggttcccacgaagagattcagagcattatgggatacattgctgccaccaatgaggaggagcaacttttcgggatcctggatgtcctgttctccctcctacgtacttcaccaacgagaggccagcttttcctgctgctttttgagccaggcaatgcagacattctctacgcattattgttaaaccagaaatactccgacagattgcgcgagatcatcttcaagatcatggaacaaatgttaaagtgtacgaacgtgtacgagcgcagtaaacaacacatccgcctaagggaggtaggctattctggcctgggccttctgttaaatgaggctctcgtaaatacgtctctgattaagaatttgacccaccagattattaataccgaccccgtgattaattttaaggacctgttaagtgtcgtttacatatctcaccgggcccacatcaacgtccgtgtggccatttgcagaaaggtgctacagatcctgcagtttcagcctgacgccgctcatcagatctcccagcaggtcggctggcaggatacactggtgaggctgttccttaaagcaaagttcgaaaacggaaacacactccacaaacattccagggccgtcttgatgaaagacaatgacaagaacatgagcacggaggatacaaagaagaactctgatgagaaaaccgacgaagaaaaaatcacctcatttgcctcagcaaatgtttcttctgaccaatggtccctggaggaccgtcacagtctggactccaatactcccttgttccctgaggatagcagcgtcggcgaactgtcatttaagagtgagaatcaagaggaattttggcattctaatccatcacaccttagtctagacctgagcggtattgatagttgtgaaatgtcagactcaggatctcaagtgcctgacagcctgccaagtaccccaagccctgttgagagtacaaaaagcttctccgtgcattctgatcgggagtccagcattactaatgacatgggattttctgatgacttctctctgcttgagtcgcaggaacgctgcgaagaagagcttctacagttgttgacccatatcttgaactacgtaatgtgcaagggtcttgagaagtccgacgatgatacatggattgagcgcgggcaggtgtttagtgcactctctaaacccggaatctctagcgagctgttacgcccgagcgacgaaattaagcttaccttgctgcagaagatgttggagtgggcgatttcagaaaacagggaggctaagacaaacccggtaaccgcggaaaacgcctttcgtctagtcctgattattcaggatttcctgcagagtgaggggttagtgaactccaatatgtggacggaaaaactgctcgaagacatgatgcttctatttgattgtttaagcgtttgctattcagaaagtcctgtgtgggtgaaactgtctcagattcagattcagctgctcctggggttcatcggccgcggaaatttacaggtttgcgcaatggcatccgccaagctgaatacgcttctgcagaccaaggtcatagagaaccaggacgaggcttgttacatcctgggtaagctggaacatgtattatcacaaagtatcaaggaacagaccgaaatctattcgttcttgatacctctagtacggaccctagtcagtaaaatatacgaactgctatttatgaatctccacctcccgtccctgccgtttactaatggctcatcatctttctttgaggacttccaagagtactgcaattcaaatgaatggcaagtgtatattgaaaagtacattgtgccttacatgaagcaatacgaagctcacaccttctatgacggccacgagaatatggcgctttactggaaggactgctatgaagccctcatggtgaacatgcataagcgcgacagggaggggggcgaatctaaattgaagtttcaggagttgtttgtggagcccttcaaccgcaaggcgcgtcaggagaacctgagatataacaacatgcttaagcagttgtcatcccaacagctggctaccttgcgaaggtggaaagcaatccagctgtacctgacatgcgagcgtgggccatgggctaaacgcaagcaaaatccaatccattggaagctcgcgaatgtggaaaactatagccgcatgcggctaaagttggtgcctaattacaactttaagactcatgaagaggccagtgcactccgggacaatctgggcattcaacacagtcaaccatcctctgacaccttacttctggaagtggtgaaacaagtgaaggtatctgacatggtggaggataaactcgatctacccgaagaagatatcacagcccgggtcaacgtagacgaaaaggaagaacaggatcagaaggagaagttggtgctgatggaggactgtgaactgattactattattgatgtcatcccaggtcggctggagattacaacgcagcatatttatttctacgacggaagcatcgaaaaggaggacggtgtgggttttgactttaagtggccacactcgcagatcagagagatccacctgcgccgctataacttgcggaggagtgctctcgaaatatttcacgtggaccagtcgaattattttttgaattttaagaaggaagtccgcaacaaaatctactctcggctcctgtccctacattcccccaattcctactatggctccaggtccccccaggagttatttaaggcctctggcctgacccaaaagtgggttaatcgtgagatttccaatttcgattaccttattcagatcaacaccatggccggcaggacgtataatgatttggcccagtatcccgtttttccttggattctccaagattatacgagcgaggagttggatcttaataaccccgccgtgttccgtgatctttctaaacccatcggcgtggttaacgagaagaatgccaaagctatgagagagaagtacgagaacttcgaggatcctatgggcaccatagataaattccattacgggacccattactcgaattcagctggcgtgatgcactatcttattagggtcgaacccttcaccacactgcacatccagctgcagagtggtcgtttcgattgcgccgatcggcagtttcactctattcctgccacatggcaagccctgatggataatccttacgacgttaaagagctgatccctgagttcttctatttccctgagtttttggaaaaccagaatcagtttaacctcgggcgtttacagatctctaaggaactggtgaacgacgtgatactgcctaagtgggccaagagcgcagaggactttatctacaagcatcgaaaagcacttgagtccgagtacgtttccgctcacctgcatgagtggattgacttgatcttcggctataaacaacgggggccagcagcagttgaagcactcaacgtgttctactattgctcgtatgagggtgcagtggatctggacgcattgactgatgagaaggagaggaaggccctcgaaggcatgattaataactttgggcaaacgccatgccagctgctcaaggagcctcaccccccgcggctcagcgcggaggaagctgtgcaaaagcctaccaaaattgacacgtctactctgaacctctttcagcacttgcctgagctgaaatcgttctttattgaaggtatatcagacggaattcccctcctgaaagcaactattcccaagaatcagtataggagtttcatgagccagggttcgcctgagctgctcatcactatttccatgaactatgtcataggtacccacggatggctgccttacgaccggaatatatccaattactttacttttatcaaggaccagaccgtgaccaatccaaaaacccaaaggtctatcaatggctcctttgcccctggactcgagataacatccaagcttttcgtcgtgtcccacgatgcaaagctcctcttctccgcaggttactgggacaatagcattcaggtcatgagtctgaccaaaggcaagataatctcccatattatccggcatatggatatcgtgacctgcttggcaactgactactgcgggatacatctgatttctgggtctagagacactacctgtatgatatggcagatcacccaacagggaggagtccctgtcgggcttgccagtaaacccttccaaattctttacggacatactaacgaggtgctgtcagtaggcatatccacagagctggatatggcagtgtctgggagtagagacggtacggtgattatccatacgattcagaagggacagtacatgcggacactgcgccctccctgtgaatcatccctgttcctgacaatccctaatctggccatcagctgggaaggacacattgtggtctactcctcgaccgaagagaaaactaccctcaaggataagaatgcgcttcatctgttcagcatcaatggaaagtatctggggagccagattctaaaggaacaggtgtcagacatttgcatcattggtgagcacatcgtcaccgggagcattcaaggctttctgagcatccgcgatctgcactcactcaacttgtctattaaccccctcgctatgaggcttcctatccattgcgtttgtgtgactaaggagtatagtcatatcctggtgggcctggaagacggcaaattaatcgtggtgggagttgggaaaccggctgagatgaggagcggccagctgtccaggaagttttggggaagttctaagcgcttgagccagatctccgccggagaaacggagtataacactcaggacagcaagtag

SEQ ID NO: 42897 - DNA, 8788 bp, Artificial Sequence
  derived and/or modified sequence
gctcgtctgcctggctgcggggtgacacggggcttcgccttgggaaggggtcgagggaagcagttagacggctgccgggcggcggctgccgcgcggcacacaatatttatttaattgcccaactaccactgatgaagatatattggagtgactgctgaaattgcctttttgtttttaaccagaggacagtccatttgtttcacttctttttgctttctttactgctatgagctttactgaacggctgaaaaacttggaaaataaaatggacatgctgtagtcttgaacataatttttttaaggaaaacttaaagtgccagagtgaaagccagaatggcatccagagagaggctctttgaactttggatgctttattgtacaaagaaagatccagattacctgaagctgtggttggacacttttgtttctagctatgaacaatttttagacgttgactttgaaaagctgcctaccagggtagatgatatgcctccaggaatatctctgcttcctgataatattctgcaggttctgaggatccagcttctacagtgtgttcagaaaatggcagatgggttagaggaacaacagcaagccttgtcaattttgcttgtcaagttcttcattattctttgcagaaatctatcaaatgtggaagaaattgggacttgctcgtacattaattatgtcatcaccatgacaacactctatattcagcaattaaaaagcaaaaaaaaagagaaggaaatggcagatcagacatgtattgaagaatttgtgatccacgcattggcattttgtgaaagcttatatgatccatatcggaattggagacatagaatttcaggacgaatccttagtactgtggaaaagagcagacagaaatataaaccagcttctctcacagtggaattcgtccctttcttttatcaatgttttcaggaaagtgaacatctcaaggaaagtcttaaatgttgcttattgcatctctttggagccattgtagccggtgggcagaggaatgctttgcaagcaatttctccagccactatggaagttcttatgcgagtattggcagattgtgattcctgggaggatggagatcctgaagaagtgggtaggaaggcagaactaactctgaagtgccttacagaagtggtacatatccttctcagtagcaactctgatcagcgtcaagtggaaaccagtactattctggagaactattttaaattgctaaattcagatcattcagctttacctaatcaaaggaggtccagacagtgggaaaaccgatttattgctctacagatcaaaatgctgaataccatcacagccatgttagattgtacagatagacctgttcttcaggccatttttcttaacagcaattgctttgaacatctcatacgactgctacagaactgcaaggtgtttcagggacaattggattgtttggccatatcaaccattcaggctttgaccgcagtaatgaacaaatctccagctgctaaggaagtatttaaagaaagaattggttatacacatatgcttgaagtattaaaatccctgggtcagccaccactggaattacttaaagaacttatgaatatggctgtagagggtgaccacacttcagttgggattttgggcattagtaatgtccaacctctcttgcttcttatccagtggcttccagaactacaatcccatgacctgcaaatcttcatctctgattggctgaaaagaatttgttgtattaatagacagagtcgaactacttgtgtcaatgcaaacatggggattagaatcattgaaacccttgacttgcattcttccctccatcaaacttgtgctgagaacttgattgcaatccatggttccttggggagtcagtcagtgagctcagaagaaatccgtcgactactgagattgctgagagtggatgaatctgagtctgttcacccttatgtcactcccgtgactcgagcaatcctgacaatggcccgaaaactaagtctagagagtgccctccagtatttcaatttgtcacatagtatggcaggaatttctgtgcctcccatacagaaatggccagggtctgccttttctttcagtgcttggttttgcttagaccaggatcagttgactcttggcattgctaacaaaggagggaaaaggaaacaattgtacagtttttttacaggaagtggcatgggttttgaagcctttattacccattcaggtatgttggtcgtggcagtgtgcacaaaaagagaatatgcaacggttatgcttcctgaccacagtttctgtgattccctctggcacaacataactgttgtccacatgcctggaaaaaggccttttggtcagagcttcgtctatatctatgacaatggacaacagaaggtttctgcccctctcagatttcctgccatgaatgaaccctttacttcctgttgcattggttcagctgggcaaagaaccaccactcctccaccatcccaaatcccagatccacctttctcttctcccattacccctcatcggacatcatttggtggaattctgtcatcagcctcctggggaggaacaattgaaaaatcaaaattgattaccaaattgatatcagctggaacccaagacagtgaatgggggtgtcccacatctctggagggtcagctaggatctgttatcatcttttatgaaccactacaacctcctcaggtgaaggcattatatttagcaggtccaaattgtttaagcccttggaagtgtcaagagtctgacatggccgacctgcctggtaacatccttctttactacacagcaaaggcctgcaaaaattcaatctgtcttgatttatctactaattgtttgcatggaagattaacaggaaacaaagtagtgaactgggacattaaggatatcataaactgcataggtgggttaaatgtactctttcctttattggaacaaatcagccactttagtgaaggacagattcctgaagaaaagaatgaaagcacagttcctgaatcagtaacacctgttgaaggagattggctcgtatggacttccacaaaggcctcagagtcaagactagagagaaacctagttgcaacatttatcttaattgtgaaacattttattcagagacatcctatcaaccagggcaatcttattcactcccatggagttgcaactcttggtgctttacttcagaaggtgccaagcaccttgatggatgttaatgtgttgatggcagttcagttactaattgaacaagtatcattagagaaaaatatgcagctcctgcaacaaatgtatcaatatttactctttgactttcgtatttggaaccgtggagattttccctttcgaatcggtcacatacagtatctttcaaccatcattaaagacagcaggagagttttccgaaagaagtatggtgtgcagtttctcctagatacacttaggatttattatgggaatggttgtaaatataatgaactatctctagatgatattcgaacaataaggacttctttgtatggactaattaaatattttctgtgcaaaggtggatctcatgaagagatacaaagtattatggggtacatagctgctactaatgaagaagaacagctctttggaattttggacgtgctcttcagtctcctacgtaccagcccaaccagaggtcagcttttcttactgctttttgaaccaggaaatgctgacatactgtacgcattgctcttaaatcagaagtactctgacagactaagagaaatcatttttaagattatggaacaaatgttgaaatgcacgaacgtttatgagcgtagtaaacaacatattcgactcagagaagttggctactcgggactgggactccttcttaatgaagcacttgttaatacttctcttattaaaaacctcacccatcaaatcataaatacagatcctgttattaatttcaaagatctactatctgtggtatatatatctcacagagcacatataaatgttagagtggccatctgcagaaaggttttgcaaattttgcagttccagccagatgcagcacatcaaatatcacagcaagtgggttggcaagacaccttagttaggctttttttaaaagcaaaatttgaaaacggaaatactcttcataagcacagtagagctgttttaatgaaagacaatgataaaaatatgtcaactgaagataccaagaagaactctgatgaaaaaacagatgaggaaaaaatcacctcttttgcctcagctaatgtgtcttcggatcagtggagtttggaggatagacactctttagactcaaacacaccattatttccagaagatagctctgtgggagaattgtctttcaaatcagagaatcaagaggaattctggcatagtaacccttcacatttgagtttagacctcagtggaattgactcatgtgaaatgagtgatagtggaagtcaagtgccagacagtctgcctagcacaccatccccagtagagtctactaaatcgttttctgtgcactctgacagagaaagcagcatcacaaatgatatgggctttagtgatgacttctctttacttgaaagccaagagagatgtgaggaggagcttcttcaattactgacacatattttgaattatgtaatgtgtaagggactagaaaagtctgatgatgatacttggattgaacgaggacaagtgttttcagcactaagtaaaccaggaatatccagtgaactacttcgaccatcagatgaaataaaactaactttgctacaaaagatgttagaatgggcaatctcagaaaacagagaagcaaaaactaatccagtaactgctgaaaacgccttccgactagtgctgatcatacaggactttcttcagtcagagggactagttaattcaaacatgtggaccgagaagcttttagaggatatgatgctgctctttgactgtctgtcagtctgctattctgaaagtccagtatgggtaaaactctctcaaattcagatccagttgcttctaggattcattggaaggggtaatttgcaggtttgtgcaatggcatcagctaagctaaatacccttcttcagaccaaagtgattgaaaatcaggatgaagcatgttacattttagggaagctggaacatgttctaagtcaatcaatcaaggaacagactgaaatctactcatttctgattccccttgttcgtaccctggtttccaaaatttatgagcttctcttcatgaacttgcacctaccttctttaccttttaccaatggtagctcctcattttttgaagattttcaagaatattgtaattcaaatgaatggcaagtttacattgaaaaatatattgtaccttatatgaagcagtatgaagctcatacattttacgatggtcatgagaacatggcactttattggaaggattgttatgaagctttaatggtaaatatgcataaacgagaccgggaaggaggggaaagcaagctcaaatttcaggagctgtttgtggagccatttaatcgaaaagcacgccaagagaacctgaggtataataatatgcttaaacaacttagcagtcaacagttagccactcttagacgctggaaagcaatacagctctatcttacatgtgaaaggggaccttgggctaaaaggaaacagaatccaattcactggaagctagctaatgtagagaattattcccgcatgagacttaagctggtaccgaattataatttcaaaacccatgaggaagctagtgccttgagagataatctgggtatccaacactcacagccttccagtgatacattgcttttggaagtagtgaaacaagtaaaagttagtgatatggtggaggataaattagaccttcctgaagaggatataacagctagagtaaatgttgatgagaaagaagaacaggatcaaaaagaaaaattggtattgatggaagactgtgaactcattacaataattgatgtaattcctggcagattagaaatcactactcaacacatttacttctatgatggcagcattgaaaaagaagatggagtaggctttgatttcaagtggcctcattctcaaattcgagagattcatctccggcgttacaatttaagaagatcagcccttgagatttttcatgttgaccaatccaactactttctcaatttcaaaaaagaggttagaaacaaaatatatagccgactgttgtcacttcattccccaaatagttattatggaagcagatcaccacaggagttattcaaagcatcaggattgacacagaaatgggtaaacagagagatatcaaattttgactacctcattcaaataaatacaatggcaggacgaacctataatgaccttgcacagtatcctgtgtttccctggattttacaagattatacttcggaagagttggaccttaataaccctgctgtatttcgagatctttccaaaccaattggggtagttaatgaaaaaaacgccaaagctatgagagaaaaatatgaaaattttgaggatcctatgggaactattgataagtttcactatggtactcactattcaaattctgcgggggtcatgcactatctcattcgtgtagaaccgttcaccaccctccacatccaacttcagagtggaaggtttgactgtgcagatcgacagttccattctattcctgctacctggcaagctcttatggataatccatatgatgttaaagaacttattcctgaattcttctatttcccagagtttttggaaaatcaaaatcaatttaacttgggtcgtctacagatttccaaagaattagtaaatgatgtcattctcccgaaatgggctaaatcagctgaagatttcatctataaacataggaaagctttggagtctgaatatgtttcagctcatcttcatgaatggatagatctgatctttggctataaacagaggggaccagctgcagtagaggcactcaacgttttctattattgtagttatgaaggagctgtggatctggatgccttaacagatgagaaagaaagaaaagccttagaagggatgattaataattttgggcaaacaccctgtcaattattaaagataacaataagcatgaattatgttattggaacccatggatggttgccttatgacagaaacatttctaattactttacattcatcaaggatcaaactgtgacaaatccaaaaactcagcgcagtataaatggttcttttgctcccgggctagagatcacttctaagctatttgtagtatcacatgatgcaaagttgctcttcagtgctggatactgggataatagcattcaagtgatgtcacttacaaaaggcaaaattatctcacacatcatccggcatatggatattgtgacttgcttagctacagattactgtggaatacatttgatttctggttccagagatactacatgtatgatatggcaaataacacaacagggaggtgttcctgtgggcttagcatctaaaccttttcagattctttatggacacaccaacgaggtactgagtgtcggcatcagcactgagctagacatggcagtgtcaggatcaagggatggaacggtgattatacataccattcctaatttggctatatcttgggaaggacatattgttgtctactccagcactgaagaaaagaccaccctcaaggataagaatgcattacatctgttttctataaatggcaagtatctagggtctcaaatcctgaaggaacaagtatcagatatatgtataatcggagaacacattgtcacaggcagcatacaaggattcctgtctataagagatctccacagcttgaatctcagcatcaacccattagccatgcgactgcctatccattgtgtttgtgtcaccaaagaatacagccatattcttgtaggtttagaagatggcaaattgattgtagtgggtgttggcaagcctgctgagatgcgttcaggtcagctttctcgaaaattttggggatcgagcaagcggctcagccagatttcagctggagaaactgaatataatactcaagattccaagtgattgttatttccattttctgttatgattactgaaacctgatttattgctttgtcactttaaccacatctctcaactctctgcaatgttgcaaggcttttatccctgaaaatcatttacagataaccacaatttgctgtggtatataaactaattcttggtctatactaagatgtatttgagaaaatacatttgatttgattttgtggcccattcctaaaggtcattgtatccatttttaaaacaaactaaaatgagaacattaggttcaattttcttattattccaaatgataaaatttaagatttttctaataaaagagtacagataatgggacagttgagagagatggctttaaatacattcttaagtaatcattttcctatttactgaccactgtaatgaaaatatatcaatttatttatggaactcctgattggggataatattttaaaggtatctgttgcacacttggattttcaaaactcggtgaaagttacaagtttgcatggtaagaataaaataagaatattgaaactggtacattagctaattctattactacttagcgtgtttctaatgagaagttactgaaatctattactgtccttaataaaaattgagtagaaaaaagtggaactag
